United States Patent Application Publication US 2014/0259212 A1 - sequence listing, part 39

SEQ ID NO: 140225 - protein, 400 aa, Arxula adeninivorans
  misc_feature (380)..(380): The Xaa at location 380 stands for Arg, or Gln.
MADFIRTQIFGTCFEITSRYVDLNPVGMGAFGLVCSARDQLTNQNVAIKKIMKPFSTPVLAKRTYRELKLLKHLRHENLITLSDIFISPLEDIYFVTELLGTDLHRLLTSRPLEHQFIQYFLYQILRGLKYVHSAGVVHRDLKPSNILINENCDLKICDFGLARIQDPQMTGYVSTRYYRAPEIMLTWQKYDVEVDIWSAGCIFAEMLRGKPLFPGKDHVHQFSIITELLGNPPDDVIETIGSENTLNFVKSLPKRERIPLSQKFPNADPDAVDLLEKMLVFDPRKRINAADALAHPYLAPYHEPSDEPVASEKFDWSFNDADLPVDTWKVMMYSEILDFHNVDSSAVEQQQQQPQPPQPQLQQQQQPPQQPQQPQQPQXAQQPVQPVQGDYVPQVAPRS

SEQ ID NO: 140226 - DNA, 1272 bp, Aspergillus oryzae
  CDS (1)..(1272)
atggctgatctacgaggacgtaagatcttcaaggtcttcaaccaggattttattgtggatgaacgatacaatgtcacgaaggagttgggtcaaggtgcatatggtattgtctgtgccgccacgaacatccagaccggcgaaggtgtcgccatcaagaaagtcaccaatgtcttcagcaagaagatcttagccaagcgcgccttaagagaaattaagttgcttcagcatttccgaggccaccgtaatatcacttgtctgtatgacatggacatcccgcgcccagataacttcaatgaaacatatctgtatgaggagttgatggagtgtgatctcgccgctattatccgttccggacaacctttgaccgatgcccacttccagtcttttatttatcagattttgtgtggtctgaagtatatccactcggccaatgtattgcatagagatttgaaacccggaaacttgctggtcaatgccgattgtgaactcaagatttgcgatttcggattggcgcgtggtttctcgattgacccggaagagaacgcaggttacatgaccgaatatgtcgcgacaagatggtaccgtgctccggaaatcatgttgagcttccagagttacactaaagctatcgatgtgtggtccgtgggttgcatcttggctgaacttcttggcggccgccccttcttcaagggtcgtgactatgtcgaccagctcaaccagattctgcactacctgggcactccgaacgaggagaccttgagccggatcggctctccacgggcccaggagtacgtacgcaacttgcctttcatgcccaagatccccttccagcgcttgttccccagtgccaaccctgatgcgcttgacttgctcgaccgcatgctggccttcgacccctcgtcgcgtatctcggttgaagaggccctggagcacccatacctgcacatctggcacgacgcatcggacgagccgacgtgccccacaaccttcgatttccacttcgaagtggtggacgacgtacaggagatgcgtcgtatgatctacgaggaagtcgtgcgcttccgtgccgccgtccggcagcagtctcaggcgcaggccgccgctgccgcccaacagcagcagattgcccagcagaccaacgtcccgatccccgagaaccagcagggcgtttggaagcaagaggagcccaagcctcaagaggcgctcgccgcgggcggtggcgtccacaacgatctggaatcgtcgctgcagcgtggaatggacgtacaataa

SEQ ID NO: 140227 - protein, 423 aa, Aspergillus oryzae
MADLRGRKIFKVFNQDFIVDERYNVTKELGQGAYGIVCAATNIQTGEGVAIKKVTNVFSKKILAKRALREIKLLQHFRGHRNITCLYDMDIPRPDNFNETYLYEELMECDLAAIIRSGQPLTDAHFQSFIYQILCGLKYIHSANVLHRDLKPGNLLVNADCELKICDFGLARGFSIDPEENAGYMTEYVATRWYRAPEIMLSFQSYTKAIDVWSVGCILAELLGGRPFFKGRDYVDQLNQILHYLGTPNEETLSRIGSPRAQEYVRNLPFMPKIPFQRLFPSANPDALDLLDRMLAFDPSSRISVEEALEHPYLHIWHDASDEPTCPTTFDFHFEVVDDVQEMRRMIYEEVVRFRAAVRQQSQAQAAAAAQQQQIAQQTNVPIPENQQGVWKQEEPKPQEALAAGGGVHNDLESSLQRGMDVQ

SEQ ID NO: 140228 - DNA, 1185 bp, Solanum lycopersicum
  CDS (1)..(1185)
atggatggttcagctccgcaaacggatacggtgatgtcggatgcggcggcgggacagcaacctgctatgccgccgctgccgatggccggaatggagaatattcctgcaacgttgagtcacggtggccggtttattcaatacaatatttttggtaatatatttgaagttactgcgaagtataagcctccaattatgccaatcggtaaaggagcttatggtattgtttgttctgctttgaattcggagacgaatgaacatgttgcaataaagaaaattgcaaatgcttttgataacaaaattgatgccaagagaactttgcgtgagatcaagcttcttcgacatatggatcatgaaaatattgttgcgattagagatataattccaccacctcaacgagaagcatttaatgatgtctatattgcatatgagcttatggacactgatctccatcaaattattcgctctaatcagggattatcagaagaacattgccagtatttcttgtatcagatcctccgtggattgaaatacatacattctgcaaatgtgttgcatagggacttgaagcctagcaatctcctcttgaatgccaattgtgatttaaagatatgtgattttgggctagctcgtgtcacttctgaaactgactttatgaccgaatatgttgtgacaagatggtaccgacctccagagctgttgttaaattcttctgactatactgcagctattgatgtttggtcagttggttgcattttcatggaactgatggacagaaagcctctgtttcctggtagagatcatgtacaccagctacgtctgcttatggagttgattggcaccccgtctgaggctgaaatggagtttttgaatgagaatgcaaagcggtatatcagacaacttcctctttaccgtcgacaatcatttgtcgaaaaatttccacatgtaaaccctgctgctattgatcttgttgagaaaatgttgacatttgatcccagaaggagacttactgttgaagacgcgcttgctcatccttacctaacatcgcttcatgatattagtgacgagcccgtttgcatgactccttttagcttcgattttgaacagcatgcccttaccgaggaacaaatgaaagagctgatttacagggagggtcttgcatttaatcccgaataccagcacatgtga

SEQ ID NO: 140229 - protein, 394 aa, Solanum lycopersicum
MDGSAPQTDTVMSDAAAGQQPAMPPLPMAGMENIPATLSHGGRFIQYNIFGNIFEVTAKYKPPIMPIGKGAYGIVCSALNSETNEHVAIKKIANAFDNKIDAKRTLREIKLLRHMDHENIVAIRDIIPPPQREAFNDVYIAYELMDTDLHQIIRSNQGLSEEHCQYFLYQILRGLKYIHSANVLHRDLKPSNLLLNANCDLKICDFGLARVTSETDFMTEYVVTRWYRPPELLLNSSDYTAAIDVWSVGCIFMELMDRKPLFPGRDHVHQLRLLMELIGTPSEAEMEFLNENAKRYIRQLPLYRRQSFVEKFPHVNPAAIDLVEKMLTFDPRRRLTVEDALAHPYLTSLHDISDEPVCMTPFSFDFEQHALTEEQMKELIYREGLAFNPEYQHM

SEQ ID NO: 140230 - DNA, 1212 bp, Triticum aestivum
  CDS (1)..(1212)
atggacgccggcggggcgcagccgccggactcggagatggcggaggccggtgcgggcgctgcggcggcggcggggacggcgccgggcggcgcgatggataacatccaggccacgctcacccacggcgggaggttcatccagtacaacatcttcggcaacgtcttcgaggtcaccgccaagtacaagccccccatcctccccatcggcaagggcgcctacggcatcgtctgctccgcgctcaactccgagacgggggagcaggtggccatcaagaagatcgccaacgccttcgacaacaagatcgacgccaagcgcacgctgcgggagatcaagctgctccgccacatggaccacgagaatattgttgcaataagggatattatacctcctgcacaaaggactgcattcaatgatgtctatattgcatatgaattgatggacaccgatctgcatcaaattattcgctcaaatcaagctttatcggaggagcactgccagtatttcctttatcagatccttcgtggcttgaagtacatacattcagcaaatgttctccaccgagacttgaagcctagcaatcttcttttgaatgcaaactgtgacctaaaaatttgcgattttgggcttgctcgtaccacctcagaaactgattttatgaccgagtatgttgtgacaagatggtacagggcaccagagcttttgttgaactcctccgaatacactgcagcaattgatgtgtggtctgtgggctgtatatttatggaactgatggaccggaaaccgttgtttccaggaagagaccatgtccatcagctacgtctactaatggaggttttcccttgtggtatttcctcgttgcagctcattggaacaccaaatgaggccgatttggattttgtaaatgaaaatgcaagaagatatatccgccaacttccccgtcatgcaaggcaatcattatctgagaagtttccacatgttcacccttcagcaattgacttggttgaaaagatgctgactttcgatcctagacagagaataacagttgaaggcgcacttgcgcatccttacctggcatcgctgcatgatataagtgatgagccagtctgcacgatgcccttcagctttgacttcgagcagcatgcgttgtcggaagaacaaatgaaggatctaatccaccaggagggcatcacgttcaaccctgattaccagtag

SEQ ID NO: 140231 - protein, 403 aa, Triticum aestivum
MDAGGAQPPDSEMAEAGAGAAAAAGTAPGGAMDNIQATLTHGGRFIQYNIFGNVFEVTAKYKPPILPIGKGAYGIVCSALNSETGEQVAIKKIANAFDNKIDAKRTLREIKLLRHMDHENIVAIRDIIPPAQRTAFNDVYIAYELMDTDLHQIIRSNQALSEEHCQYFLYQILRGLKYIHSANVLHRDLKPSNLLLNANCDLKICDFGLARTTSETDFMTEYVVTRWYRAPELLLNSSEYTAAIDVWSVGCIFMELMDRKPLFPGRDHVHQLRLLMEVFPCGISSLQLIGTPNEADLDFVNENARRYIRQLPRHARQSLSEKFPHVHPSAIDLVEKMLTFDPRQRITVEGALAHPYLASLHDISDEPVCTMPFSFDFEQHALSEEQMKDLIHQEGITFNPDYQ

SEQ ID NO: 140232 - DNA, 1734 bp, Petroselinum crispum
  CDS (346)..(1470)
cacgagaaaaaaagttatgcattcacacgtgaaattgtcacccttcacggatgatcatgtcttttttagttcaaaaagagtggccctttttcacaattcacagtttctttctttacttttcttgattttcctattttttcagtgtaaaaaatgtcacacccgtcttcattttccaccataatccactaaagaaatgtcaacaacttgattggaaaatacccttcctcttcttccctaaatttagtagcttcttgttcttgttttgttctaaattgtcttctttgttgagtttctgagtaattttcttgttttggggtttaatttttttggtaagtagaggaatctatggagtcaagttctgcagctacagctgatcatacacatatcaaaggtgtgcctactcatggtggacgctatgttcagtacaatgtgtatggtaatctctttgaagtttctcgaaaatatgttcctccaatccgccctgtcggccgtggcgcttatggtatagtttgtgctgctatgaactctgatacgcgtgaggaagttgccatcaagaaaattggtaatgcatttgacaatcgaatagatgccaaaaggacacttcgggaaattaaacttcttcgtcacatgaatcatgaaaatgtaattgcaattaaagacatcataaggcctccacagattgaaagtttcaatgatgtttacattgtttacgaactgatggacacagatcttcatcaaataattcgctctaaccagcaactcactgatgatcattgtcggtattttctttaccaactattgcgaggactgaaatatgttcattctgcaaatgtcctgcatcgtgatttaaagccgagcaatttgctcctcaatgcaaattgtgacctaaaaattggagatttcggccttgcaaggacaacttctgaaactgattttatgactgaatatgttgttactcgctggtaccgagcaccagaattgctccttaattgctcagagtatactgcagcaattgatatctggtcagttggttgcatacttggtgaagttatgaccagacagcccctgttccctgggaaagattatgttcatcagctgagactaattactgagctcataggttcacctgatgatgccagtcttggatttctcagaagtgataatgctcgaagatacgtgaggcagcttccccagtatccaaagcaacaattctctgctagatttcttaacaaatctcctggagctctagatttgctggaaaaaatgctaatctttgatcccaacaggcgcattacagttgacgaggcactttgccacccatacttggcagctcttcatgacataaacgaggaacctgtttgtcctcgcccttttagttttgactttgagcagccaacgtgcactgaagaaaatatcaaggaacttatctggaaggaatctgtgaagttcaatcctgacccgattctctgagtatcatgttatagtgattgttatcaaatgaatattatagatgttgcaacatgaattaatattgtatcaaaactaattaagaatgatcctcaagtagaattgatcaaataaatagaatggatatactgagggtcaaccaggttgttcccactattgaaattaagattcatttgtcattcttaacttgaaatattccaatgctgcagctctgagttgcagattatttttaagtcttttactttggtgcaaaaaaaaaaaaaaaaa

SEQ ID NO: 140233 - protein, 374 aa, Petroselinum crispum
MESSSAATADHTHIKGVPTHGGRYVQYNVYGNLFEVSRKYVPPIRPVGRGAYGIVCAAMNSDTREEVAIKKIGNAFDNRIDAKRTLREIKLLRHMNHENVIAIKDIIRPPQIESFNDVYIVYELMDTDLHQIIRSNQQLTDDHCRYFLYQLLRGLKYVHSANVLHRDLKPSNLLLNANCDLKIGDFGLARTTSETDFMTEYVVTRWYRAPELLLNCSEYTAAIDIWSVGCILGEVMTRQPLFPGKDYVHQLRLITELIGSPDDASLGFLRSDNARRYVRQLPQYPKQQFSARFLNKSPGALDLLEKMLIFDPNRRITVDEALCHPYLAALHDINEEPVCPRPFSFDFEQPTCTEENIKELIWKESVKFNPDPIL

SEQ ID NO: 140234 - DNA, 1083 bp, Aplysia californica
  CDS (1)..(1083)
atggcggatcatttagcagaacgcaaaccaggcttggtgacggtggaactgaacaaaacgatatgggaggtgccaagtcgatacaccattcagaaccccgtcgggatcggggcatacggccaagtcgtgtctgccaatgacaagaacacaggcatgaaggtggccattaagaaactggcccggcccttccagactcccatccacgccaaacggacatacagagaattgaggatgttgaaacacatggagcatgagaacgtgatcaacttgatggattgtttcacgcccgctgtcagactggaggacttcaatgatgtgtacctggtatcccctctgatgggagctgacctgaacaacatactcaagacacagagactcagcgacgaccacgtacagttcctcgtctaccagatcctccgaggcctcaagtacatccactcagctggaatcatccacagggatctcaaacccagcaacatcgctgtcaatgaagactgtgagctcaagattctggactttggtctagcccggcactcagacgaggagatgacgggctatgtggcgacccgctggtaccgcgcgccagagatcatgctcaactggatgcactacaaccagacagtggacatctggtctgtgggctgtatcatggcggagatgttgatgggcaaacctctcttccctggcagtgaccacattgaccagttgacccgaatcttgaacctggccggcactccgagcgaagaactcatgaaggaaatcaaaagcaatgatgcgagaatgttcatcaagtccctgcctgtgatgaagaagaaagacttcaagtctgtgtttctgggagctaatcctctagccatcgacctgatggagcgaatgctggacctgaacacccgcacgcgtctcaacgccacggaggcgctggcccacgagtacttcaagcagtacgccgaccccaacgatgagccagaggcggagaagtacgaccagtcctttgaggagatggagctgggcatagaggagtggaaaaagcgggtcttcagcgagctagaaaacttccagtgtccggcagagccgatgtcctag

SEQ ID NO: 140235 - protein, 360 aa, Aplysia californica
MADHLAERKPGLVTVELNKTIWEVPSRYTIQNPVGIGAYGQVVSANDKNTGMKVAIKKLARPFQTPIHAKRTYRELRMLKHMEHENVINLMDCFTPAVRLEDFNDVYLVSPLMGADLNNILKTQRLSDDHVQFLVYQILRGLKYIHSAGIIHRDLKPSNIAVNEDCELKILDFGLARHSDEEMTGYVATRWYRAPEIMLNWMHYNQTVDIWSVGCIMAEMLMGKPLFPGSDHIDQLTRILNLAGTPSEELMKEIKSNDARMFIKSLPVMKKKDFKSVFLGANPLAIDLMERMLDLNTRTRLNATEALAHEYFKQYADPNDEPEAEKYDQSFEEMELGIEEWKKRVFSELENFQCPAEPMS

SEQ ID NO: 140236 - DNA, 1119 bp, Marthasterias glacialis
  CDS (1)..(1119)
atggcggcgtttggttcttccgcttctgacaagcaacctgcagtttcggcttcagataatatgcctgaagttgttcgtggccaaattttcgatgtcggcccgaggtatactgggctggcgtacatcggggaaggggcctatggtatggtatgttctgccacagacacaaagaacctttcaaaagttgcgatcaagaaaatcagtccatttgaacatcagacttactgccagcgtactctgagagaaattaagatcctcacacggttccgacatgaaaatattatcaacattcaagacatcatccatgcaaactccattgatgagatgaaagatgtctacattgtgcagagtcttatggagacagatttgtacaaactcttgaagacacagaaattgagtaatgaccacatatgctacttcctgtaccagatccttagaggtctgaagtatatccactcagccaacgtgctacatcgagatctcaaacccagtaatctactgcttaatactacatgtgatctgaagatttgtgattttggcttagcccggatagccgacccagtccatgatcatacagggttcttaacagagtacgtagccacacgatggtacagagctccagagatcatgttaaactccaaggggtacaacaaaagcattgatatctggtctgtaggctgtatcctgtcagagatgctcaacggaaagccaatattccctgggaaacattacttggatcaactgaaccacattctgaacgtccttggatcaccgtctagtgaagatcttggctgtattcacaatgataaagctcgtggttacatgcagtcactaccattcaagcctagagtaccttggtcaagactctatccagtaggagatgctaaatctttgcagcttctagatcggatgttgacgttcaatccagacaagaggataacagttgaagatgcattgaagcatgattacttggatcagtaccatgaccccaccgatgagcctgtggcagaagagccgttcaaatttgagacagagctggatgatctgcccaaagaagagctgaaagaactcatctttgaagaagccaagaagtttgcacttggaggagaaatgagttaa

SEQ ID NO: 140237 - protein, 372 aa, Marthasterias glacialis
MAAFGSSASDKQPAVSASDNMPEVVRGQIFDVGPRYTGLAYIGEGAYGMVCSATDTKNLSKVAIKKISPFEHQTYCQRTLREIKILTRFRHENIINIQDIIHANSIDEMKDVYIVQSLMETDLYKLLKTQKLSNDHICYFLYQILRGLKYIHSANVLHRDLKPSNLLLNTTCDLKICDFGLARIADPVHDHTGFLTEYVATRWYRAPEIMLNSKGYNKSIDIWSVGCILSEMLNGKPIFPGKHYLDQLNHILNVLGSPSSEDLGCIHNDKARGYMQSLPFKPRVPWSRLYPVGDAKSLQLLDRMLTFNPDKRITVEDALKHDYLDQYHDPTDEPVAEEPFKFETELDDLPKEELKELIFEEAKKFALGGEMS

SEQ ID NO: 140238 - DNA, 1602 bp, Ustilago maydis
  CDS (1)..(1602)
atgtcgattgccaatgcctcttcttcgactgcttctcacgacttggacgccgctgatgccgatccttgtccatccgcttgtacatccgtatccgctctgtgtaacatgtcgacactaccctcaccgcgccctttcggatatcgcccgacgtatgtacctgcgatggtcgcctcgggtgtatcggccgtcaccgtcacgaccaattcacatcggccaccttcaaaatcccactcgatctcctcggtcgactcgttggcatctgtctcatcgaatgcaccctccacaccaacgcatgatgccgacgatgtacgcttcgaaatggccgtcattcccaaactggttcgtgcctctgctgatgcatatctcgatcgcgtgggcaaaccgctgccgccatcgcctgcgccccaaatcgttgcaacgtctgcaaccaccaaaacgaatgcacaagcggctcgttctgtcgctgctgctgctgctgctgctgctgctgctgctgctgtgccgccctcccattctgcactccgcaacgaaaaccacaaaaacgccattagtttccgcgtgggtagcaagtacaaggtctgcgagatcatcggcgaaggcgcctatggtgttgtctgcagcgccatccaccgcgccaccggtcaaaaggtcgccatcaagaagatccaaccctttgagcaccagatgtttgcgctgcgaaccttgcgcgagctcaagctactgcgcttctttcaagaatgcgacgtctcggaaaacatcatcagcatcctcgacattatcaaacccagcacctatgaagcgttcaccgaggtgtacttggttcaagagctcatggagaccgacctgcatcgagtcatccgtacccaggagctgtctgacgaccattgtcagtatttcacgtatcagacccttcgcgctctcaagcccatgcactgtgccgacgtgatccaccgcgatctcaagccgagcaacgtgctgctcaacgccaactgcgatctcaaggtttgcgatttcggcttggctcgttcagtgctcactgcggaccaggacaccggcttcatgaccgaatacgtcgccacgcgatggtaccgtgctccggagattatgcttaccttcaagcagtacaccaaagcgatcgatgcatgggcagtcggatgcatcctcgctgagatgctcaccggtcggccactgttccctggtcgcgactaccaccagcaactctcgctgatcctcgacgtgctgggaacgccgacactcgaggaattccaaaacatcaacagccgtcgatcgcgcgactacattcgatcgatgcccttccgcaagcgtcgagaattccgtactctctttccaaaagcttcacctgaagcaatcgatttcttgcaaaagacactcacctttgacccccgcaaccgtctcacggtagaagagtgtctccagcatccttatttgtcggcttatcacgatcctgatgacgagcctggtgcgccacgtctcgacccagactttttctactttgacatgcaaaaggagagcatcaccaaggaggatctgcgcaaggaactctggtaccaggtacaagaatttcagccgcttcttcgttga

SEQ ID NO: 140239 - protein, 533 aa, Ustilago maydis
MSIANASSSTASHDLDAADADPCPSACTSVSALCNMSTLPSPRPFGYRPTYVPAMVASGVSAVTVTTNSHRPPSKSHSISSVDSLASVSSNAPSTPTHDADDVRFEMAVIPKLVRASADAYLDRVGKPLPPSPAPQIVATSATTKTNAQAARSVAAAAAAAAAAAAVPPSHSALRNENHKNAISFRVGSKYKVCEIIGEGAYGVVCSAIHRATGQKVAIKKIQPFEHQMFALRTLRELKLLRFFQECDVSENIISILDIIKPSTYEAFTEVYLVQELMETDLHRVIRTQELSDDHCQYFTYQTLRALKPMHCADVIHRDLKPSNVLLNANCDLKVCDFGLARSVLTADQDTGFMTEYVATRWYRAPEIMLTFKQYTKAIDAWAVGCILAEMLTGRPLFPGRDYHQQLSLILDVLGTPTLEEFQNINSRRSRDYIRSMPFRKRREFRTLFPKASPEAIDFLQKTLTFDPRNRLTVEECLQHPYLSAYHDPDDEPGAPRLDPDFFYFDMQKESITKEDLRKELWYQVQEFQPLLR

SEQ ID NO: 140240 - DNA, 1083 bp, Trichoderma virens
  CDS (1)..(1083)
atgtctcggtcgaacccccccaataatgcgtcggcgtcgcgcaaaatctccttcaacgtcagcgagcagtatgacattcaggatgttgttggtgagggagcctacggagttgtttgctctgccattcacaagccgtcgggacaaaaggttgccatcaagaagattacccccttcgaccactccatgttctgtctgagaactctgcgagagatgaagctgctgcgctatttcaaccacgaaaacatcatctccatccttgatatccagaagccccgaagctacgatagcttcaacgaggtctatcttattcaggaactcatggagacggacatgcacagagtcattcgaacccaggacctctccgacgaccactgccagtacttcatctaccagacgctgcgagcgctcaaggccatgcactcggcaaacgttctgcaccgagatctcaagccgtccaacctcttgctaaatgccaactgtgatctgaaagtctgcgacttcggtctggcccgatctgctgcttcccaggaggacaactcaggcttcatgacggaatacgttgccgcgagatggtaccgtgctcccgagatcatgctgacctttaaggagtacaccaaggccattgacgtctggtctgtgggctgcatcctggctgagatgctcagcggaaagcctctgttccccggaaaggacttgacctttccagaccaccaccagctgactctgatccttgatgtgctcggcacaccgaccatggaggactactatggcatcaagtctcgacgagcgagagaatacatccgctcgctgcccttcaagaagaaggtgccattccgcaccctcttccccaagacttctgacttggcattggacctcttggagaaactgcttgcgttcaaccccgtaaagcgaatcacggtggaggatgctctcaagcacccctacctcgagccatatcacgaccctgatgacgagccaaccgcgcctccgatcccggaggagttcttcgatttcgacaagcacaaagataccctgagcaaggagcagctgaagcaactgatttaccaagagattatgcggtaa

SEQ ID NO: 140241 - protein, 360 aa, Trichoderma virens
MSRSNPPNNASASRKISFNVSEQYDIQDVVGEGAYGVVCSAIHKPSGQKVAIKKITPFDHSMFCLRTLREMKLLRYFNHENIISILDIQKPRSYDSFNEVYLIQELMETDMHRVIRTQDLSDDHCQYFIYQTLRALKAMHSANVLHRDLKPSNLLLNANCDLKVCDFGLARSAASQEDNSGFMTEYVAARWYRAPEIMLTFKEYTKAIDVWSVGCILAEMLSGKPLFPGKDLTFPDHHQLTLILDVLGTPTMEDYYGIKSRRAREYIRSLPFKKKVPFRTLFPKTSDLALDLLEKLLAFNPVKRITVEDALKHPYLEPYHDPDDEPTAPPIPEEFFDFDKHKDTLSKEQLKQLIYQEIMR

SEQ ID NO: 140242 - DNA, 1080 bp, Biomphalaria glabrata
  CDS (1)..(1080)
atggcggacactgcgcaacgaagagaaggactcgtgactgtggaattaaataaaacattatgggaggttcccaatcgctatagcattcaaaacccagtcggaataggtgcttatggccaagttgtatctgcaattgacaaaaaaacaggtgtaaaagtggcaattaaaaaacttgctcgtcctttccagactgcaattcatgctaaaagaacatacagagaacttcgtatgttgagacacatgaatcatgaaaatgtgattgaactaatggattgtttcacaccaactgttagactggaagactttactgatgtatacctggtgacaccattgatgggggcagatttaaacaatatacttaaaacacaaagacttagtgatgaccatgtacagtttcttatctatcaaattctcaggggtttaaagtacattcattcagctggcatactacacagagatttaaaacctagtaatatagctgtcaatgaagattgtgaactgaagattttagattttggtcttgctcggcatacagatgaagagatgactggttatgtagccacccgttggtatagggcgcctgaaatcatgctgaattggatgcattataatcaaaccgtggacatctggtctgtaggttgtattatggctgaaatgttatgtggaaaacctctatttcctggcagtgatcacatagatcagttaaccaggattttgtccctggtagggactcctagtgaagaactaatggaagagatcaaaagtaatgatgcaaaattgtttatcaaatctcttcctgtgatgcagcataaggacttcaaagtagttttttcaggcgccagtccacttgcaatagatctgatggaaaagatgcttgatctaaacaccaagactaggctaaatgccactcaggccctggcccatgaatatttgaagcagtatgctgatccaaatgatgagcctgaagctgaaaaatatgaccagtcttttgaagatttagacttggggatcagtgaatggaaaaagctagtttacgatgagattcagaacttcaagccagcacacagtatgatgtcctag

SEQ ID NO: 140243 - protein, 359 aa, Biomphalaria glabrata
MADTAQRREGLVTVELNKTLWEVPNRYSIQNPVGIGAYGQVVSAIDKKTGVKVAIKKLARPFQTAIHAKRTYRELRMLRHMNHENVIELMDCFTPTVRLEDFTDVYLVTPLMGADLNNILKTQRLSDDHVQFLIYQILRGLKYIHSAGILHRDLKPSNIAVNEDCELKILDFGLARHTDEEMTGYVATRWYRAPEIMLNWMHYNQTVDIWSVGCIMAEMLCGKPLFPGSDHIDQLTRILSLVGTPSEELMEEIKSNDAKLFIKSLPVMQHKDFKVVFSGASPLAIDLMEKMLDLNTKTRLNATQALAHEYLKQYADPNDEPEAEKYDQSFEDLDLGISEWKKLVYDEIQNFKPAHSMMS

SEQ ID NO: 140244 - DNA, 1251 bp, Claviceps purpurea
  CDS (1)..(1251)
atgacggacatccccggacgcagagccttcaagtgcttcaatcaggaatttgtcgtcgacgagagatacaccgtcacaaaggagctgggacagggcgcctatgggattgtctgtgccgctgtcaacaaccaaacgaaggagagcgttgccgtgaagaaagtcaccaatgtcttcagtaaaaagattcttgcgaagcgcgctttgcgcgagataaagctgctgcagcactttcgcggtcatcgcaatattacatgtctatatgacatggatattcctcgacctgacgtgttcaatgagacgtatctttatgaagaattgatggaatgtgatctggccgccattattcgatctggtcagccgttaacggacgctcattttcaatcattcatataccagatcctgagtggtctcaagtatatccactcggccaatgtcttgcatcgagatttgaagccgggcaacttgctggtcaacgccgactgcgaactcaaaatctgcgatttcggtctggcacgtggattttcagcagatccggagcaaaacgctggctacatgacggaatacgttgctaccaggtggtaccgagctccggaaattatgctcagctttcaaagttacaccaaagccattgatgtctggtctgttggatgtattcttgccgaacttctcggtagtcgacccttcttcaagggtcgagactacgtcgatcagctgaaccagattctacacgttcttggcactcctaatgaggagactctgtcacgcattggctctcctcgtgcccaagaatacgtccgcaatctgcctgtcatgcccaagaagaactttgccaccctatttcctcaagctaaccctcacgccctggacctcctcgacaagatgctggctttcgatccctcttcacgcatcagcgtggaacaggcgcttgagcacccgtacctacaagtatggcatgatcccgcggacgagcccaactgccccaccatattcaactttgactttgaggtccttgatgatgttggtgagatgcgcaaggtgatactcgatgaagttatacgcttccgtcagatggtgcggactgcctccagtgcagaacccacgacaggccaagcccaaaccgccgctgctggccaggtaccgatgccccaggctggtgggcagtggaaggcggaggacccccgacctcaggagaatacccctcaggggaacggcctagagcaggatcttcaggccggtttggacgcggcctga

SEQ ID NO: 140245 - protein, 416 aa, Claviceps purpurea
MTDIPGRRAFKCFNQEFVVDERYTVTKELGQGAYGIVCAAVNNQTKESVAVKKVTNVFSKKILAKRALREIKLLQHFRGHRNITCLYDMDIPRPDVFNETYLYEELMECDLAAIIRSGQPLTDAHFQSFIYQILSGLKYIHSANVLHRDLKPGNLLVNADCELKICDFGLARGFSADPEQNAGYMTEYVATRWYRAPEIMLSFQSYTKAIDVWSVGCILAELLGSRPFFKGRDYVDQLNQILHVLGTPNEETLSRIGSPRAQEYVRNLPVMPKKNFATLFPQANPHALDLLDKMLAFDPSSRISVEQALEHPYLQVWHDPADEPNCPTIFNFDFEVLDDVGEMRKVILDEVIRFRQMVRTASSAEPTTGQAQTAAAGQVPMPQAGGQWKAEDPRPQENTPQGNGLEQDLQAGLDAA

SEQ ID NO: 140246 - DNA, 1071 bp, Trichoderma virens
  CDS (1)..(1071)
atgtctcggtcgaacccccccaataatgcgtcggcgtcgcgcaaaatctccttcaacgtcagcgagcagtatgacattcaggatgttgttggtgagggagcctacggagttgtttgctctgccattcacaagccgtcgggacaaaaggttgccatcaagaagattacccccttcgaccactccatgttctgtctgagaactctgcgagagatgaagctgctgcgctatttcaaccacgaaaacatcatctccatccttgatatccagaagccccgaagctacgatagcttcaacgaggtctatcttattcaggaactcatggagacggacatgcacagagtcattcgaacccaggacctctccgacgaccactgccagtacttcatctaccagacgctgcgagcgctcaaggccatgcactcggcaaacgttctgcaccgagatctcaagccctccaacctcttgctaaatgccaactgtgatctgaaagtctgcgacttcggtctggcccgatctgctgcttcccaggaggacaactcaggcttcatgactgaatacgttgccacgagatggtaccgtgctcccgagatcatgctgacctttaaggagtacaccaaggccattgacgtttggtctgtgggctgcatcctggctgagatgctcagcggaaagcctctgttccccggaaaggactaccaccaccagctgactctgatcctggatgtgctcggcacaccgaccatggaggactactatggcatcaagtctcgacgagcgagagaatacatccgctcgctgcccttcaagaagaaggtgccattccgcaccctcttccccaagacttctgacctggcattggacctcttggagaagctgcttgcgttcaaccccgtaaagcgaatcacggtggaggatgctctcaagcacccctacctcgagccatatcacgaccctgatgacgagccaaccgcgcctccgatcccggaggagttcttcgatttcgacaagcacaaagataccctgagcaaggagcagctgaagcaactgatttaccaagagattatgcggtaa

SEQ ID NO: 140247 - protein, 356 aa, Trichoderma virens
MSRSNPPNNASASRKISFNVSEQYDIQDVVGEGAYGVVCSAIHKPSGQKVAIKKITPFDHSMFCLRTLREMKLLRYFNHENIISILDIQKPRSYDSFNEVYLIQELMETDMHRVIRTQDLSDDHCQYFIYQTLRALKAMHSANVLHRDLKPSNLLLNANCDLKVCDFGLARSAASQEDNSGFMTEYVATRWYRAPEIMLTFKEYTKAIDVWSVGCILAEMLSGKPLFPGKDYHHQLTLILDVLGTPTMEDYYGIKSRRAREYIRSLPFKKKVPFRTLFPKTSDLALDLLEKLLAFNPVKRITVEDALKHPYLEPYHDPDDEPTAPPIPEEFFDFDKHKDTLSKEQLKQLIYQEIMR

SEQ ID NO: 140248 - DNA, 1571 bp, Solanum tuberosum
  CDS (29)..(1147)
gcaaaaaagggttacgaagagagcagaaatggatgctgaaaacattgaaaattcagtggaaatcaaaggaattccaactcgggatggcaaatatgttgagtacaatgttgtgggtaacttctttgaagttacctcaaagtatgtccctccaattcaacccgtaggccgtggagcttacggaatcgtctgctgtgctacgaattcggagacgaaggaggagatagccatcaaaaaaattgggagtgcatttgaaaatagaattgatgcaaagaggactcttcgcgagatcaaacttctttcacacatggatcatgaaaatgtcatcaaaataaaagatatagtaagaccaccagacagagaggaattcaatgatgtgtatattgtgtatgagctaatggatactgatctgcatcagataatacgctcttcacaggccctcacagaagatcattgtcaatactttctctatcaattattacgtggactcaagtatgtacattctgctaatgttcttcaccgggatctgaaacctagcaacttgctactcaatgcaaactgtgacctcaagatatgtgattttgggcttgctagaaccacttcagaggcagatttcatgacagagtatgttgttactcgatggtatagggcacccgagttactacttaattgtactgaatatacttcagcaattgatatatggtcagttggttgcattttgatggaactcattaagagagagcctcttttccccggcagagactatgctcagcaattggggcttatcattaagttattaggttcaccggaggagtctgatcttggattcctaaggagtgacaatgctaggaagtacgtcaagcagctgcctcaagttccaaagcaaccattctccgagcatttcccagatgtgtctcctttagctcttgatcttgcagaaaagatgttggttttcgacccagctaaacgcataactgttgaggatgcattgaatcatccattcatgataagtctccatgagataaatgaggaaccagtttgcacttctcctttcaatttcgactttgaacaagcatctctaagcgaggaagacattaaggagctcatatggaatgaggctcttaagtttgatcccgatacaaccaagtgatgatccatactatattacctcaatattttgtttcatcaatgtctggagtgtgatttagttgtggcaggttagccatttgtgacatctgtttgattgttcttttaagctgagcttggagagtttggttttcctcccttcatacacggggttgttataagggagcgcgcgcatgatgggggagtaatcaatggattcatattctactcaagaatccttcccccccctcgaaattttctgtaaaaaaagaaactagtcgttttgtgtttacaaactcgaaactgtttgtaaacaaatcatagaagagaagaacaataaggatgaaaaagaaagaaactaaagtgattatttgcgaatatgctgttgtataagggtttgataatataatggtattgatatttcaattttgaaaaaaaaaaaaaaaaaa

SEQ ID NO: 140249 - protein, 372 aa, Solanum tuberosum
MDAENIENSVEIKGIPTRDGKYVEYNVVGNFFEVTSKYVPPIQPVGRGAYGIVCCATNSETKEEIAIKKIGSAFENRIDAKRTLREIKLLSHMDHENVIKIKDIVRPPDREEFNDVYIVYELMDTDLHQIIRSSQALTEDHCQYFLYQLLRGLKYVHSANVLHRDLKPSNLLLNANCDLKICDFGLARTTSEADFMTEYVVTRWYRAPELLLNCTEYTSAIDIWSVGCILMELIKREPLFPGRDYAQQLGLIIKLLGSPEESDLGFLRSDNARKYVKQLPQVPKQPFSEHFPDVSPLALDLAEKMLVFDPAKRITVEDALNHPFMISLHEINEEPVCTSPFNFDFEQASLSEEDIKELIWNEALKFDPDTTK

SEQ ID NO: 140250 - DNA, 1089 bp, Halocynthia roretzi
  CDS (1)..(1089)
atgagtggaatgaaggcaatgagtggagtaaaggtaacagtgcgaggtcaagtattcgatgtcggcccaagatatgttgatctgagctacattggggaaggagcatatggaatggttgtgtctgcgactgataatttcaccggtcacaaagttgcaataaagaaaataagtcctttcgagcaccagacatattgtcaacgaacattgagagagatcaaaattctgctcagtttcaaccatgaaaacatcatcgctatccaggacataatacggtcaagtgctatggagatgatgaaagatgttcacatcgttcaagatttgatggaaactgatctatacaagttgctcaagacacagaaaatcagcaacgatcacgtctgctactttctctatcaaatattacgtgggctcaagtacattcattcggcgaacgtgatacaccgtgatttgaaaccgagcaatcttttgctaaatacgacatgcgatttgaaggtatgcgatttcggtctggcacgcgtgtctgacccggaccatgaccacaccggtttcttgaccgaatacgtggcgacccgttggtaccgtgctccagaaatcatgctgaactccaaaggatatacaaagtcgattgacatttggtccgtcggttgtatcttggcagagatgctcaacaatcgtcctttgtttcccggaaagcattatctggatcaacttaatcatatccttggcgttcttggctctcctaacaatgaggatctcagctgtattattaacgagaaagcacgggcctatctcttgtcgcttccacttaaaccaaaggtaccgtgggtcggaatgtatcccaatgcggataaaaaagctcttgatctcttggacaaaatgcttaccttcaatccaaataaacgtattaccgtcgtggaggcgttggcccatccttatttggagcagtattacgacccagctgatgaaccagttgctgaaaagccgtttaccttcgaagaagaattagacgatctgccgaaggagaagctcaaacaaatgatatatgatacaacagacccagcgaagtttcctggtcctcatcccacttaa

SEQ ID NO: 140251 - protein, 362 aa, Halocynthia roretzi
MSGMKAMSGVKVTVRGQVFDVGPRYVDLSYIGEGAYGMVVSATDNFTGHKVAIKKISPFEHQTYCQRTLREIKILLSFNHENIIAIQDIIRSSAMEMMKDVHIVQDLMETDLYKLLKTQKISNDHVCYFLYQILRGLKYIHSANVIHRDLKPSNLLLNTTCDLKVCDFGLARVSDPDHDHTGFLTEYVATRWYRAPEIMLNSKGYTKSIDIWSVGCILAEMLNNRPLFPGKHYLDQLNHILGVLGSPNNEDLSCIINEKARAYLLSLPLKPKVPWVGMYPNADKKALDLLDKMLTFNPNKRITVVEALAHPYLEQYYDPADEPVAEKPFTFEEELDDLPKEKLKQMIYDTTDPAKFPGPHPT

SEQ ID NO: 140252 - DNA, 1080 bp, Hortaea werneckii
  CDS (1)..(1080)
atggcggaattcgtacgtgcccagattttcggcacgacgttcgagatcacaagcaggtataccgacctgcagccggttggcatgggagccttcgggcttgtttgctcggcaaaggatcaactcaccagccaggcggtggcggttaagaagattatgaagccttttagcactcccgtcctttcgaagcgtacctaccgcgagctcaagctgcttaagcacttgaggcatgagaacatcatctgccttagcgacatcttcatctccccgctcgaggatatgtacgtcgtcacggaattgctaggcacggatctgcaccgcctccttacgtcgagacccctcgaaaagcagttcatccaatacttcctttaccaaatattacgcggtctgaaatatgtccactctgccggcgttgtccaccgcgatctcaagccgtccaacatccttatcaacgagaactgcgaccttaagatctgcgatttcggtcttgctcgtatccaggacccgcaaatgaccggttacgtctcgacccgctactaccgcgctcccgagatcatgcttacctggcaaaagtacgacgttgaggtggacatctggtcagcgggctgcatcttcgctgagatgctggagggtaagccgctgttccccggcaaagaccacgtgaaccaattctccatcatcaccgagctgctgggaacgccgcctgacgatgtcatcgccaccatctgctcggagaacaccttgagatttgtccagagcttgccaaagcgggaacgccaaccgttgaagaacaaattcaagaacgcagacccgcaggcgatcgagcttctggagcgcatgttggtcttcgatcccagaaaacgtgtcaaggccggcgaggcgctcgcggacccataccttgcaccttaccatgacccaaccgacgagccagaagctcaggagaaatttgattggtccttcaacgatgcggatctgcctgtggacacctggaagatcatgatgtactctgaaattctcgacttccacaacgtcgacgcaaatgcagagcaggccgcacacaataatgacacggtggccggttag

SEQ ID NO: 140253 - protein, 359 aa, Hortaea werneckii
MAEFVRAQIFGTTFEITSRYTDLQPVGMGAFGLVCSAKDQLTSQAVAVKKIMKPFSTPVLSKRTYRELKLLKHLRHENIICLSDIFISPLEDMYVVTELLGTDLHRLLTSRPLEKQFIQYFLYQILRGLKYVHSAGVVHRDLKPSNILINENCDLKICDFGLARIQDPQMTGYVSTRYYRAPEIMLTWQKYDVEVDIWSAGCIFAEMLEGKPLFPGKDHVNQFSIITELLGTPPDDVIATICSENTLRFVQSLPKRERQPLKNKFKNADPQAIELLERMLVFDPRKRVKAGEALADPYLAPYHDPTDEPEAQEKFDWSFNDADLPVDTWKIMMYSEILDFHNVDANAEQAAHNNDTVAG

SEQ ID NO: 140254 - DNA, 1607 bp, Neurospora crassa
  CDS (374)..(1450)
gaattcccgtcaatttgggtaaaagccccagttctgttagtgaactactgcagacaaacaaaagttttcggttcgccttcaggacttcgttctcagcctttgcccgatccccttattgtgcgcactacgcaggcaacatccgaccccagccgacgtcgtccgtctcctcagtctcccttacacaaaaaacacaaagcgcccgatcaccggatcgcctcactgccgccactgaatcaaacctcgcgtttgacctgtgtttgtgacactcggcccattcagcttgccccgcgctcccaccagagacagggctacttcgtcttccagcaatcctcactccgtcctttgttctgtaacatcaacaccacacatcacaatggccgaatttatccgcgcccagatcttcggaactacctttgagatcacctcgaggtattccgatctccagcctgttggcatgggagcctttggtcttgtctgctccgcgaaagaccagctcaccaaccagaatgtcgccatcaagaagattatgaagcccttcagcacaccggtccttgccaaacgcacgtaccgtgagctgaagcttctcaagcacttgaggcacgaaaacgtcatctctctgagcgatatcttcatctctcctctcgaggatatctactttgttaccgagcttctcggaaccgatcttcacagacttcttacgtccaggcctcttgagaagcagtttatccagtacttcctgtaccagattatgcgcggtctcaaatacgttcactccgccggtgttgtccaccgtgacctgaagccaagtaacatcctggtcaacgagaattgcgacttgaagatttgcgatttcggccttgcgcgtatccaggatcctcagatgacgggctacgtttctactcgttactaccgcgcccccgagatcatgctcacttggcaaaagtacgacgtcgaggtcgatatctggagtgccggctgcattttcgccgagatgctggagggcaagcccctcttccctggcaaggaccatgtcaaccagttctccatcatcaccgagcttctcggcactcccccagacgatgtcatcaacacgattgctagcgagaacaccctgagattcgtcaagtcccttcccaagcgcgagcgtcagcccctgaagaataagttcaagaacgccgattcatcagccgtcgatctgctcgagcgcatgcttgtctttgaccctaagaagcggataactgccaccgaggccctttcacacgagtaccttgctccttaccacgaccccaccgacgagccggttgccgaggagaagttcgattggagtttcaatgatgctgatctcccggtcgacacatggaagatcatgatgtactccgagatcctggactatcacaacgtcgaagcctcggggcaaatgatgttccaggaagatgttccgccgcaataaaacacggcaacggcagggtccgagacatggcgccgaatcttcaacacaggggtggagtagaagtcccctggcttcatgataccacgacatcatgccacatgatttcttaccgtcataatccactttttttttcggttaaaaaaaaaaaaaaaaaaaa

SEQ ID NO: 140255 - protein, 358 aa, Neurospora crassa
MAEFIRAQIFGTTFEITSRYSDLQPVGMGAFGLVCSAKDQLTNQNVAIKKIMKPFSTPVLAKRTYRELKLLKHLRHENVISLSDIFISPLEDIYFVTELLGTDLHRLLTSRPLEKQFIQYFLYQIMRGLKYVHSAGVVHRDLKPSNILVNENCDLKICDFGLARIQDPQMTGYVSTRYYRAPEIMLTWQKYDVEVDIWSAGCIFAEMLEGKPLFPGKDHVNQFSIITELLGTPPDDVINTIASENTLRFVKSLPKRERQPLKNKFKNADSSAVDLLERMLVFDPKKRITATEALSHEYLAPYHDPTDEPVAEEKFDWSFNDADLPVDTWKIMMYSEILDYHNVEASGQMMFQEDVPPQ

SEQ ID NO: 140256 - DNA, 1068 bp, Claviceps purpurea
  CDS (1)..(1068)
atgtctcgcgcgaatcctccgaatgccggaggctcccgcaagatctcctttaacgtcagcgagcattacgatattcaagatgtcgttggtgaaggagcgtatggagttgtctgctctgccgtgcacaagccgtctggtcagaaggttgccatcaagaaaatcacgccgtttgaccattccatgttctgccttcgtacgctccgcgagatgaagctcttgcgctacttcaatcatgagaacatcatctcgattctcgacattcaaaaaccgcgaggatacgattcattcaacgaagtatacctcattcaggagttgatggaaacagacatgcacagagttattcgcactcaagatctctcagatgaccattgccaatacttcatctaccagacgctgcgtgcgttgaaggccatgcactctgcaaacgttctgcaccgagatttgaagccctcaaaccttcttctcaacgcgaattgcgatttgaaagtgtgcgatttcggcttggctcgttcggcagcttcacaagatgacaactcgggttttatgacagaatatgttgctacacgctggtaccgtgcgccggagatcatgctcactttcaaggagtacacgaaggccattgacgtgtggtctgttggatgcatcttggctgagatgctcagcggaaagcccctatttcccgggaaagattatcaccatcagttgaccctgatcctggacgtcctcggcacgcccacgatggaagattactatggcatcaagtcgagacgcgcaagggaatatattcgatcgctccctttcaagaagaaggtgccccctagggtattgtttcccaagacgtctgatctggccttggacctgctggaaaagcttcttgcgttcaaccccgtcaaacgcatcacggtggaagaagcactcaagcatccctaccttgaaccttatcacgacccagatgatgaacccactgcgccaccgatccccgaggcatttttcgacttcgataagcataaggacaacctgagcaaagagcaactaaaattactcatctacgaagagataatgaggtag

SEQ ID NO: 140257 - protein, 355 aa, Claviceps purpurea
MSRANPPNAGGSRKISFNVSEHYDIQDVVGEGAYGVVCSAVHKPSGQKVAIKKITPFDHSMFCLRTLREMKLLRYFNHENIISILDIQKPRGYDSFNEVYLIQELMETDMHRVIRTQDLSDDHCQYFIYQTLRALKAMHSANVLHRDLKPSNLLLNANCDLKVCDFGLARSAASQDDNSGFMTEYVATRWYRAPEIMLTFKEYTKAIDVWSVGCILAEMLSGKPLFPGKDYHHQLTLILDVLGTPTMEDYYGIKSRRAREYIRSLPFKKKVPPRVLFPKTSDLALDLLEKLLAFNPVKRITVEEALKHPYLEPYHDPDDEPTAPPIPEAFFDFDKHKDNLSKEQLKLLIYEEIMR

SEQ ID NO: 140258 - DNA, 1116 bp, Nicotiana tabacum
  CDS (1)..(1116)
atggaaaacgaaaccaatgaaaaactggaaataaaaggagttccaacacatgaggggaaatatgtagagtacaatgtactaggtaacttctttgaggttacatcaaagtacatccctcctattcaacctgtcggccgtggcgcttacggcatggtctgttgtgctacaaattcggagacgaaggaggaggtagcaatcaaaaaaattgggaatgcatttgaaaatagaattgatgcgaaaaggacccttcgcgagatcaaacttctttctcacatggatcatgaaaatatcatcaaaataaaagatatagtaagaccaccagacagagaggaattcaatgatgtgtacattgtgtatgaattaatggatactgatctgcatcagataatacgctcttcacaagcactgacagaagatcactgccaatactttctctatcaattattacgtggactcaagtatgtacattcagctaatgtcctccaccgggatctgaaacctagcaacttactactcaacgcaaactgtgacctcaagatttgtgattttgggctagctagaaccacttcagaggcggattttatgacagagtatgttgtcacccgatggtatagggcaccggagttactactcaattgtactgaatatactgcagcaattgatatatggtcagttggttgcattctgatggaactcataaagagagaacctctttttccaggcagagactatgctcagcaattggggcttatcattgcgctattaggttcgccagaggattctgatcttggattcctaaggagtgataatgctaggaagtatgtaaagcatctccctcgagttccaagacaacccttttcccagaagttcccggatgtgtcccctttagctcttgatcttgctgaaaggatgctggtttttgatccagctaaacgcataactgttgaggatgcattgaatcatccattcttgataagtctccatgagataaacgaggaacctgtttgcgattctcctttcaactttgactttgaacaagcatctctaagcgaggatgacataaaggagctcatatggaacgaggctctaaagtttgatcctaatacaatgaagtga

SEQ ID NO: 140259 - protein, 371 aa, Nicotiana tabacum
MENETNEKLEIKGVPTHEGKYVEYNVLGNFFEVTSKYIPPIQPVGRGAYGMVCCATNSETKEEVAIKKIGNAFENRIDAKRTLREIKLLSHMDHENIIKIKDIVRPPDREEFNDVYIVYELMDTDLHQIIRSSQALTEDHCQYFLYQLLRGLKYVHSANVLHRDLKPSNLLLNANCDLKICDFGLARTTSEADFMTEYVVTRWYRAPELLLNCTEYTAAIDIWSVGCILMELIKREPLFPGRDYAQQLGLIIALLGSPEDSDLGFLRSDNARKYVKHLPRVPRQPFSQKFPDVSPLALDLAERMLVFDPAKRITVEDALNHPFLISLHEINEEPVCDSPFNFDFEQASLSEDDIKELIWNEALKFDPNTMK

SEQ ID NO: 140260 - DNA, 1233 bp, Blumeria graminis
  CDS (1)..(1233)
atgtcagatatgcaaggccgaaaggttttcaaggtattcaatcaagactttgtggttgatgagcgatataatgttaccaaagagctcggccagggtgcctacggtatcgtttgtgccgcaacaaacatttccactcaggaaggagtagcgattaaaaaggttaccaacgtatttagcaagaagatcttggctaaacgtgcactgagagagattaaattgctacagcacttccgaggccatcgtaatattacctgtctatacgatatggatattccccggccagaaaacttcaatgagacctatttgtacgaagaacttatggagtgtgatctcgcagcaattattcgttcaggacagccattgacagatgcacactttcaatcgttcatataccaaatactctgcggcctgaaatacgtccattctgccaacgttcttcatcgagatcttaagccaggtaacttgctagtaaatgccgattgtgagctgaagatttgtgatttcggcctggcaaggggcttttccgtcgatcccgaagaaaatgctggatacatgactgaatatgttgctactagatggtaccgagctcccgaaattatgttgagcttccaaagttataccaaagccatcgatgtttggtcagtaggatgcattctagcagaacttctcggcggacgtccgttcttcaaaggtagagattatgtagatcagctaaatcaaatactccacgtcctcggaaccccgaatgaagagacactagcccgtattggatcccccagagctcaagaatacgtgcgaaatcttccgtttatggcaaaacgaccatttgcacagatatttcccaatgccaatcctgatgccctggaccttctcaatcggatgttagccttcgatccggcttctagaatttctgtcgaggaagcccttgaacacccctttcttcagatttggcacgatgtgtcagatgaaccatgctgtccaaccaccttcaattttgactttgaggttactgatgatgtgggagagatgcgcaaaatgatcttagatgaggtagctcgatttcgtcatcatgtgagagttcaacctggtatgcaaagtcccagtaacgatccttcggtcccaactcttcaaacttccgtagcttggggatcagaagatcctagaccacaggaaaataatgatcaagaaataactggactggagcgggatctgacagtcggcttagatagatga

SEQ ID NO: 140261 - protein, 410 aa, Blumeria graminis
MSDMQGRKVFKVFNQDFVVDERYNVTKELGQGAYGIVCAATNISTQEGVAIKKVTNVFSKKILAKRALREIKLLQHFRGHRNITCLYDMDIPRPENFNETYLYEELMECDLAAIIRSGQPLTDAHFQSFIYQILCGLKYVHSANVLHRDLKPGNLLVNADCELKICDFGLARGFSVDPEENAGYMTEYVATRWYRAPEIMLSFQSYTKAIDVWSVGCILAELLGGRPFFKGRDYVDQLNQILHVLGTPNEETLARIGSPRAQEYVRNLPFMAKRPFAQIFPNANPDALDLLNRMLAFDPASRISVEEALEHPFLQIWHDVSDEPCCPTTFNFDFEVTDDVGEMRKMILDEVARFRHHVRVQPGMQSPSNDPSVPTLQTSVAWGSEDPRPQENNDQEITGLERDLTVGLDR

SEQ ID NO: 140262 - DNA, 1068 bp, Colletotrichum gloeosporioides
  CDS (1)..(1068)
atgtcgcgcgcgaacccccccaatgcttcgggctcccgaaagatctcgttcaacgtgagcgagcagtacgacattcaggatgtcgttggtgagggcgcctacggagtcgtttgctccgcgatacacaagccttctggccaaaaggtcgccatcaagaagatcacacctttcgatcactccatgttctgcttgcgaactctccgtgagatgaagcttctgagatactttaaccacgagaacatcatctccatcctcgacattcagaagccccggagctacgagaccttcaacgaggtctacctcatccaagagctcatggagacggacatgcatcgcgtcatccggacccaagacctatccgacgaccactgccaatattttatctaccagactctgcgcgctctcaaagccatgcactcggccaatgtccttcatcgcgacttgaagccttccaacctgcttctgaatgccaactgcgacttgaaagtctgtgacttcggtctggctcgttccgcggcctcacaagaggacaactcgggattcatgacggaatacgttgcgacacgttggtaccgtgctcccgagatcatgttgacgttcaaggagtacacgaaagccattgacgtctggtccgttggctgtatcctggctgagatgctgagtggaaagcccctgttccctggcaaggactaccaccaccagctgactctgatccttgacgttctcggcaccccgacgatggaggattactacggcatcaagtctcgccgtgcgagagagtacatccgctcgcttcccttcaagaagaaggttcccttccgcaccttgttccccaagacgtccgacctggctctggacctcctcgaaaagctcctggctttcaaccctgtcaaacgcatcacggttgaggacgccctcaaacacccttacctcgagccgtaccacgaccctgatgacgagcccaccgcgccccccattcccgaggagttcttcgacttcgacaagcacaaggacaatctgagcaaggagcagctgaagcagttgatctaccaggagatcatgcggtga

SEQ ID NO: 140263 - protein, 355 aa, Colletotrichum gloeosporioides
MSRANPPNASGSRKISFNVSEQYDIQDVVGEGAYGVVCSAIHKPSGQKVAIKKITPFDHSMFCLRTLREMKLLRYFNHENIISILDIQKPRSYETFNEVYLIQELMETDMHRVIRTQDLSDDHCQYFIYQTLRALKAMHSANVLHRDLKPSNLLLNANCDLKVCDFGLARSAASQEDNSGFMTEYVATRWYRAPEIMLTFKEYTKAIDVWSVGCILAEMLSGKPLFPGKDYHHQLTLILDVLGTPTMEDYYGIKSRRAREYIRSLPFKKKVPFRTLFPKTSDLALDLLEKLLAFNPVKRITVEDALKHPYLEPYHDPDDEPTAPPIPEEFFDFDKHKDNLSKEQLKQLIYQEIMR

SEQ ID NO: 140264 - DNA, 2069 bp, Chlamydomonas reinhardtii; identical to SEQ ID NO: 62985
  CDS (279)..(1448)

SEQ ID NO: 140265 - protein, 389 aa, Chlamydomonas reinhardtii; identical to SEQ ID NO: 62986

SEQ ID NO: 140266 - DNA, 1071 bp, Gaeumannomyces graminis
  CDS (1)..(1071)
atgtctcgagccgccaacccgcccagcaactcggggtctcgcaagatatccttcaacgtcagcgagcagtacgacatccaggatgtcgttggcgagggtgcctatggagtcgtctgctccgccatccacaagccctcgggccaaaaggtcgccatcaagaagatcacccccttcgaccactccatgttctgcctaagaaccctgcgcgagatgaagctgcttaggtacttcaaccacgagaacatcatttccattctcgacatccagaagccccggagctatgagacctttaacgaggtttacctgatccaggagctcatggagacggacatgcaccgtgtcatccgcacccaggacctttcggatgaccactgccagtactttatttaccagaccctgcgcgcgctcaaggccatgcactcggccaacgtcctacatcgcgatctgaagccttccaacctgctgctcaacgccaactgcgatctcaaggtctgcgatttcggcctggcccgctccgccgcctcccaggaggacaactcgggcttcatgacggaatacgtcgccactcgttggtatcgcgcccccgagatcatgttgaccttcaaggagtacaccaaggccatcgacgtgtggtccgtcggctgcattctcgctgagatgctcagcggcaagcccctgttccccggcaaggactaccaccaccagctcactctgatcctggacgtccttggcacgcccacgatggaggactactacggaatcaagtcgcgtcgcgcccgcgagtacatccgctcgctcccctttaagaagaaggtgccgttccggaccctgttcccccaagacgtcggatctcgcctcgaccttctcgagaagctcctggccttcaacccggtcaagcgcatcacggtcgaggaggccctgaagcacccgtacctggagccctaccacgaccccgatgatgagccgacggcgccccctatcccggaggagttcttcgactttgacaagcacaaggacaacctcagcaaggagcagctgaagcagttcatctaccaggagatcatgcggtga

SEQ ID NO: 140267 - protein, 356 aa, Gaeumannomyces graminis
MSRAANPPSNSGSRKISFNVSEQYDIQDVVGEGAYGVVCSAIHKPSGQKVAIKKITPFDHSMFCLRTLREMKLLRYFNHENIISILDIQKPRSYETFNEVYLIQELMETDMHRVIRTQDLSDDHCQYFIYQTLRALKAMHSANVLHRDLKPSNLLLNANCDLKVCDFGLARSAASQEDNSGFMTEYVATRWYRAPEIMLTFKEYTKAIDVWSVGCILAEMLSGKPLFPGKDYHHQLTLILDVLGTPTMEDYYGIKSRRAREYIRSLPFKKKVPFRTLFPQDVGSRLDLLEKLLAFNPVKRITVEEALKHPYLEPYHDPDDEPTAPPIPEEFFDFDKHKDNLSKEQLKQFIYQEIMR

SEQ ID NO: 140268 - DNA, 1644 bp, Capsicum annuum
  CDS (124)..(1251)
ccctctacaccctctccgatcatatatatttatttttatatcaatatatatacgtatattcataactttcatgatcttgtgtacattaggcacatatatagttttacgtgacataaatcaataatggttgatgcaaatatgggtgcggctggtggtcaattccctgagtttcctaacattgtgactcacggtggacaatatgttcagtatgatatttttggtaatttctttgagatcaccaccaaatatcggcctcctattatgcctattggccgtggcgcttatggaatcgtctgctcggtgtttaatgcggagctgaatgagatggttgcagttaagaaaattgccaatgcatttgataattacatggatgctaagaggacgctccgcgagataaagcttcttcgccatttagaccatgaaaatgtcattggtttaagagacgtgattcctccgcccttacgaagggagttttctgatgtttacattgctactgaactcatggataccgatcttcaccaaataattagatccaaccaaggtttatcagaggatcattgccagtacttcatgtatcagcttctccgtgggctaaaatacatacattcagcgaatgttattcatagagatctcaaaccaagcaaccttttgcttaatgcaaattgtgatcttaagatatgtgattttggtcttgctaggccaaacctagagaatgagaatatgacggaatatgtagtaaccagatggtacagagcaccggagcttttgttgaactcgtcagattacactgaagccatagacgtttggtctgttggttgcatcttcatggagcttatgaatagaaagcctttgtttgctggaaaagatcatgtacatcaaatacgcttgctaactgagcttcttggtaccccaacagaatctgatctgagcttcctccgaaatgaagatgcaaagagatacatcaggcaactcccacaacatccacgccagcagttagcaaaagtgttccctcatgtgaattcattagccattgaacttgtagataaaatgttgacactcaaccctactggaagaattacagttgaggaagcattagctcatccctaccttgcaaagctccatgatgcagctgatgaaccagtctgccccgtcccattctcctttgactttgagcaacaagggataggagaagagcagattaaggatatgatttatcaggaagccttggtactgaatcctgaatatgcttaaaaataagagaaaatcagttcttctcttgcttccctttttatctggagtatctacattacctagtgtggcttttcttgcttgggccagccctctcagagtttttgttcacagggtcggtaatccttggcaactttaatgtaaggaagctatcaatagatctttctttttattttttcttaattacggtggtgtccgggctagcttgtgtgcacctagattattccattggatatttgctacctccaccagcacaaacatttatgtcttccactcatttttatgacttgtatcttgtgttctgtattcagcttattgtagtctgtatttttgtcctgtgtatcatgttgtattatgtacagtgggagtgtactgaaaagtaactcagtagcatgt

SEQ ID NO: 140269 - protein, 375 aa, Capsicum annuum
MVDANMGAAGGQFPEFPNIVTHGGQYVQYDIFGNFFEITTKYRPPIMPIGRGAYGIVCSVFNAELNEMVAVKKIANAFDNYMDAKRTLREIKLLRHLDHENVIGLRDVIPPPLRREFSDVYIATELMDTDLHQIIRSNQGLSEDHCQYFMYQLLRGLKYIHSANVIHRDLKPSNLLLNANCDLKICDFGLARPNLENENMTEYVVTRWYRAPELLLNSSDYTEAIDVWSVGCIFMELMNRKPLFAGKDHVHQIRLLTELLGTPTESDLSFLRNEDAKRYIRQLPQHPRQQLAKVFPHVNSLAIELVDKMLTLNPTGRITVEEALAHPYLAKLHDAADEPVCPVPFSFDFEQQGIGEEQIKDMIYQEALVLNPEYA

SEQ ID NO: 140270 - DNA, 1727 bp, Pichia pastoris
  CDS (324)..(1604)
atctatgtaagcctgttctactgcatacgtactatctaccacgtctagcattattgagtctgaaacttctatttttgtctgcatatttacgcgtagccaatcatacagaatcatgcgcttaattgaaaagtttttcctagttctatgccatagtattctttttttagaatcctgcatttccgtgatgctcgaaaaaactgatagggatcatttcaacaacgtaattttgataaacctctccacctgaaaaatatatataccgttacagcagctgccatcttgccgtgaatattataagtatactaagctgaagacgataaataatgagtggtgaccataagagctttacggtttttaaccaggagtttatcattgaccgagactttgaattgatcaaggccttggggcaaggtgcatatggagtggtgtgcagtgcacagtataagggtaacgaagatggaggaaaagtggccatcaaaaaggtgaccaacattttcagcaaaaagatcctagccaagagggctttaagagagatcaaactgctgcgccatttccgaggccacaagtatatcacttgcctgtatgacttggatgtcattccggaccaaaataataatttcaacgagatctacctttacgaagaattgatggaatgtgacttgcatcatataatcaaatcaaaacaacctttgactgacagccactatcagagctttatctaccaaattctcgggggcttaaagtatatccattcagcagatgtgctgcatagagatcttaaacccgtcaatctattggtgaactcagattgcgaacttaagatttgtgactttggacttgcaagaggttatagtagtgatgcagagaagaatgctggctttcttacggaatatgttgctaccaggtggtatcgggcaccggagataattcttagttttcagacatataccaaagcaattgatatctggtcagttggatgtatattggccgaactcttaggtggccgacccatttttagaggaagagactatgtggatcaattgaacttgattttgagtacgctgggtactgtttcggaagagacacttcagtctatcagatcagagcgtgcccaggattatgttcgctccctgccattcatgcccaagatcccattcagccagttatttcccggtgccaaccctgaagcgatagacttactggatcgaatgctcacggtagatcccactcacagaattacagttactgaggctttagagcatccatatctcaaggtttggcatgatcctaacgatgagcccgtctgttcttccaaattcgatttctcgtttgaggtcgtggacgatatagaaacgatgaagcaaatgattgtagatgaagtgctatcacttagagaatttgtcagacgaccaattcaagagcagcagttaccattcactgaacctgacaaacattttgatgttagctttgaccaaccgcaaatcgagccccccgctgaaaactatagagatgatcatcttcctagacctcatgaattagagtcccaaattttggatctagaacatgaattacaatacggattggatcggtatggtacacagtaataacttgcgaacgaaaaaaaaagtctaataatatttttgcacctatttatttgccagccttgaatgcacgcctaatccaatggaatagcttatcatacactataacattaccgttgtgatatc

SEQ ID NO: 140271 - protein, 426 aa, Pichia pastoris
MSGDHKSFTVFNQEFIIDRDFELIKALGQGAYGVVCSAQYKGNEDGGKVAIKKVTNIFSKKILAKRALREIKLLRHFRGHKYITCLYDLDVIPDQNNNFNEIYLYEELMECDLHHIIKSKQPLTDSHYQSFIYQILGGLKYIHSADVLHRDLKPVNLLVNSDCELKICDFGLARGYSSDAEKNAGFLTEYVATRWYRAPEIILSFQTYTKAIDIWSVGCILAELLGGRPIFRGRDYVDQLNLILSTLGTVSEETLQSIRSERAQDYVRSLPFMPKIPFSQLFPGANPEAIDLLDRMLTVDPTHRITVTEALEHPYLKVWHDPNDEPVCSSKFDFSFEVVDDIETMKQMIVDEVLSLREFVRRPIQEQQLPFTEPDKHFDVSFDQPQIEPPAENYRDDHLPRPHELESQILDLEHELQYGLDRYGTQ

SEQ ID NO: 140272 - DNA, 1563 bp, Kluyveromyces lactis
  CDS (1)..(1563)
atgaacgaatacgatgcggtagatagacacactttcaaagtgtttaatcaggacttcacagtggataaacggttccagttgattaaagaaataggtcatggttcgtacgggattgtttgctctgcccggttcactgaagctgcagatgaaaccacggtggctattaagaaagttaccaacgttttctcaaagactctgctctgcaaaagatctctaagggaactgaaacttctaagacattttagaggtcataaaaatatcacttgtctatacgatatggatattgtgttccagccggacggtatgttcaatggtctttatttgtacgaggaattaatggaatgtgatatgcatcaaattgtaaaatcgggtcagcccttaacagatgcccattaccaatcgttcatctaccagattctttgtgggttaaaatatattcattcagcagacgtgctccatcgtgatttgaagccagggaatcttttggttaacgctgattgtcagttgaagatttgtgatttcggattggccagagggtacagcgagaatccagtagaaaataaccaatttttgaccgaatacgtggcaacgagatggtacagagcaccggaaattatgttgagctatcaaggttatacaaaggctattgacgtatggtcttgtggttgtatcttggcggaattgctaggtgggaaacctatctttaagggtaaagattacgtcgaccaattgaataggatcttacaagtcttggggactcctccagaggaaactttgaaaagaatcggatcgaaaaacgtccaagactatatccaccagctaggatatattccaaagataccattcagcactttatacccaaatgccaacccggatgcattgaaccttcttgagggaatgttaagctttgatcctcaacttagaataacagtcgatgatgctctacaacatccgtatttgtccatctggcatgatcctgcagatgaaccgatatgtacagaaaagttcgatttttcttttgaaagtgtcaatgagattgaacaacttaaacaaatggtaattgacgaagtgaccgatttcaggcaatatgtgagattacccctcttacacgagcaacagcaacaacaggggaagacagacggtggttttgatgatcaaatacgagaagatcaacgcacatttcaagcgcagctagaagaacaagtgaacaatggtagaactgcatctaacgttccatcgttcgatgagccgttttctagtcaaatgatgggttccgcgtcacaacaagatcctcttgttggtattcattcggataatttaccaagccatgaacttgacttccctcctaggcctagtgagaatgtgctagattcgccaatgggtctaagtcatcagcaaacgcataacggctctcctgagtgccaagatataaatgaccttttaggattagaaagagaactagaatttggattagatagacagtttaatgaaaccgtctggtatatagcttcatccactctctttgtagaacataaattgttgctcagattctgctatacgtga

SEQ ID NO: 140273 - protein, 520 aa, Kluyveromyces lactis
MNEYDAVDRHTFKVFNQDFTVDKRFQLIKEIGHGSYGIVCSARFTEAADETTVAIKKVTNVFSKTLLCKRSLRELKLLRHFRGHKNITCLYDMDIVFQPDGMFNGLYLYEELMECDMHQIVKSGQPLTDAHYQSFIYQILCGLKYIHSADVLHRDLKPGNLLVNADCQLKICDFGLARGYSENPVENNQFLTEYVATRWYRAPEIMLSYQGYTKAIDVWSCGCILAELLGGKPIFKGKDYVDQLNRILQVLGTPPEETLKRIGSKNVQDYIHQLGYIPKIPFSTLYPNANPDALNLLEGMLSFDPQLRITVDDALQHPYLSIWHDPADEPICTEKFDFSFESVNEIEQLKQMVIDEVTDFRQYVRLPLLHEQQQQQGKTDGGFDDQIREDQRTFQAQLEEQVNNGRTASNVPSFDEPFSSQMMGSASQQDPLVGIHSDNLPSHELDFPPRPSENVLDSPMGLSHQQTHNGSPECQDINDLLGLERELEFGLDRQFNETVWYIASSTLFVEHKLLLRFCYT

SEQ ID NO: 140274 - DNA, 1339 bp, Emericella nidulans
  CDS (1)..(1065)
atggtgcagcagatgccgcctcagggaggctcaaggaagatttcctttaacgtctcagatcaatatgagattcaagacgtcattggtgaaggcgcctatggtgttgtttgctctgctatccacaagccctctggccagaaggtagccatcaagaagatcaccccctttgaccattcgatgttttgcctgcgaaccctacgagagatgaagctgctccgctacttcaaccatgagaatatcatctccattttggacatccagaggccgcgaaactatgagagtttcaacgaagtctacctcattcaggaattgatggaaacagatatgcaccgcgttatccgcacgcaagacctgtcagatgaccactgccagtactttatttaccaaactttgcgtgcgctgaaggccatgcactccgctaacgtcctccaccgtgatctcaaaccatcgaaccttctcctcaatgcaaattgtgacctgaaggtctgcgactttggtctagctcgatctgcggcttcgactgacgataattctggtttcatgacggaatacgtggcgacgcgctggtaccgtgcacctgaaatcatgttgacgttcaaggaatacacaaaggcaattgatgtgtggagtgtgggctgcattcttgcagagatgctgagcgggaagcccttgttccctggaaaggactatcaccatcaattgactctaattctggatgttcttggaacacctaccatggaagactactacggaatcaagtcccgacgggctcgggagtacatccgttctctcccattcaagaagaagattccgttcaaggcactgttccctaagagcaacgacctagctctggatctgctagagaagcttttggccttcaacccgacgaagcgaatcaccgtggaggaggctctgcgtcacccgtacctggaaccatatcatgatccagatgacgagccaacagcgcccccaatcccggaaggcttctttgacttcgacaagaataaggatgctctcagcaaagagcagttgaaaattctgatttacgaggagatcatgcggtagagaatcaagtgtcgaatcttggagttgagaaggcagcacctagtaagcagcatacgcttgcacgcaccatatttgcatagagattttcaggtagtctatttactttgcggcttaatgtactgcatttttgtctacatttcgtttgggaaagtggaacaaacatggatctatcaatcttcattctatgcgcaggaaaacgtgggtatgtagtaaaaaccataaaatagcaacttatctcaattccaaaaaaaaaaaaaaaaaaaaaaaaaaaaaa

SEQ ID NO: 140275 - protein, 354 aa, Emericella nidulans
MVQQMPPQGGSRKISFNVSDQYEIQDVIGEGAYGVVCSAIHKPSGQKVAIKKITPFDHSMFCLRTLREMKLLRYFNHENIISILDIQRPRNYESFNEVYLIQELMETDMHRVIRTQDLSDDHCQYFIYQTLRALKAMHSANVLHRDLKPSNLLLNANCDLKVCDFGLARSAASTDDNSGFMTEYVATRWYRAPEIMLTFKEYTKAIDVWSVGCILAEMLSGKPLFPGKDYHHQLTLILDVLGTPTMEDYYGIKSRRAREYIRSLPFKKKIPFKALFPKSNDLALDLLEKLLAFNPTKRITVEEALRHPYLEPYHDPDDEPTAPPIPEGFFDFDKNKDALSKEQLKILIYEEIMR

SEQ ID NO: 140276 - DNA, 1059 bp, Cochliobolus heterostrophus
  CDS (1)..(1059)
atgccaccagcaggaagcggcagctccaggaaaatctccttcaacgtctcggagcagtacgacatccaagatgttgtaggagagggcgcatacggtgtcgtatgctccgccttgcacaagccctcgggccagaaggttgccattaagaagattacgccctttgaccactccatgttctgcttgagaacactgcgagagatgaagctgctgcgctacttcaaccacgaaaacatcatctccattctagacatccaaaagccccgcaactacgagacctttaccgaggtctacctaattcaggaactgatggagacggacatgcatcgcgtcattcgcacacaggagctgtccgacgaccactgccagtacttcatctaccagaccctacgcgccctcaaggccatgcactcggcaaacgtcctccaccgcgatctcaagccctccaacttgctgctcaacgcaaactgcgatctcaaagtctgtgattttggtctcgctcgatccgccgcttcgaccgaggacaactcgggtttcatgaccgaatacgttgccactcgttggtaccgtgcgccagagattatgcttaccttcaaggagtacacaaaagcaatcgacgtatggagcgtgggatgtatcctcgccgagatgctcagcggaaagcctcttttcccaggcaaggactaccaccaccagctcacattgatcctcgacgtactcggtacgcccaccatggaggattactacggtatcaagtcccgccgagctcgcgaatacatccgatctctgcccttcaagaagaagattccctggaaggccattttccccaagacaaacgatttggctcttgacctgctcgagcgattactggctttcaacccagtcaagcgcatctcagtcgaggacgcgctcaagcacccataccttgagccctaccacgacccagatgacgagccaggcgcggaccccattccagaggagttcttcgactttgacaagaacaaggacaacctgaccaaggaacagttgaagctcctcatctaccaggagattatgcgataa

SEQ ID NO: 140277 - protein, 352 aa, Cochliobolus heterostrophus
MPPAGSGSSRKISFNVSEQYDIQDVVGEGAYGVVCSALHKPSGQKVAIKKITPFDHSMFCLRTLREMKLLRYFNHENIISILDIQKPRNYETFTEVYLIQELMETDMHRVIRTQELSDDHCQYFIYQTLRALKAMHSANVLHRDLKPSNLLLNANCDLKVCDFGLARSAASTEDNSGFMTEYVATRWYRAPEIMLTFKEYTKAIDVWSVGCILAEMLSGKPLFPGKDYHHQLTLILDVLGTPTMEDYYGIKSRRAREYIRSLPFKKKIPWKAIFPKTNDLALDLLERLLAFNPVKRISVEDALKHPYLEPYHDPDDEPGADPIPEEFFDFDKNKDNLTKEQLKLLIYQEIMR

SEQ ID NO: 140278 - DNA, 1647 bp, Zea mays
  CDS (139)..(1359)
acaaatcggccgcgggggagagagatatatagagccaatttttgcccgatttgcctgtctgctcgggactgagccggtattcctcttcctcgtcgacgagaataaataagctaagccagggccccggggaagaagaagatgagctccgtcggaggcatggacgggtctccgccggtcgccgaattccagccgacggtgacgcacggcggccggttcctccggtacaatatcttcggcaacctgttcgagatcacgcgcaagtaccagcctcccgtcatgcccatcggccgcggcgcctacgggatcgtctgctcggtgatgaacttcgagacgagggagatggtggccatcaagaagatcgccaacgccttcgacaaccacatggacgccaagcgcacgctccgggagatcaagctgctaaggcacctcgaccacgagaacatcatcggcatcagggacgtgatcccgccgcccgtcccgcaggcgttcaacgacgtgtacatcgggacggagctgatggacacggacctgcaccacatcatccggtccaaccaggagctctcggaggagcactcccagtacttcctgtaccagatcctccgcgggctcaagtacatccactccgccaacgtgatccacgttgacctcaagcccagcaacctgctggtgaacgccaactgcgacctcaagatctgcgacttcgggctggcgcgcccgtcctccgagagcgacatgatgacggagtacgtggtcacgcgctggtaccgcgcgcccgagctgctgctcaactccaccgactactcggcggccatcgacgtctggtccgtcggctgcatcttcatggagctcatcaaccgccagccgctcttccccggacgcgaccacatgcaccagatgcgcctcataacagaggcacgagtgacgcacgcaacgcaccccacatccccttcctataattcaattccttcttcttcttctgctcataacatcgcggcacggcaggtgatcgggacgcccacggacgatgagctcgggttcatccggaacgaggacgcgcggaagtacatgcgccacctcccgcagttcccgcgccggccgttcgtcagcctgttcccgcggatgcagcccgtcgcgctggacctcatcgagcggatgctcaccttcaacccgctgcagaggatcacagtggaagaggcgctggagcacccgtacctggaacggctacacgacgtcgccgacgagcccatctgcacggacccgttctcgttcgacttcgagcagcaggctctgacggaagaccaaatgaagcagctgatattcaacgaggccatcgaactcaaccccaacttccgatactagctagctagctagttcggctacacacatcttaattatacgtatgtatgattcctcgtacgtggtttgtaaatagaagatcgagccggccgccggtgtgtattagactgaacgttgcatttgtttgttcgttgacgttcgcgcgctcgccatatatatcctgcctgtgaggctgtgtagtgtgctgccgtgctgcaggtttcaggtgttcgtgtaatgagctgtaccaagaataaaaggctttggacttaaccaggctgaacttgctcaaaaggtggggactacccagcc

SEQ ID NO: 140279 - protein, 406 aa, Zea mays
MSSVGGMDGSPPVAEFQPTVTHGGRFLRYNIFGNLFEITRKYQPPVMPIGRGAYGIVCSVMNFETREMVAIKKIANAFDNHMDAKRTLREIKLLRHLDHENIIGIRDVIPPPVPQAFNDVYIGTELMDTDLHHIIRSNQELSEEHSQYFLYQILRGLKYIHSANVIHVDLKPSNLLVNANCDLKICDFGLARPSSESDMMTEYVVTRWYRAPELLLNSTDYSAAIDVWSVGCIFMELINRQPLFPGRDHMHQMRLITEARVTHATHPTSPSYNSIPSSSSAHNIAARQVIGTPTDDELGFIRNEDARKYMRHLPQFPRRPFVSLFPRMQPVALDLIERMLTFNPLQRITVEEALEHPYLERLHDVADEPICTDPFSFDFEQQALTEDQMKQLIFNEAIELNPNFRY

SEQ ID NO: 140280 - DNA, 1131 bp, Drosophila melanogaster
  CDS (1)..(1131)
atggaggaatttaattcgagcggatcagtagttaatggtacaggatctacggaagttcctcaatctaatgctgaagttataaggggacaaatatttgaagttggtcctaggtatattaaactcgcctatataggtgaaggagcttatggcatggttgtgtctgcggatgacacgctaacaaaccaaagagttgcaataaaaaaaatatcgccctttgaacaccaaacttattgtcaaaggactctcagagaaataaccatattgaccagatttaaacatgaaaacattattgatattcgagatattcttcgagttgatagcatagaccaaatgagagatgtttatattgtacagtgtttgatggagactgatttgtataaactacttaaaacacagaggctaagtaatgatcacatctgttacttcttatatcagatattgcgtggactcaagtacattcattccgcaaacgtcttgcatcgggaccttaagccaagtaatttactgttgaacaagacgtgcgacttaaaaatttgcgactttggattggctcgtattgcagatcccgagcacgatcatactggctttctcacagaatacgttgctacccgatggtatagagcacctgaaataatgcttaactcaaaaggatacaccaaatctatagacatatggtccgttggctgcattttggctgaaatgttaagtaatcggccaatatttcctggaaaacattacctggatcaacttaatcatattcttggagtcttgggttcaccgtcccgggacgatttagagtgtattattaatgaaaaggcacggaactatttggaatctttaccatttaagccaaatgtaccctgggcgaaactatttccaaatgctgatgcgttggctttagatctccttggaaaaatgttaacatttaacccgcataaacggattcctgtcgaggaagctcttgcacatccctatttagagcaatattatgatcctggagatgagcctgtcgctgaagtgccatttcggattaatatggaaaatgatgacatttctcgagatgccctgaagtcgctcatttttgaagaaaccttaaaatttaaggaacgacaaccagacaatgcgccttaa

SEQ ID NO: 140281 - protein, 376 aa, Drosophila melanogaster
MEEFNSSGSVVNGTGSTEVPQSNAEVIRGQIFEVGPRYIKLAYIGEGAYGMVVSADDTLTNQRVAIKKISPFEHQTYCQRTLREITILTRFKHENIIDIRDILRVDSIDQMRDVYIVQCLMETDLYKLLKTQRLSNDHICYFLYQILRGLKYIHSANVLHRDLKPSNLLLNKTCDLKICDFGLARIADPEHDHTGFLTEYVATRWYRAPEIMLNSKGYTKSIDIWSVGCILAEMLSNRPIFPGKHYLDQLNHILGVLGSPSRDDLECIINEKARNYLESLPFKPNVPWAKLFPNADALALDLLGKMLTFNPHKRIPVEEALAHPYLEQYYDPGDEPVAEVPFRINMENDDISRDALKSLIFEETLKFKERQPDNAP

SEQ ID NO: 140282 - DNA, 1164 bp, Debaryomyces hansenii
  CDS (1)..(1164)
atggtatcggatggagagtttactaggacccaaatctttgggactgtatttgaaataacaaatagatacacggatttaaatccagttggtatgggagcgttcgggcttgtttgttctgctatagacaaattgacggggcaaaatgttgctgtaaagaaaatcatgaagccgttcctgacgtcggtattggccaaacgtacatacagagaattgaagttattaaagcatttaagacacgagaaccttattacgttggacgacattttcttgtcgccattagaggatatttattttgttacggaattacaggggacggatttgcatcgattattgacatcgagacctttagaaaagcagttcatccaatacttcacgtaccagatattaagagggctcaagtacgtacattctgcgggggtgattcaccgtgatttaaaaccatcgaatattttgatcaatgaaaattgtgatttgaagatttgtgactttggtttggccaggatccaagacccgcagatgactggttatgtctcaactagatattacagggcaccagaaattatgttgacttggcaaaagtacgatacagaagttgatttgtggtctgtaggatgtattttgtcagaaatgattgaaggcaaaccattattcccaggtaaagatcatgttcatcaattctcaattattacagagttattgggttctccacctccagacgtgattgaaactatatgttccgaaaacacattaaggtttgtccaatccttacctcacagagaccctattccattcagcgagcggtttgcccaatgcagtcatgtcgaaccggaagctatcgacttattggctaaaatgttgatttttgaccctaaaaagagaattagtgcattagatgcgttatctcatccttacatggaaccatatcacgacccaactgatgaacctgtttgtgaagttaagttcgattggagtttcaacgatgcagatttaccagttgacacttggagagttatgatgtacagtgaaattttagacttccatcaaattataggtgctggggcaaacggaacaactcaagaacaaatggctcaaatccaacaagagggtattcaagctcctagcagccaataccaacaaaccaaccaagaacagaaagttgaatga

SEQ ID NO: 140283 - protein, 387 aa, Debaryomyces hansenii
MVSDGEFTRTQIFGTVFEITNRYTDLNPVGMGAFGLVCSAIDKLTGQNVAVKKIMKPFLTSVLAKRTYRELKLLKHLRHENLITLDDIFLSPLEDIYFVTELQGTDLHRLLTSRPLEKQFIQYFTYQILRGLKYVHSAGVIHRDLKPSNILINENCDLKICDFGLARIQDPQMTGYVSTRYYRAPEIMLTWQKYDTEVDLWSVGCILSEMIEGKPLFPGKDHVHQFSIITELLGSPPPDVIETICSENTLRFVQSLPHRDPIPFSERFAQCSHVEPEAIDLLAKMLIFDPKKRISALDALSHPYMEPYHDPTDEPVCEVKFDWSFNDADLPVDTWRVMMYSEILDFHQIIGAGANGTTQEQMAQIQQEGIQAPSSQYQQTNQEQKVE

SEQ ID NO: 140284 - DNA, 1258 bp, Pneumocystis carinii
  CDS (89)..(1201)
aactgactcatattggatcagatattgtttctacgcatagtttattataggataatgcttttttccggttaatttagtcctgttattgatggattctaaacattctgtttttaatgttatgggtcaggaatttgtgcttcaaaagggctacgaagtcataaaaggccttggaaaaggttcctatggtgtcgtttgctctgcaaagaatatagaggttgaagataataacaaagttgctatcaaaaaaataacaaatatattttctaaaaagatgcttgcaaaaagagctttgcgtgaaattatgttgttgcagcatttcagaaatcataaaaatataactacactttatgacatggatattgtcgatccttcaaaatttaatgagctttatctttatgaagaacttatgcaggccaatttaaatagcattataagatcagatcaaccattgacagatgcacattttcagtcgtttatatatcagattctttgcggcttaaaatatatccattcagctaatgttcttcatcgtgatttaaagcctagtaatcttttaattaatgcagattgcaaactgaaaatatgtgatttcggtctatctagaggtatctctgtaaatcagggtcaaggtactgaatatatgactgaatatgttaccacaagatggtatcgagctccagaggttatgcttagttttcaaagctatagtaaagctattgatctctggtccgttggatgtattttggcagagcttctaggaagaaaaccatttttcaaaggaagtaattatgttgatcaattgaatcaaattttctgcattcttggcactccaaacgaaaatattatatctaaaataaaaagtgcatctgctcaaagttatattagaagtttacctactctaccaaaaatgccttactcaaaaatatttccatacgctaatccagatgcattggatcttctcaattgcttacttacattcgatccatatgatcgtatttcatgtgaagaagcattagaacatccttatcttattatttggcatgatccaaataaagaacctgtctgttctgaacaatttgattttggatttgaagcaattgatagcattgaggaaataagacagatgataataaacgaagtctcaagatttaaaggattaactggaaaccaaaaattgtatcattctatatctaatacataattttaatacaaacgtcacttagaggatatttgtagaatgcgatacgctttatgttaa

SEQ ID NO: 140285 - protein, 370 aa, Pneumocystis carinii
MDSKHSVFNVMGQEFVLQKGYEVIKGLGKGSYGVVCSAKNIEVEDNNKVAIKKITNIFSKKMLAKRALREIMLLQHFRNHKNITTLYDMDIVDPSKFNELYLYEELMQANLNSIIRSDQPLTDAHFQSFIYQILCGLKYIHSANVLHRDLKPSNLLINADCKLKICDFGLSRGISVNQGQGTEYMTEYVTTRWYRAPEVMLSFQSYSKAIDLWSVGCILAELLGRKPFFKGSNYVDQLNQIFCILGTPNENIISKIKSASAQSYIRSLPTLPKMPYSKIFPYANPDALDLLNCLLTFDPYDRISCEEALEHPYLIIWHDPNKEPVCSEQFDFGFEAIDSIEEIRQMIINEVSRFKGLTGNQKLYHSISNT

SEQ ID NO: 140286 - DNA, 1522 bp, Pisum sativum
  CDS (25)..(1209)
aaatcagcttgaagaggaagaataatggaaggaggaggaggagctccggcagctgacgcggtgatggaagatgcagcgccgcaacagcaagagccacagcagcaggcggcgatggggatcgagaatattccggcgacacttagccacggtggcaggttcattcaatacaatatattcggtaatatatttgaagttactgcaaaatacagacctcctatcatgccaatcggtaaaggcgcttacggtattgtttgctctgctcataattcggagacgaatgaacatgttgctgtcaagaagattgcaaatgcatttgataacaagattgatgcaaagaggacccttcgtgaaatcaagctcgttcgccacatggatcatgaaaacgtggtcgcaatccgggatatagtgccaccacctcagcgggaggtattcaatgatgtttacattgcatatgagctaatggacactgatcttcaccaaatcattcgatcaaatcaagcattgtccgaggagcactgtcaatattttctgtaccaaattcttcgtgggttgaagtacattcattccgcgaatgttttgcatagggacttaaaacccagcaaccttctcctgaacgccaactgtgacttgaagatttgtgattttggactggctcgtgtaacctctgaaaccgactttatgactgaatatgttgttacaagatggtaccgtgcaccagagcttctgctaaactcttctgattacacagcagcaattgatgtctggtctgttggttgtattttcatggagctgatggatcgaaagccgttgtttcctggcagagatcatgtgcatcagttgcgtctactcatggagctgattggtaccccatcagaagctgatttgggttttctgaatgaaaatgccaagagatacattaggcaactgcctctttaccgccgccaatctttccaagaaaagtttccgcatgtccatcctgaagctatagatcttgttgaaaagatgttaacttttgatcctagacaaagaattactgttgaaaatgcactggcacacccttacttgacatcgctgcatgacatcagcgatgaacctgtatgcacgactcccttcagctttgattttgaacagcatgctttgaccgaggaacagatgaaagaactgatatacagagaagctctagcatttaaccccgagtaccagcagtagtgtagtggtgataataatggcgggcgttatcattgggtttggaatatgtttgtgtctgcggtccataggtcgagagatttctgtgtatatatatcatcctatctatcatctgaaaccagatgaccttggaagttaattatttgatcataggtttgattggtagactcactggaacacaatcataaggtattttgtgttgtcttatttgtttcaaattattctccaatttattggtttaagccaacttatgataaactttgtcacggaacatatgcattaatgggttattttaaaaaaaaaaaaaaaaaaaaaa

SEQ ID NO: 140287 - protein, 394 aa, Pisum sativum
MEGGGGAPAADAVMEDAAPQQQEPQQQAAMGIENIPATLSHGGRFIQYNIFGNIFEVTAKYRPPIMPIGKGAYGIVCSAHNSETNEHVAVKKIANAFDNKIDAKRTLREIKLVRHMDHENVVAIRDIVPPPQREVFNDVYIAYELMDTDLHQIIRSNQALSEEHCQYFLYQILRGLKYIHSANVLHRDLKPSNLLLNANCDLKICDFGLARVTSETDFMTEYVVTRWYRAPELLLNSSDYTAAIDVWSVGCIFMELMDRKPLFPGRDHVHQLRLLMELIGTPSEADLGFLNENAKRYIRQLPLYRRQSFQEKFPHVHPEAIDLVEKMLTFDPRQRITVENALAHPYLTSLHDISDEPVCTTPFSFDFEQHALTEEQMKELIYREALAFNPEYQQ

SEQ ID NO: 140288 - DNA, 1101 bp, Drosophila melanogaster
  CDS (1)..(1101)
atgtcagtgtccattacaaaaaagttttacaagttggatataaatcgaacggaatgggagatcccggatatataccaggatctgcagcccgtgggatcgggagcttacggacaggtgtcaaaggcagttgttcgtggcaccaatatgcatgtggccattaaaaagcttgccaggccttttcaatcagctgtccatgcaaagaggacgtaccgggagcttcgacttttaaagcatatggatcatgagaacgtaatcggtctgctggacatattccatccacatcccgctaatggatcgctggagaacttccaacaggtgtacttggttacccacttgatggacgcagatctgaacaacatcatacggatgcagcacttgtccgacgaccacgtccagtttttagtctaccagatactccgtggcttgaagtatatccacagcgccggagtgatccaccgtgatcttaagccctcaaacattgccgtcaacgaggattgcgagctgcgcattctagacttcgggctggcccgcccaacggagaacgagatgacaggctatgtggccacgcgttggtaccgggcacctgaaataatgctcaattggatgcactacgaccaaacagtggacatctggtcggtgggctgcatcatggccgaactaattaccagacgaaccctcttcccaggcaccgaccatattcaccagctaaacctgattatggagatgttgggcacgccacccgccgaatttttgaagaagatctcatcggaaagtgcacgttcctacatccagtcacttccgcctatgaagggacgaagttttaaaaatgtttttaagaacgccaatccgctggccattgatttgctggaaaagatgttggagctagatgccgaaaagcggatcacagccgaggaggctctttcccatccatatctggagaagtatgcggagcccagcgtcgagcagacctcaccaccatacgatcacagcttcgaggatatggatttgcccgtagacaaatggaaggaattgatctacaaggaggtcaccaactttaagcccccaccatcgtatgctcaggttctaaaggatgtaaagtga

SEQ ID NO: 140289 - protein, 366 aa, Drosophila melanogaster
MSVSITKKFYKLDINRTEWEIPDIYQDLQPVGSGAYGQVSKAVVRGTNMHVAIKKLARPFQSAVHAKRTYRELRLLKHMDHENVIGLLDIFHPHPANGSLENFQQVYLVTHLMDADLNNIIRMQHLSDDHVQFLVYQILRGLKYIHSAGVIHRDLKPSNIAVNEDCELRILDFGLARPTENEMTGYVATRWYRAPEIMLNWMHYDQTVDIWSVGCIMAELITRRTLFPGTDHIHQLNLIMEMLGTPPAEFLKKISSESARSYIQSLPPMKGRSFKNVFKNANPLAIDLLEKMLELDAEKRITAEEALSHPYLEKYAEPSVEQTSPPYDHSFEDMDLPVDKWKELIYKEVTNFKPPPSYAQVLKDVK

SEQ ID NO: 140290 - DNA, 1098 bp, Drosophila melanogaster
  CDS (1)..(1098)
atgtcgcgcaaaatggccaaattctacaagctggacatcaatcgcaccgagtgggaaatcccggaaacataccagaacctgcaacccgtgggtcagggtgcctacggccaggtctgcaaggccgtggtccgcggaaccagcacgaaggtggccatcaagaagcttgccaggcccttccagtcggcggtccatgcgaagcgcacctatcgggaactgcggctgctgaagcacatggatcacgagaacgttattggtctgctggatgtctttcatccaggacagcccgccgattcgctggatcagttccagcaagtgtacatggtgacccacttgatggacgccgatctgaacaacataatacgcacgcagaaactgtctgatgatcatgtccagtttctggtctaccaaatcctgcgcggtctgaagtacatccacagcgctggggtcatccatcgtgatctaaagccatcgaacattgcggtaaacgaggactgtgagcttcgcatcctggatttcggtttggcccgtcccgcagaaagcgagatgaccggatacgtcgcaacgcgatggtaccgggcgcctgagatcatgctcaactggatgcactacaaccagacggcggacatctggtcggtgggctgcatcatggctgagctgctgactgggcgcacgctgttccctggaaccgatcacatccatcagctgaacctcatcatggaagtgctgggcacgccagctgatgagttcatgagccgcatctcctcggagagcgctagaaactatattcgttcactgccggtgatgccgcgccgcaatttccgcgacatcttccgcggtgccaatccgctggccatcgatttgctggagaagatgctggaacttgacgccgacaagcgcataaccgccgagcaggcgctggcccatccgtacatggagaagtaccacgatccaaccgatgagcagaccgccgcgctctacgaccagagcttcgaggagaacgagctgccggtggagaagtggcgggagatggtcttcagcgaggtgacggccttcaagcccacagccgccttcgctgagctcctgcccaaagagcagtaa

SEQ ID NO: 140291 - protein, 365 aa, Drosophila melanogaster
MSRKMAKFYKLDINRTEWEIPETYQNLQPVGQGAYGQVCKAVVRGTSTKVAIKKLARPFQSAVHAKRTYRELRLLKHMDHENVIGLLDVFHPGQPADSLDQFQQVYMVTHLMDADLNNIIRTQKLSDDHVQFLVYQILRGLKYIHSAGVIHRDLKPSNIAVNEDCELRILDFGLARPAESEMTGYVATRWYRAPEIMLNWMHYNQTADIWSVGCIMAELLTGRTLFPGTDHIHQLNLIMEVLGTPADEFMSRISSESARNYIRSLPVMPRRNFRDIFRGANPLAIDLLEKMLELDADKRITAEQALAHPYMEKYHDPTDEQTAALYDQSFEENELPVEKWREMVFSEVTAFKPTAAFAELLPKEQ

SEQ ID NO: 140292 - DNA, 1512 bp, Medicago sativa
  CDS (100)..(1263)
tgacagtttgtttatgcaggagttagggagagatagtacagatctgtttgaccaaaagcattcacaacacaaatcagagcttgaagaagagaaacaacaatggaaggaggaggagctccaccagctgacaccgtgatgtcagatgctgcaccggcgccgccgcagatggggatcgagaatattccggcagtccttagccacggtggtaggttcattcaatacaacattttcggcaacatttttgaagttactgcaaaatacaaaccacccatcatgccaatcggtaaaggcgcttatggtattgtttgctctgctcataattcggagacgaatgaacatgtcgcggttaagaagattgcaaatgcatttgacaacaagattgatgccaagaggactctccgtgaaatcaagctgcttcgccatatggatcatgaaaacgtggttgcaatcagggatatagtgccaccacctcagagggaggtattcaatgatgtttacattgcatatgagctaatggacaccgaccttcaccaaatcattcgatcaaatcaagcactatcggaggagcactgtcagtactttctgtaccaaatccttcgtggtttgaagtacatacattctgcaaatgttctgcatagggacttaaaacccagcaaccttctcctgaacgccaactgtgacttaaagatttgtgattttggactggcccgtgtaacctctgaaaccgattttatgactgaatatgttgttactagatggtaccgtgcaccagagcttctgttaaactcttctgattatacagcagcaattgatgtatggtctgttggttgtattttcatggaactgatggatcgaaagcctttgtttcctggcagagatcatgtgcatcagctgcgtctactcatggagttgatcggtaccccatcagaagatgatttggggtttctgaatgaaaatgctaagagatacattaggcaactacctccttaccgccgtcaatctttccaagaaaagtttccacatgtccatcctgaagctatagatcttgttgaaaagatgttaacttttgatccgagaaaaagaattactgttgaagatgcactggcacacccctacttgacatctctgcatgacatcagtgatgaacctgtgtgcatgactcccttcagctttgactttgaacagcatgcattgaccgaggaacagatgaaagaactgatatacagagaggctctagcatttaaccctgagtaccagcagtagtgtagtagtgataatgatggtaatgttgtcattggatttggaatttgttatgtttgtttcccataggtcaagagatttatgtgtatatatatcatcatatctatcatctgaaaccagatgaccttggaatttaattattttgttataggcttgattggtagactcactggaaaacaatcataaggtgtttttgtattttgtattgacttatttgtttcaaattattctcctaaaaaaaaaaaaaaaaaa

SEQ ID NO: 140293 - protein, 387 aa, Medicago sativa
MEGGGAPPADTVMSDAAPAPPQMGIENIPAVLSHGGRFIQYNIFGNIFEVTAKYKPPIMPIGKGAYGIVCSAHNSETNEHVAVKKIANAFDNKIDAKRTLREIKLLRHMDHENVVAIRDIVPPPQREVFNDVYIAYELMDTDLHQIIRSNQALSEEHCQYFLYQILRGLKYIHSANVLHRDLKPSNLLLNANCDLKICDFGLARVTSETDFMTEYVVTRWYRAPELLLNSSDYTAAIDVWSVGCIFMELMDRKPLFPGRDHVHQLRLLMELIGTPSEDDLGFLNENAKRYIRQLPPYRRQSFQEKFPHVHPEAIDLVEKMLTFDPRKRITVEDALAHPYLTSLHDISDEPVCMTPFSFDFEQHALTEEQMKELIYREALAFNPEYQQ

SEQ ID NO: 140294 - DNA, 1678 bp, Oryza sativa
  CDS (89)..(1285)
aaatctcgcgacgaattccgcctccactttcccttcccttcctcctccacctccacctcctcgtcgcgatccaaatccgaatccggccatggacgccggggcgcagccgccggacacggagatggcggaggccggcggcgggcagcagccgcctgctgcggctgcggcggcgggggcgggggcaggggcggggatgatggagaacatccaggcgacgctgagccatggcgggaggttcatccagtacaacatcttcgggaacgtgttcgaggtcaccgccaagtacaagccccccatcctccccatcggcaagggcgcctacggcatcgtctgctcggcgctcaactcggagacgggggagcaggtggcgatcaagaagatcgccaacgcgttcgacaacaagatcgacgccaagcgcacgctcagggagatcaagctgctccgccacatggaccacgagaatattgttgccataagggatatcatacctcctccacaaaggaattcattcaatgacgtttatattgcatatgaattgatggatactgatctgcatcaaattattcgctcaaatcaagcattgtcagaggagcactgccagtatttcctttatcagattctccgtggcttgaagtatatacattcagcaaatgtccttcaccgagacttgaagcccagcaacctacttttgaatgcaaattgtgacctcaaaatttgtgattttggacttgctcgtaccacctcagaaaccgattttatgactgagtatgttgtcacaagatggtatagggcaccggaacttctgttgaattcctctgaatatactgcagcaattgatgtgtggtctgtgggctgtatttttatggaactcatggatcgtaaacctttgtttcctggaagagatcatgtccatcaattacgtctactaatggagctcatcggaacgccaaatgaggctgatctggattttgtaaatgaaaatgcaagaagatacattcgccaacttcctagacatgcaaggcagtcctttcctgaaaaatttccacatgttcatcctttagcaattgatctggttgaaaagatgctgacatttgatcctagacagagaataacagttgaaggtgcccttgcacatccttacctggcatcactgcatgacataagtgatgagccagtctgctcatcacccttcagctttgacttcgagcagcatgcattgtccgaggaacaaatgaaggatctaatctaccaagaaggccttgcgttcaaccctgattaccagtagctggtgttctatttcagccttggattgattctattcatatggagttttttcctcctgcgccacaaaaggtcgccgacagtgatcactagttgtaaataattgcctcacctgaaaaatcctccctggttcaaagctgaaggtgttgttctaagagtagaaatgtactttgtgatcaagttcctgggtagctgctatgccattcttatgcttatgtatgttgtttaatgtgggatttttttccatcttaaatgtttttagtcccttttgtaagaagagttagttcatgaacgatgacggcctaaattctgcggttatcatcaaattccccattttcttgtcgattcatggatttctcatggttttacttaatgctccatgttgtaagacgtggtc

SEQ ID NO: 140295 - protein, 398 aa, Oryza sativa
MDAGAQPPDTEMAEAGGGQQPPAAAAAAGAGAGAGMMENIQATLSHGGRFIQYNIFGNVFEVTAKYKPPILPIGKGAYGIVCSALNSETGEQVAIKKIANAFDNKIDAKRTLREIKLLRHMDHENIVAIRDIIPPPQRNSFNDVYIAYELMDTDLHQIIRSNQALSEEHCQYFLYQILRGLKYIHSANVLHRDLKPSNLLLNANCDLKICDFGLARTTSETDFMTEYVVTRWYRAPELLLNSSEYTAAIDVWSVGCIFMELMDRKPLFPGRDHVHQLRLLMELIGTPNEADLDFVNENARRYIRQLPRHARQSFPEKFPHVHPLAIDLVEKMLTFDPRQRITVEGALAHPYLASLHDISDEPVCSSPFSFDFEQHALSEEQMKDLIYQEGLAFNPDYQ

SEQ ID NO: 140296 - DNA, 1356 bp, Oryza sativa
  CDS (48)..(1157)
tgtcaattcggctgcttgcggcgagagaagaggaggagggattagggatggacggggcgccggtggcggagttcaggccgacgatgacgcacggcggccggtacctgctctacgacatcttcgggaacaagttcgaggtgacgaacaagtaccagccgcccatcatgcccattggccgcggcgcctacgggatcgtctgctccgtgatgaactttgagacgagggagatggtggcgataaagaagatcgccaacgcgttcaacaacgacatggacgccaagcgcacgctccgggagatcaagctcctcaggcacctcgaccacgagaacatcataggcatcagggatgtgatcccgccgccgatccctcaggcgttcaacgacgtctacatcgccacggagctcatggacaccgacctccatcacatcatccgctccaaccaagaactgtcagaagagcactgccagtatttcctgtaccagatcctgcgggggctcaagtacatccactcggcgaacgtgatccaccgcgacctgaagccgagcaacctgctgctgaacgccaactgcgacctcaagatctgcgacttcgggctggcgcggccgtcgtcggagagcgacatgatgacggagtacgtggtcacccggtggtaccgcgcgccggagctgctgctcaactccaccgactactccgccgccatcgacgtctggtccgtcggctgcatcttcatggagctcatcaaccgccagccgctcttccccggcagggaccacatgcaccagatgcgcctcatcaccgaggtgatcgggacgccgacggacgacgagctggggttcatacggaacgaggacgcgaggaagtacatgaggcacctgccgcagtacccgcgccggacgttcgcgagcatgttcccgcgggtgcagcccgccgcgctcgacctcatcgagaggatgctcaccttcaacccgctgcagagaatcacagttgaggaggcgctcgatcatccttacctagagagattgcacgacatcgccgatgagcccatctgcctggagcccttctccttcgacttcgagcagaaggctctaaacgaggaccaaatgaagcagctgatcttcaacgaagcgatcgagatgaacccaaacatccggtactagattgaatcaccatggaaatgagatcccgtctatacctgctttgtacatatgatcaagattgagagccgggtagactgaacattgcatttgtttgtttgttgatgttcgaaacccacattctctgcaagttgtggctgctttgtatgatatatggtactatgttcgaataaaagggtttggaactttggattaaaaaaaa

SEQ ID NO: 140297 - protein, 369 aa, Oryza sativa; identical to SEQ ID NO: 63058

SEQ ID NO: 140298 - DNA, 1188 bp, Arabidopsis thaliana
  CDS (1)..(1188)
atggacggtggttcaggtcaaccggcggctgatacagagatgacagaagctcctggaggttttcccgcggcggctccatcgcctcagatgcctgggattgagaatattccggcgactcttagccatggtggtaggtttattcagtataacatatttggaaacatcttcgaggtcaccgctaagtataagcctccgatcatgcctattggcaagggtgcttatggcatcgtttgttcggctatgaattctgaaactaacgagagcgttgcgattaagaaaattgctaacgcttttgacaataagattgatgctaagaggactctccgtgagatcaagctgcttcgtcacatggatcatgaaaatattgttgcaatcagagatattatcccgccaccattaagaaacgctttcaacgatgtttacatcgcgtatgagttaatggacactgatctccatcaaatcattcggtcaaatcaagcattatccgaagaacattgccagtattttctttaccagatcctccgtggattgaaatacattcactctgcaaatgtgcttcacagggatttgaaaccaagtaatctcctcctgaacgcaaactgcgacctaaaaatctgcgattttgggctagctcgagtcacttctgagagtgatttcatgactgaatatgttgtcacgagatggtaccgtgcaccagagcttctcttaaactcttctgattatactgcagctatcgatgtttggtctgtaggctgtattttcatggagttaatggaccgtaagccactcttccctggacgagatcatgtccatcagcttcgcttgctcatggagctcataggaactccatcagaagaagagctcgagttcttgaacgaaaacgcaaagcgatacataagacagcttccaccttatcctcgccaatccatcactgataagttcccgacagtgcatcctttagctatagaccttatcgagaagatgttaacatttgatcctagacggagaatcacagttttagacgcattggcccatccatacctgaactcgttgcacgacataagcgatgagccagagtgtacaatacctttcaactttgattttgaaaaccatgcactctcagaggagcagatgaaggaactaatctaccgcgaggcgcttgctttcaatccagaatatcagcaatag

SEQ ID NO: 140299 - protein, 395 aa, Arabidopsis thaliana
MDGGSGQPAADTEMTEAPGGFPAAAPSPQMPGIENIPATLSHGGRFIQYNIFGNIFEVTAKYKPPIMPIGKGAYGIVCSAMNSETNESVAIKKIANAFDNKIDAKRTLREIKLLRHMDHENIVAIRDIIPPPLRNAFNDVYIAYELMDTDLHQIIRSNQALSEEHCQYFLYQILRGLKYIHSANVLHRDLKPSNLLLNANCDLKICDFGLARVTSESDFMTEYVVTRWYRAPELLLNSSDYTAAIDVWSVGCIFMELMDRKPLFPGRDHVHQLRLLMELIGTPSEEELEFLNENAKRYIRQLPPYPRQSITDKFPTVHPLAIDLIEKMLTFDPRRRITVLDALAHPYLNSLHDISDEPECTIPFNFDFENHALSEEQMKELIYREALAFNPEYQQ

SEQ ID NO: 140300 - DNA, 1754 bp, Nicotiana tabacum
  CDS (220)..(1335)
ggcacgagcaaatttcaaactcaaaaagaacccaaataagcaccgggtccggcccgcttttacacaaaagaccacctttgtgtccatagctgtttttcacttcactatttcttgaacagagcttagctccactaagattcactcattcacattccaaatcgaatcccaatcaaattctgtcagaagaaaaataaagtgagacagacaaagagagcagaaatggaaaacgaaaccaatgaaaaactggaaataaaaggaattccaacacatgaggggaaatatgtagagtacaatgtactaggtaacttctttgaggttacatcaaagtacatccctcctattcaacctgtcggccgtggcgcttacggcatggtctgctgtgctacgaattcggagacaaaggaggaggtagcaatcaaaaaaattgggaatgcatttgaaaatagaattgatgcgaaaaggacacttcgcgagatcaagcttctttcacacatggatcatgaaaatatcatcaaaataaaagatatagttagaccaccagacagagaggaattcaatgatgtgtacattgtgtatgagttaatggatactgatctgcatcagataatacgctcttcgcaggcattgacagatgatcactgccaatactttctctatcaattattacgtgggctcaagtatgtacattcagctaatgtcctccaccgggatctgaaacctagcaacttactactcaacgcaaactgtgacctcaagatttgtgattttgggctcgctagaaccacttcagaggcggattttatgacagagtatgttgtcacccgatggtatagggcaccggagttactactcaattgtactgaatatactgcagcaattgatatatggtcagttggttgcattctgatggaactcataaagagagaacctctttttccaggcagagactatgctcagcaattggggcttatcattgcgctattaggttcgccagaggattctgatcttggattcctaaggagtgacaatgctaggaagtatgtaaagcatctccctcgggttccaagacatcccttttcccagaagttcccggatgtgtcccctttagctcttgatcttgctgaaaggatgctggtttttgatccagctaaacgcataactgttgaggatgcattgaatcatccattcttgataagtctccatgagataaacgaggaacctgtttgcgattctcctttcaactttgactttgaacaagcatctctaagcgaggatgacataaaggagctcatatggaacgaggctctaaagtttgatcctaatacaatgaagtgatttcatactatatttcctcaattactggcttcatcgatgtattgagtgtgatttggctttggcaggttagccaattgtaacatctgttttatttttcttttaagctgagcttggagagtttggtttgcctcccttcatacacggggttgttataggggagtgcatgacgggggtaattattggattcatattctactcaagaatccttccccctcaaaattttctgtaaagagcaaatcttgttctgtttacaaacctgaaactctttgtaaacagatcatgagatagaaaaccaataagtatgaaaaagaaagaaattaatatgcttttgcgtataagttgcggataagttgtataagaaaccgacaataccagtggtattgatacttcaattttgatttgctctttgccttgaaaaa

SEQ ID NO: 140301 - protein, 371 aa, Nicotiana tabacum
MENETNEKLEIKGIPTHEGKYVEYNVLGNFFEVTSKYIPPIQPVGRGAYGMVCCATNSETKEEVAIKKIGNAFENRIDAKRTLREIKLLSHMDHENIIKIKDIVRPPDREEFNDVYIVYELMDTDLHQIIRSSQALTDDHCQYFLYQLLRGLKYVHSANVLHRDLKPSNLLLNANCDLKICDFGLARTTSEADFMTEYVVTRWYRAPELLLNCTEYTAAIDIWSVGCILMELIKREPLFPGRDYAQQLGLIIALLGSPEDSDLGFLRSDNARKYVKHLPRVPRHPFSQKFPDVSPLALDLAERMLVFDPAKRITVEDALNHPFLISLHEINEEPVCDSPFNFDFEQASLSEDDIKELIWNEALKFDPNTMK

SEQ ID NO: 140302 - DNA, 2698 bp, Saccharomyces cerevisiae
  CDS (871)..(2325)
  misc_feature (2696)..(2696): n is a, g, c or t
  misc_feature (2697)..(2697): n is a, g, c or t
  misc_feature (2698)..(2698): n is a, g, c or t
tgcagcattagctagattggacgtttgaaaatcttgataaactatgcagttaagatctctccgcataaggaaaaattcccctatgtgagtgacagtgggtaaaaacaagtacatacatgagctcatggtcccagagcgctttcccattgatattcccagagaaaatgtcgggttagaaagaactcagattccattaatgctatgctgggcactgtccattcataaggcacagggtcaaactattcaaagactaaaggtcgacttgaggagaattttcgaagccggccaagtttatgttgcactgtcaagagcggtaactatggacaccttacaggtcctaaactttgatccaggaaagattcgcaccaatgaaagagtaaaagatttctataaacgtttagaaactttgaaatgacttgcaacgaataaatgcatatactctagttgaagttttcttttcttgttctatacaggttcgaatacttgtgagcctatctgtataatttaacagaatcccgaaatattcatctagaagccatctatttagctaagcctacgtatgcggcgatttttatattatctttttttttttttatagaagactgcgaaatgttggcagaatggaaagtttcagtgttaaaaatagaaactgaaaaaggagatctagccaggaatatatcgaaaaaaaaagtgagggaaatcagatcctacacaaatatttagatttaattgaagaccctggtctgccagatatatatatatattagacgaactgtgcattcagtcagcaaatctaggccacagattttcttattgaagctatcaaaatagtagaaataattgaagggctgtgtataacaattctgggagatggctgataagatagagaggcatactttcaaggtcttcaatcaagatttcagtgtagataagaggtttcaacttatcaaagaaatagggcatggagcatacggcatagtgtgttcagcgcggtttgcagaagctgccgaagataccacagttgccatcaagaaagtgacaaacgttttttcgaagaccttactatgtaaaagatccctacgtgagctaaagcttttgagacatttcagaggccacaaaaatattacatgtctttatgatatggatattgttttttatccagacgggtctatcaatggactatatctttatgaggaacttatggaatgtgatatgcaccaaatcatcaaatccggtcaacctttgacggatgctcactatcaaagtttcacataccaaatattatgtggtttaaagtatattcattctgcagatgtcttgcatcgtgatttgaagcccggcaatttgcttgtcaatgcagattgtcaattgaaaatctgtgattttgggttagctagaggttattcggagaatcctgtcgaaaacagtcaatttttgacggagtacgtggccactagatggtatagagctccggaaataatgttgagttaccaaggatataccaaggcgattgacgtatggtcagctggctgtattttagcggagtttcttggtggaaagccaatcttcaaaggaaaggattacgttaatcaattgaatcaaatattacaagttttagggacacccccagacgaaactttaagaaggattggttctaaaaatgttcaggactacatacatcaattaggtttcattccaaaagtaccttttgtcaatttatacccaaatgccaattcacaagcattagacttattggagcaaatgctcgcgtttgaccctcaaaagagaattaccgtggatgaggccctggagcatccttacttgtctatatggcatgatccagctgacgaacctgtgtgtagtgaaaaattcgaatttagttttgaatcggttaatgatatggaggacttaaaacaaatggttatacaagaagtgcaagatttcaggctgtttgtgagacaaccgctattagaagagcaaaggcaattacaattacagcagcagcaacagcagcagcaacagcaacagcaacagcaacagcagccttcagatgtggataatggcaacgccgcagcgagtgaagaaaattatccaaaacagatggccacgtctaattctgttgcgccacaacaagaatcatttggtattcactcccaaaatttgccaaggcatgatgcagatttcccacctcgacctcaagagagtatgatggagatgagacctgccactggaaataccgcagatattccgcctcagaatgataacggcacgcttctagaccttgaaaaagagctggagtttggattagatagaaaatatttttaggacaaaaaactataagtaaccggggaagtatagaatcaccatagatgtaagcttacagacaatgtgtatatatgatgtatatgaacgtatacaaatatatatatatatacgtgctcttgttgtagctcgtatatcaaattcctcctccgacgcttatcttaatcgtactccgcggaagtttgttatcgcctcttgaattctttcttttcgttcatttatgattagtcatctatagacaatattcattatttaagcacctagaatactaaactaaatgtctaaatatgacacaaggaagataagataaaaaaaaccaagcgcttagaatatgactttaatggtaccttcaacagtgatgtattcactgagtnnn

SEQ ID NO: 140303 - protein, 484 aa, Saccharomyces cerevisiae
MADKIERHTFKVFNQDFSVDKRFQLIKEIGHGAYGIVCSARFAEAAEDTTVAIKKVTNVFSKTLLCKRSLRELKLLRHFRGHKNITCLYDMDIVFYPDGSINGLYLYEELMECDMHQIIKSGQPLTDAHYQSFTYQILCGLKYIHSADVLHRDLKPGNLLVNADCQLKICDFGLARGYSENPVENSQFLTEYVATRWYRAPEIMLSYQGYTKAIDVWSAGCILAEFLGGKPIFKGKDYVNQLNQILQVLGTPPDETLRRIGSKNVQDYIHQLGFIPKVPFVNLYPNANSQALDLLEQMLAFDPQKRITVDEALEHPYLSIWHDPADEPVCSEKFEFSFESVNDMEDLKQMVIQEVQDFRLFVRQPLLEEQRQLQLQQQQQQQQQQQQQQQQPSDVDNGNAAASEENYPKQMATSNSVAPQQESFGIHSQNLPRHDADFPPRPQESMMEMRPATGNTADIPPQNDNGTLLDLEKELEFGLDRKYF

SEQ ID NO: 140304 - DNA, 1269 bp, Schizosaccharomyces pombe
  CDS (1)..(1269)
atggaccgtcgacatcgtgtttaccgtgtgtttaaccaggagatgtatgtcgagcctaattttaaggtagtgaaggagttgggtcaaggcgcttacggcattgtttgtgcagcaagaaacgtggctagcaaagatcaagaggctgtagccataaaaaaaattacgaatgtgttttctaaatccattcttacaaaaagagctttgagagagataaaactgctgattcattttcgtaatcatcgtaacattacttgcatttacgatctcgacattataaatccatacaattttaatgaagtttacatttacgaagagttgatggaggccgatttgaatgctattattaaatccggtcagccattaacggatgcgcattttcaatcattcatttaccagatactttgtggtttaaagtatattcattctgccaacgttattcatcgtgacttaaagccaggtaatcttttagttaacgctgattgtgagctgaaaatttgcgattttggcctcgctcgcggatgttctgaaaatccagaagaaaatcctggttttatgacggagtatgtggcaacgcgctggtacagagctccggaaattatgctttcgttcagcagctatcataaaggtattgatgtttggagtgttggttgcattttggcagagctattaggtggaacccctttgtttaagggaaaagattttgttcatcagttaaatttaattttgcatcaacttggcacacctgatgaggaaaccctgtctcatataagcagttcccgtgcacaggagtatgttcgaagcttgccaaagcaaagacctattccttttgaaaccaattttcctaaagccaatcctttggctcttgacctgcttgctaagctcttggctttcgaccccaacagacgtatttcggttgacgatgctttagaacatccctatttagctgtttggcatgatccctctgacgaacctgtgtgtgattccgtctttgatttcagctttgaatacattgaggatgcaaatgagttacgccgtgtcattttagatgaagttttaaacttccgtcagaaagtccgacgccgctctcatccaacaaacccaacagtcaacatcccgcaaccagcccaaaccgttccatctaatgacaatggttctttcaatgttagtagctcttcatcctctcaaacctctaacaaaaagcgccatgatcattcttataatgaaactgctgctatagaccataagtctgatgataatcgccataactaa

SEQ ID NO: 140305 - protein, 422 aa, Schizosaccharomyces pombe
MDRRHRVYRVFNQEMYVEPNFKVVKELGQGAYGIVCAARNVASKDQEAVAIKKITNVFSKSILTKRALREIKLLIHFRNHRNITCIYDLDIINPYNFNEVYIYEELMEADLNAIIKSGQPLTDAHFQSFIYQILCGLKYIHSANVIHRDLKPGNLLVNADCELKICDFGLARGCSENPEENPGFMTEYVATRWYRAPEIMLSFSSYHKGIDVWSVGCILAELLGGTPLFKGKDFVHQLNLILHQLGTPDEETLSHISSSRAQEYVRSLPKQRPIPFETNFPKANPLALDLLAKLLAFDPNRRISVDDALEHPYLAVWHDPSDEPVCDSVFDFSFEYIEDANELRRVILDEVLNFRQKVRRRSHPTNPTVNIPQPAQTVPSNDNGSFNVSSSSSSQTSNKKRHDHSYNETAAIDHKSDDNRHN

SEQ ID NO: 140306 - DNA, 1050 bp, Schizosaccharomyces pombe
  CDS (1)..(1050)
atggcagaatttattcgtacacaaatattcggtacatgttttgaaattaccactagatatagcgacttacagccgattggcatgggcgcctttggcctcgtttgttcagcgaaggatcagctaactggaatgaatgtcgctgttaagaaaattatgaaaccctttagtactccggtactggcaaaacgtacctatcgggaattaaaactattaaagcatttaaggcatgagaatattattagcttgagcgatatttttatttctccctttgaagatatttattttgtcacggagcttctgggaacagatcttcatagactacttacatcgcgacctttagagacgcaatttatacaatacttcttataccaaatcttgcgagggctcaagtttgttcattctgccggtgttattcaccgtgatctgaaacccagtaacatcttaattaacgaaaattgcgatttaaaaatctgcgatttcggtttggctcgtattcaagaccctcaaatgacgggctatgtttctactcgttattaccgtgcacctgagattatgttaacttggcaaaagtacaacgtcgaagttgatatttggagtgcgggttgtatttttgctgagatgattgaaggaaaacccttgtttcccggccgagaccacgttaaccagttttctataatcacggaattgttgggaacgccgcctatggaagtaattgagacgatttgcagtaaaaacacacttcgctttgttcaatcattgcctcaaaaggagaaagttccttttgctgaaaagttcaaaaacgccgatccagatgctattgatctgttagaaaaaatgcttgtctttgatcctcgtaagcgtattagtgctgctgatgctttggctcataactatcttgctccataccatgatcctactgatgagcctgttgctgatgaagtttttgactggtcattccaagataatgatttacctgtggagacttggaaggtcatgatgtactccgaggttttgtcgtttcacaacatggataatgaactgcaatcctaa

SEQ ID NO: 140307 - protein, 349 aa, Schizosaccharomyces pombe
MAEFIRTQIFGTCFEITTRYSDLQPIGMGAFGLVCSAKDQLTGMNVAVKKIMKPFSTPVLAKRTYRELKLLKHLRHENIISLSDIFISPFEDIYFVTELLGTDLHRLLTSRPLETQFIQYFLYQILRGLKFVHSAGVIHRDLKPSNILINENCDLKICDFGLARIQDPQMTGYVSTRYYRAPEIMLTWQKYNVEVDIWSAGCIFAEMIEGKPLFPGRDHVNQFSIITELLGTPPMEVIETICSKNTLRFVQSLPQKEKVPFAEKFKNADPDAIDLLEKMLVFDPRKRISAADALAHNYLAPYHDPTDEPVADEVFDWSFQDNDLPVETWKVMMYSEVLSFHNMDNELQS

SEQ ID NO: 140308 - DNA, 1113 bp, Oryza sativa; identical to SEQ ID NO: 63059
  CDS (1)..(1113)

SEQ ID NO: 140309 - protein, 370 aa, Oryza sativa; identical to SEQ ID NO: 63060

SEQ ID NO: 140310 - DNA, 1266 bp, Oryza sativa
  CDS (1)..(1266)
atgcagaccagcaattttcgtaagaagaatgcagcagaggtggatttcttcatggggtatggtgatgttaatcgatacgaagttctggaggtcataggaaaaggaagttatggacttgtatgttctgcaaatgatatacatactggagaaaaggttgcaataaagaagatacacaacatttttgaacatatatcagatgctgcacgcatactccgtgaaatcaagcttctcaggctgcttaggcatcctgacatagtggaaataaagcatattatgctacccccatccaagatggatttcagggacatatatgttgtctttgagcttatggaatcagatcttcatcaggtcataaaggctaatgatgatttgacaagagagcactatcaatttttcctgtatcagatgctccgtgctttgaaatatatccatacagcaaatgtttatcacagagatctgaagccaaaaaacatacttgctaatgcaaattgcaaactcaaaatatgtgattttggcttggcaagagttgcattcactgatgctcccactacagtcttctggaccgattatgttgcaacgagatggtatagagcacctgaactgtgtggttcattttattccaagtacacaccagctattgatatatggagtatagggtgcatttttgctgaggtgttgattggaaagccactatttcctggtaaaaatgttgttcaccagttggatttgataactgatcttctgggaacaccctccttagatgctatttctcaggtgcggaatgacaaggcaagaaaatatctgacatgcatgcggaagaagcagcctgcatcattttcacataaatttctgaaggctgatccattagcattacaattgcttaggaagcttctagcttttgatccaaaggaccgtccatctgctcaagaggcactggcagatccgtacttcaatggattagcaaaggtagagcgagaaccatcttgtcagccaattccaaagatggaatttgaatttgagcgtcggagagcaacaaaggaggatatcaaggaacttatttttcaagaaatattggagtaccatcctcaattattgaaagaacacatcagtggaacagaaaggccaaattttcatcatttaagtgtggttgaccaattcagaaagcaatttactcaagttgaggaaaatctgaatggaagtggggctgctgtttcgctacagaggaaacattcttctttgccaaggcgagccttcaactatcgttag

SEQ ID NO: 140311 - protein, 421 aa, Oryza sativa
MQTSNFRKKNAAEVDFFMGYGDVNRYEVLEVIGKGSYGLVCSANDIHTGEKVAIKKIHNIFEHISDAARILREIKLLRLLRHPDIVEIKHIMLPPSKMDFRDIYVVFELMESDLHQVIKANDDLTREHYQFFLYQMLRALKYIHTANVYHRDLKPKNILANANCKLKICDFGLARVAFTDAPTTVFWTDYVATRWYRAPELCGSFYSKYTPAIDIWSIGCIFAEVLIGKPLFPGKNVVHQLDLITDLLGTPSLDAISQVRNDKARKYLTCMRKKQPASFSHKFLKADPLALQLLRKLLAFDPKDRPSAQEALADPYFNGLAKVEREPSCQPIPKMEFEFERRRATKEDIKELIFQEILEYHPQLLKEHISGTERPNFHHLSVVDQFRKQFTQVEENLNGSGAAVSLQRKHSSLPRRAFNYR

SEQ ID NO: 140312 - DNA, 1110 bp, Oryza sativa
  CDS (1)..(1110)
atggcgatgatggtggaccctcctaatggcatgggaaaccaagggaagcattactacacaatgtggcaaacgctatttgagattgacaccaagtatgtgccaatcaagcccatcggaagaggggcttatggaatagtttgctcctctataaaccgtgcaaccaacgaaaaagttgcaataaagaagatcaacaatgtctttgacaaccgtgtggatgcactgaggaccctaagggagctgaaactactgcgacacttgcgccatgaaaatgttattgccttgaaagatataatgatgccagtacacagaaggagtttcaaagatgtatacttggtttatgaactcatggacacagatctacaccagataattaaatcatctcaacctctttctaatgaccactgtcaatatttcctttttcagctactccgaggtctgaagtacctccattcagcagggatactccatcgagacctgaaaccagggaacctcctggttaatgcaaactgcgatctgaagatctgcgactttggtttggctcgcacaaacaacactaaaggccagtttatgactgaatatgtcgtgacccggtggtatagggctcctgagctgctgctctgctgcgacaattacggaacctccatagatgtctggtctgttggctgcatctttgctgagcttcttggccgcaagccaatatttccaggaactgagtgcctcaatcagctcaagctcatagtcaacgttctcggcaccatgagtgaagctgacattgagttcattgacaacccaaaggcccgcaagtatatcaagacccttccatacactcctggcatccccctcaccagtatgtacccgcaagcacatcctcttgccattgatctgttgcagaagatgctcgtctttgatccctccaaaaggattagtgtcactgaagctctggagcacccttacatgtctccactgtatgatccaagcgcaaaccctcctgctcaagtgcccatcgatctcgacatcgatgaaaatcttggcgtggatatgatccgggagatgatgtggcaggagatgctccactatcacccagaggttgttgcaggagtgaatatgtga

SEQ ID NO: 140313 - protein, 369 aa, Oryza sativa
MAMMVDPPNGMGNQGKHYYTMWQTLFEIDTKYVPIKPIGRGAYGIVCSSINRATNEKVAIKKINNVFDNRVDALRTLRELKLLRHLRHENVIALKDIMMPVHRRSFKDVYLVYELMDTDLHQIIKSSQPLSNDHCQYFLFQLLRGLKYLHSAGILHRDLKPGNLLVNANCDLKICDFGLARTNNTKGQFMTEYVVTRWYRAPELLLCCDNYGTSIDVWSVGCIFAELLGRKPIFPGTECLNQLKLIVNVLGTMSEADIEFIDNPKARKYIKTLPYTPGIPLTSMYPQAHPLAIDLLQKMLVFDPSKRISVTEALEHPYMSPLYDPSANPPAQVPIDLDIDENLGVDMIREMMWQEMLHYHPEVVAGVNM

SEQ ID NO: 140314 - DNA, 1185 bp, Oryza sativa
  CDS (1)..(1185)
atgcgcatggagggcggcggcggcggcggccatggccatcacggcggcggcggcggtggccatggccatcacggtggcatcggaggaggggaggcgcagatcaaggggacgctgacgcacggcgggaggtacgtgcagtacaacgtgtatggtaacctgttcgaggtttcgtccaagtacgtccctcccatccgccccgtcggccgcggcgcctgcggcatcatctgtgcggttgtgaatgcgcagactcgtcaggaggtggcaatcaagaagatcggcaacgcgttcgacaaccagatcgacgccaagcgcaccctgcgagagatcaagctgcttcggcacatggatcatgataatgtcatctcaataaaggacatcatacggccaccaaggagggagaacttcaatgatgtctacattgtctatgagctcatggacactgatcttcaccaccttcttcgatcaaaccagccactaacagatgatcactgtcagtattttctctatcaggtactacgaggattgaagtatgtgcattcagcaaatgtcttgcacagagacctcaggccaagtaatttgctgctgaatgcgaaatgcgatcttaagatcggagactttggattagcaaggaccacaaatgaaactgacttcatgatggagtatgttgttactcgatggtacagggcacctgaactcctgctaaactgctcagagtacactgcagctattgatatctggtcggtaggctgcatccttggtgagatcgttacaagggagcctttgtttcctggaaaggattatgtccatcagctgaggctaataactgagttaataggctcacctgatgactcgagccttgggtttcttcgaagcgacaacgcccgcagatatgtgaggtcgcttcctcaataccccaagcaacaattccgtgcacggttccccactatgtctagtggtgccatggatttgcttgagaggatgcttgtgtttgatcccagcaaaaggattactgttgatgaagctctgtgccatccatacttggcatcccttcatgagatatatgatgaaccagtctgcccagcgcctttcagcttcgatttcgagcagccgtcgctcaccgaagaagatatcaaggagatcatatggagggaggcacttaagttcaaccctgaaccaattcactag

SEQ ID NO: 140315 - protein, 394 aa, Oryza sativa
MRMEGGGGGGHGHHGGGGGGHGHHGGIGGGEAQIKGTLTHGGRYVQYNVYGNLFEVSSKYVPPIRPVGRGACGIICAVVNAQTRQEVAIKKIGNAFDNQIDAKRTLREIKLLRHMDHDNVISIKDIIRPPRRENFNDVYIVYELMDTDLHHLLRSNQPLTDDHCQYFLYQVLRGLKYVHSANVLHRDLRPSNLLLNAKCDLKIGDFGLARTTNETDFMMEYVVTRWYRAPELLLNCSEYTAAIDIWSVGCILGEIVTREPLFPGKDYVHQLRLITELIGSPDDSSLGFLRSDNARRYVRSLPQYPKQQFRARFPTMSSGAMDLLERMLVFDPSKRITVDEALCHPYLASLHEIYDEPVCPAPFSFDFEQPSLTEEDIKEIIWREALKFNPEPIH

SEQ ID NO: 140316 - DNA, 1131 bp, Oryza sativa
  CDS (1)..(1131)
atggattcctcctccggcggcgcgggcggcggcggcggcgcgcagatcaaggggatggggacgcacgggggccgctacgtgctgtacaacgtgtacgggaacttcttcgaggtctcctccaagtacgcccctcccatccgccccatcggccggggcgcctacggcattgtctgcgcggctgttaactcggagaacggcgaggaagttgccatcaagaagattggcaatgcattcgacaaccatatcgatgccaagcggacactgagagaaatcaagctgcttcgccacatggaccacgagaatattattgccataaaggacataattcgccccccaagaagagacaactttaatgatgtttacattgtttctgagttgatggatactgatctccatcagatcatacgctcaaatcaaccattgactgatgaccactgccagtacttcctgtaccagttgctacgagggctaaaatatgtgcactcggcaaatgtcttgcaccgtgatctgaagccaagcaatttgttccttaatgcaaattgtgatctcaagattgctgattttgggcttgcaagaaccactacggagactgacctcatgacagagtatgtggtcactcgttggtatcgagcaccagagctgctgttgaactgctcgcagtatactgctgctattgatgtctggtcagttggatgcatacttggtgaaattgtgactcgtcaacccctgtttcctggaagggattacattcagcaactaaaattgatcactgagctgatagggtcgccagatgactcaagcctagggtttcttcggagtgataatgcaagaagatacatgaaacagctaccacagtacccaaggcaggacttccgcttgcgcttccgcaacatgtctgctggtgcagtcgatctgttagagaaaatgctggtgtttgacccaagcagacggataactgttgatgaggctcttcatcacccatacttggcttctcttcatgacatcaatgaagaacccacctgcccagcacctttcagctttgattttgagcaaccatcctttactgaagaacatataaaagaactcatctggagggaatccttggcatttaatccggatcctccctactaa

SEQ ID NO: 140317 - protein, 376 aa, Oryza sativa
MDSSSGGAGGGGGAQIKGMGTHGGRYVLYNVYGNFFEVSSKYAPPIRPIGRGAYGIVCAAVNSENGEEVAIKKIGNAFDNHIDAKRTLREIKLLRHMDHENIIAIKDIIRPPRRDNFNDVYIVSELMDTDLHQIIRSNQPLTDDHCQYFLYQLLRGLKYVHSANVLHRDLKPSNLFLNANCDLKIADFGLARTTTETDLMTEYVVTRWYRAPELLLNCSQYTAAIDVWSVGCILGEIVTRQPLFPGRDYIQQLKLITELIGSPDDSSLGFLRSDNARRYMKQLPQYPRQDFRLRFRNMSAGAVDLLEKMLVFDPSRRITVDEALHHPYLASLHDINEEPTCPAPFSFDFEQPSFTEEHIKELIWRESLAFNPDPPY

SEQ ID NO: 140318 - DNA, 885 bp, Oryza sativa
  CDS (1)..(885)
atggagcagtacgagaaggaggagaagattggggagggcacgtacggggtggtgtacagggcgcgggacaaggtcaccaacgagacgatcgcgctcaagaagatccggcttgagcaggaggatgagggcgtcccctccaccgcaatccgcgagatctcgctcctcaaggagatgcatcacggcaacatcgtcaggttacacgatgttatccacagtgagaagcgcatatatcttgtctttgagtatctggatctggacctaaagaagttcatggactcttgtccagagtttgcgaaaaaccccactttaattaagtcatatctctatcagatactccgcggcgttgcttactgtcattctcatagagttcttcatcgagatttgaaacctcagaatttattgatagatcggcgtactaatgcactgaagcttgcagactttggtttagccagggcatttggaattcctgtccgcacgtttactcacgaggttgtaaccttgtggtatagagctccagagatccttcttggatcaaggcagtattctacaccagttgatatgtggtcagttggttgtatctttgcagaaatggtgaaccagaaaccactgttccctggtgattctgagattgatgaattatttaagatattcagggtactaggaactccaaatgaacaaagttggccaggagttagctcattacctgactacaagtctgctttccccaagtggcaagcacaggatcttgcaactattgtccctactcttgaccctgctggtttggaccttctctctaaaatgcttcggtacgagccaaacaaaaggatcacagctagacaggctcttgagcatgaatacttcaaggaccttgagatggtacaatga

SEQ ID NO: 140319 - protein, 294 aa, Oryza sativa; identical to SEQ ID NO: 63000

SEQ ID NO: 140320 - DNA, 1113 bp, Brassica napus
  CDS (1)..(1113)
atgaacaacgccggcggccaatatccagattttccggcggtgcagacgcacggaggacagttcataagctacgatatcttcggtagtttattcgaggtcacatccaagtaccgtcctccgattgttccaatcggtcggggcgcatacggcatcgtttgctctgtgttggattcggagacgaacgagcttgtggcgatgaagaagatagccaacgcctttgataatcacatggacgccaagcgtacacttcgcgagatcaagcttcttcgtcatctcgatcatgaaaacatcatagctataagagatgtggttcctccaccacttagaagagagttcagtgatgtttatatcgccactgagttaatggacactgatcttcatcaaatcatcagatccaaccagggcttgtctgaggaacactgtcagtacttcctgtaccagcttcttcgagggctcaagtacatccactcggctaaagttatccacagggatctaaagcctagcaatcttctcctgaacgccaactgcgatttaaagatctgtgattttggtcttgctagacccacttcagagaacgagtttatgactgagtatgttgttaccagatggtatagagcacctgagcttctgctcaactcatctgattacacagctgctatagatgtttggtctgttggttgtatctttatggagctcatgaacagaaagcctttgttccctggtaaagaccatgtccatcagatgcgcttattgacagagttgcttggcacgccgacagaatcagatctcgggtttacacacaacgaggatgccaaaagatacatccggcagcttcccaacttccctcgccaaccgttagctaaactgttctctcatgttaactcattggccattgatctagttgacagaatgttgacgtttgaccccaacaaaagaatcactgttgaagaagctctgaatcacccgtacctagccaagttgcacgacccgaatgatgagccaatctgtctaaagccattctctttcgactttgaacaacaacctctagacgaggaacagataaaagagatgatctacagggaagccattgcactcaatccaacatatgcttag

SEQ ID NO: 140321 - protein, 370 aa, Brassica napus
MNNAGGQYPDFPAVQTHGGQFISYDIFGSLFEVTSKYRPPIVPIGRGAYGIVCSVLDSETNELVAMKKIANAFDNHMDAKRTLREIKLLRHLDHENIIAIRDVVPPPLRREFSDVYIATELMDTDLHQIIRSNQGLSEEHCQYFLYQLLRGLKYIHSAKVIHRDLKPSNLLLNANCDLKICDFGLARPTSENEFMTEYVVTRWYRAPELLLNSSDYTAAIDVWSVGCIFMELMNRKPLFPGKDHVHQMRLLTELLGTPTESDLGFTHNEDAKRYIRQLPNFPRQPLAKLFSHVNSLAIDLVDRMLTFDPNKRITVEEALNHPYLAKLHDPNDEPICLKPFSFDFEQQPLDEEQIKEMIYREAIALNPTYA

SEQ ID NO: 140322 - DNA, 1821 bp, Brassica napus
  CDS (1)..(1821)
atgatgcagacagatcatcagcgtataaagaataatctggagatggagttcttctcagactacggcgacgccaccagattcaaaatccaagaaagaatcggaaaaggcagctacggagttgtttgctcggccattgacactctaacgggtgagaaagttgccataaagaaaatacacgatatcttcgagcatatttctgatgctgcgaggattctccgcgagataaagctgctcagactcctaaggcatcctgatatagttgagatcaagcacatcatgcttcctccttcgagaagagagttcaaagatatatacgttgtgtttgagctcatggagtctgatcttcatcaagtcattaaagccaatgatgatttgacaagagagcattaccagtttttcctttatcagttactgcgtgcactcaagtacattcacacagctaatgtttaccatcgagatctgaagccaaagaacatattggcaaatgcaaactgtaaacttaagatttgtgattttggattggcaagagttgcattcaatgatactcccacaacaatcatctggacagactatgttgcgacaagatggtatagagctccagagctttgtggatctttctactctaagtatacaccagcgattgacatctggagtataggctgcatttttgcagaagtattgatgggaaaaccacttttccctggaaagaatgtggttcaccagctggatcttatgactgatctgctaggaacaccttccctggacaccatctccagggtaaggaatgagaaggcaaggaggtacttaacaagcatgaggaaaaagccacccattccttttactcagaaatttccaaacgcagatcctttgtctctgaagctgcttgagaggcttcttgcttttgatcccaaagaccgtccaactgctcaagaggcacttgctgatccatatttcaagggattggcgaaagtggagagggagccttcatgtcaacccatcacgaagatggaatttgagttcgagagaagaaaagtcactaaagaggatatcagagagctaatatctagggagatacttgagtatcatcctcagctgctaaaagatcacatgaacggcgctgataaaactaactttctctatccaagtgctgttgatcagttcaggagacagtttgcacatcttgaagaaaacagcgggaaaactggccctgtagcacctctagaaaggaaacatgcctctcttcccagatctacagttatacactcaaccgcagttgcaagaggagggcaaccgaaacttatgaataacacaaacacattgaaccctgaaactactcaaagcattcctcttaatcaatacacaacatcacaagcacctcaaagaaacctctcaggtaccaaaccaagcacattcatgggcccggtggcgccttatgacaatggcagaaccagcagagaagcatatgacccgagatcattaatccgcagcactgctcttccctttccacaacagtctgctgcagcaaccatgggaaagcaacaagagaggagaacaacaaccatggagtctgagaagcaggcaagacagatatctcagtacaatagatactctccagacgtcgccatcaacatagataacaacccgtttatcttgtctcgaaccggattgcacaaggctgaaaacatgagtgaccggatcacaatcgatacaaatcttttacaggcgaccgctggaataggagttgcagcggcggctgctcctggtggttctgctcaccggaaagttggagctgttcggtacggcatgtcaaacatgtactaa

SEQ ID NO: 140323 - protein, 606 aa, Brassica napus
MMQTDHQRIKNNLEMEFFSDYGDATRFKIQERIGKGSYGVVCSAIDTLTGEKVAIKKIHDIFEHISDAARILREIKLLRLLRHPDIVEIKHIMLPPSRREFKDIYVVFELMESDLHQVIKANDDLTREHYQFFLYQLLRALKYIHTANVYHRDLKPKNILANANCKLKICDFGLARVAFNDTPTTIIWTDYVATRWYRAPELCGSFYSKYTPAIDIWSIGCIFAEVLMGKPLFPGKNVVHQLDLMTDLLGTPSLDTISRVRNEKARRYLTSMRKKPPIPFTQKFPNADPLSLKLLERLLAFDPKDRPTAQEALADPYFKGLAKVEREPSCQPITKMEFEFERRKVTKEDIRELISREILEYHPQLLKDHMNGADKTNFLYPSAVDQFRRQFAHLEENSGKTGPVAPLERKHASLPRSTVIHSTAVARGGQPKLMNNTNTLNPETTQSIPLNQYTTSQAPQRNLSGTKPSTFMGPVAPYDNGRTSREAYDPRSLIRSTALPFPQQSAAATMGKQQERRTTTMESEKQARQISQYNRYSPDVAINIDNNPFILSRTGLHKAENMSDRITIDTNLLQATAGIGVAAAAAPGGSAHRKVGAVRYGMSNMY

SEQ ID NO: 140324 - DNA, 1107 bp, Brassica napus; identical to SEQ ID NO: 63065
  CDS (1)..(1107)

SEQ ID NO: 140325 - protein, 368 aa, Brassica napus; identical to SEQ ID NO: 63066

SEQ ID NO: 140326 - DNA, 885 bp, Glycine max
  CDS (1)..(885)
atggaacagtacgagaaggtggagaagataggcgagggaacatacggcgtcgtttacaaggctcgcgaccgcgtcaccaatgagaccatcgctctcaagaagattcgcctcgagcaggaggacgaaggcgttcccagcaccgccattcgcgagatttctctcctcaaagagatgcagcataggaacattgttaggttgcaggatgtagtacacagtgagaagcgattgtatctggtttttgagtatctggacttggatctaaagaaacatatggattcatctccagagtttgtgaaagatccacggcaagtaaagatgttcctttatcaaattctctgtggcattgcttactgtcattcacatagagttcttcatcgagacttgaaaccacagaatttgttgatagatcgccgtactaattcactaaagcttgcagattttggattggctagggcatttggcattcctgtcaggacatttacacatgaggtggtgacattatggtacagagctccagaaatattgcttggatctcgtcattattctacgccagttgatgtttggtcagtgggatgtatatttgcagagatggtaaaccgacgacctctattccctggggactctgagattgatgaattatttaaaatattcagaatcttgggtaccccaaatgaagacacatggcctggtgtaacttcattgcctgattttaaatcaacatttcccaaatggccatccaaggacttggcaaatgtggttccaaatcttgatgcagctggtcttaatcttctttctagtatgctttgcttggatcccagcaaaagaatcaccgccaggagcgctgtggagcatgaatacttcaaagacattaaatttgttccctga

SEQ ID NO: 140327 - protein, 294 aa, Glycine max; identical to SEQ ID NO: 62742

SEQ ID NO: 140328 - DNA, 1110 bp, Triticum aestivum; identical to SEQ ID NO: 63067
  CDS (1)..(1110)

SEQ ID NO: 140329 - protein, 369 aa, Triticum aestivum; identical to SEQ ID NO: 63068

SEQ ID NO: 140330 - DNA, 1203 bp, Zea mays
  CDS (1)..(1203)
atggaggcgccgccgggaccggggcccatggagctggacgccccacctcccgccgccgccgcggcgattcctcccgccggcagcgacaagcacaaggtggacggggaagggggagacgctgtgacgggccatatcatctccaccaccatcggcgggaagaacggcgagcccaagcggaccatcagttacatggcagaacgtgtcgtgggcacaggctcatttgggatcgtcttccaggctaagtgtctggaaacaggagagaccttcgccatcaagaaggtgctgcaagatcggcgttacaagaaccgggagctgcaacttatgcgtgccatggagcaccccaacgtcatctgcctgaagcactgcttcttctcgacaacgagcagggacgaattgtttttaaaccttgtcatggaattcgtccctgagactctataccgagtcctgaagcactacagcaatgcgaaccagaggatgcctcttatctacgtcaagctctacatgtatcagctttttagaggcctagcttatattcataatgtaccaggagtctgccatagggatgtgaagccacaaaacgttttggttgatcctctcacccaccaggtcaagctctgtgactttggtagtgcaaaagttctgattcctggtgaaccgaacatatcgtacatatgctctcgttactatcgtgcccctgagctcatatttggtgcgacggagtatacaagttcaatagacatatggtcagctggttgtgttctagctgagttgcttcttggacagccactatttccaggagagagcgctgttgatcagttggtagagatcatcaaggttcttggtactccaacccgtgaggagatacggtgcatgaatcccaactatactgagttcaggtttcctcagataaaggctcatccatggcacaagattttccacaagagaatgcctcctgaagccatagaccttgcttcccgtctccttcagtattcaccaagtcttcgttgctctgctcttgacgcatgtgctcatcccttcttcgatgagctgcggacaccgaatgcacgcctaccaaacggccgcccgttccctccgctctttaacttcaagcacgaactagcaaatgcctctccggacctcgtcagcaggcttgtgccggagcacattagacggcagatcggtgtcaacttcgggagcagctag

SEQ ID NO: 140331 - protein, 400 aa, Zea mays
MEAPPGPGPMELDAPPPAAAAAIPPAGSDKHKVDGEGGDAVTGHIISTTIGGKNGEPKRTISYMAERVVGTGSFGIVFQAKCLETGETFAIKKVLQDRRYKNRELQLMRAMEHPNVICLKHCFFSTTSRDELFLNLVMEFVPETLYRVLKHYSNANQRMPLIYVKLYMYQLFRGLAYIHNVPGVCHRDVKPQNVLVDPLTHQVKLCDFGSAKVLIPGEPNISYICSRYYRAPELIFGATEYTSSIDIWSAGCVLAELLLGQPLFPGESAVDQLVEIIKVLGTPTREEIRCMNPNYTEFRFPQIKAHPWHKIFHKRMPPEAIDLASRLLQYSPSLRCSALDACAHPFFDELRTPNARLPNGRPFPPLFNFKHELANASPDLVSRLVPEHIRRQIGVNFGSS

SEQ ID NO: 140332 - DNA, 1848 bp, Glycine max
  CDS (1)..(1848)
atgcagcaagatcacaggaaaaagagttcagcagagatggactttttctctgaatatggtgatgccaaccggtacaaaatccaagaagtcattgggaagggaagttatggtgttgtctgttcagccattgacactcacaccagtgacaaagtggcaattaagaagattcatgacatcttcgagcatatatccgatgctgctcgtattctccgtgagataaagctgcttagacttctacgacatcctgatattgttgaaataaaacacattatgctgcctccgtcaaggaaggactttaaagatatttacgttgtttttgagctcatggagtctgatcttcatcaagtcattaaagccaatgatgacttgacaaaagaacactatcaattttttctttatcaattacttcgagcactgaagtacattcacaccgcaaatgtctatcatcgagatctgaagccaaagaatatactggcaaatgcaaactgtaagcttaaaatctgtgattttgggttagctagagttgcctttagtgacacaccaacaactatattttggacggattatgttgctacaaggtggtatagagctccagagctatgtggatcattttactcaaagtatacaccagcaattgatatatggagtataggttgcatctttgctgaagtactaacaggaaagccactttttcctgggaaaaatgtagttcatcaattggatctgatgacagatctgcttgggactccttcacttgatactatatcacgggtacgtaacgagaaggcaaggagatacctaactagcatgcggaaaaagcagcctgtgccattcgctcaaaaatttcccaatgcagatcctttagcactaaggctactggaaaagttgttggcttttgatccaaaagaccgacctactgctgaagaggctttggctgatccttacttcaagggactggcaaaagttgagagggaaccatcttgccagcctatcacgaaaatggaatttgaatttgaaaggcgaagagttacaaaggaagaaattcgtgagctgattttccgtgagattctagagtatcaccctcaactattgaaggactacatgaatggaacagagagaactaattttctttatccaagtgctgttgatcaattcagaaagcagtttgctcatttagaggaaaatggtaaaaatggtcctgttatgccacttgacagaaagcatgtttctctgccaaggtctacaattgtacattcaaatacggtacactcaaaagagcaaacaaataatgctgccagcaaaaaccggccaacagttgaggaatataacaagaacccaagagatacagaaattccagtgccaaggtcaatgcagggaccacaaagaattccactagcaaaacctggtaaagttgttgggcccgtagttccatacgagcatggtaacattgtcaaggattcatatgatcctaggtcattcatcagaggttctgtgcttcctacacaagctgttcccccggcatattactatcaaagatccagcactggaaaccaagaaaggccagcgacagaagccaacaagagtgtgcctttgcaggcaaaacatgcacagcaacaatgcggagttaatgccaagatggcaccagacatagctattaatattgatacaaatcccttttttatgacaagggcaggagttaacaagttagagcaaggtgatcaaatagccatagagacaaacatgctgcagccaaaggcacatcaatatggtggaatcggtgctgcagctggggccactgctcatagaaaagttggtcctgttcagtatggtatgacaagaatgttctag

SEQ ID NO: 140333 - protein, 615 aa, Glycine max
MQQDHRKKSSAEMDFFSEYGDANRYKIQEVIGKGSYGVVCSAIDTHTSDKVAIKKIHDIFEHISDAARILREIKLLRLLRHPDIVEIKHIMLPPSRKDFKDIYVVFELMESDLHQVIKANDDLTKEHYQFFLYQLLRALKYIHTANVYHRDLKPKNILANANCKLKICDFGLARVAFSDTPTTIFWTDYVATRWYRAPELCGSFYSKYTPAIDIWSIGCIFAEVLTGKPLFPGKNVVHQLDLMTDLLGTPSLDTISRVRNEKARRYLTSMRKKQPVPFAQKFPNADPLALRLLEKLLAFDPKDRPTAEEALADPYFKGLAKVEREPSCQPITKMEFEFERRRVTKEEIRELIFREILEYHPQLLKDYMNGTERTNFLYPSAVDQFRKQFAHLEENGKNGPVMPLDRKHVSLPRSTIVHSNTVHSKEQTNNAASKNRPTVEEYNKNPRDTEIPVPRSMQGPQRIPLAKPGKVVGPVVPYEHGNIVKDSYDPRSFIRGSVLPTQAVPPAYYYQRSSTGNQERPATEANKSVPLQAKHAQQQCGVNAKMAPDIAINIDTNPFFMTRAGVNKLEQGDQIAIETNMLQPKAHQYGGIGAAAGATAHRKVGPVQYGMTRMF

SEQ ID NO: 140334 - DNA, 1122 bp, Glycine max
  CDS (1)..(1122)
atgtctgctgttgagtcagctgaacacaacaacatcagaggagtaccaactcatggtggacgctatgttcagtacaatatctatggcaatctcttcgaagtttccagaaagtatgtccctcctattcgccctgtcggtagaggtgcttatggtattgtttgcgctgctgtaaatgcagagacaggcgaggaagttgccattaagaagattggcaatgcattcgacaacagaatagatgccaaaaggaccttacgggaaattaaacttcttcggcacatggatcatgcaaatattatgtccattaaagatattatacgtcctccacagaaggaaaacttcaatgatgtgtaccttgtttctgagttaatggacacagatctgcatcaaataattcgttccaatcagcaattgactgatgatcattgtcggtattttctgtatcaattgttacgagggctcaaatatgtacattcagcaaatgttttgcaccgagatctaaagcctagtaatttgctattgaatgccaattgtgaccttaagattgcggactttggtcttgctagaaccacatctgaaactgactttatgactgagtatgtggtcactagatggtaccgagctcccgaattgcttcttaattgttcagaatatacagcagccattgatatatggtctgttggttgcatacttggtgaaatcataacaagacaaccgctctttcctggcaaagattatgttcatcagctgagacttatcacagagctgataggttcgccagatgatgccagccttggatttctacgaagtgataatgctcgtagatacgtaaaacagcttccgcagtatccaaaacaaaacttttctgctagatttcccaccatgtctcctggtgcggttgacttgctagagaagatgctcatctttgatccaaacaggcgtattacagttgacgaggcgttgagccacccatacatgtcacctctccatgacatcaatgaggaacctgtttgcaccagacctttcagttttgactttgagcaaccatcattcactgaagaagacatcaaggaactcatctggagagaatctgtgaagttcaatcctgttccaccagtctactga

SEQ ID NO: 140335 - protein, 373 aa, Glycine max
MSAVESAEHNNIRGVPTHGGRYVQYNIYGNLFEVSRKYVPPIRPVGRGAYGIVCAAVNAETGEEVAIKKIGNAFDNRIDAKRTLREIKLLRHMDHANIMSIKDIIRPPQKENFNDVYLVSELMDTDLHQIIRSNQQLTDDHCRYFLYQLLRGLKYVHSANVLHRDLKPSNLLLNANCDLKIADFGLARTTSETDFMTEYVVTRWYRAPELLLNCSEYTAAIDIWSVGCILGEIITRQPLFPGKDYVHQLRLITELIGSPDDASLGFLRSDNARRYVKQLPQYPKQNFSARFPTMSPGAVDLLEKMLIFDPNRRITVDEALSHPYMSPLHDINEEPVCTRPFSFDFEQPSFTEEDIKELIWRESVKFNPVPPVY

SEQ ID NO: 140336 - DNA, 1371 bp, Glycine max
  CDS (1)..(1371)
atggagaggtacaagttaattaaggaagtaggtgatggaacatttgggagtgtttggagagccattaataagcaaagtggtgaagttgttgcaatcaagaaaatgaaaaagaaatattactcttgggaggagtgtgtaaacctgagagaagtcaagtcattacggaaaatgaatcatgcaaatattgtgaagctgaaggaagttatacgagaatgtgacactctgtgccttgtttttgagtacatggaatacaacctgtaccaacttatgaaaaacagggaaaagctgttttctgaaaatgaagttagaaattggtgttttcaagttttccaaggtttagcttacatgcaccagcgtggatactttcatcgtgatcttaagcctgaaaacttgctggtcaccaaagatgtcatcaagattgctgattttggcctagccagagagatcagttcactaccaccctatactgagtatgtctccacacggtggtatcgtgctcctgaagtcctgcttcagtcccatctatatagctctaaagttgatatgtgggcaatgggtgctataatggctgagttgttcactctccgtcctctattccccggttccagtgaagcagatgagatttacaaaatatgcagtgtgctaggtagtccaaccactgaatcttgggcagatggactcaaacttgccagggatatcaactatcagtttccacagcttgctggtgtacatctctctacactgatcccatccagaagcgatgatgcaatcagccttgtgacgtcactttgttcatgggatccctgcaagagaccaactgcagcagaggttcttcaacatcctttttttcagagttgcttttacatccctccatcccttcgcaccagagctgtaaccagaactccaccatctgctgggaccaggggatcactggatcggctgggcctcaagagatactctggtgctttgcctaatacaaaaatcaccaacaattttacttccccaaaagtacaagcttctatagcttcaggtgtgcaaaggaagctggatatggcaaatgaggatggaattaagagcaagaaatcattgaagactactcaacaatcaaaatatcgattaccagcaaaaggcagcccaagttatgtttgtttggcagcttctataaacaaggggaggactgcacgtggggtttcagaaacagctgagaagttggtcaatatgtcaatcggtactcgaagactgtccttgggacaaacccgtccgcctcccatgaaggctggagtcaattggatttctgaatctggaaacttgctcaggtccggacaacaaattccaactgaaagaactttgacaagaaaagttgccgggtga

SEQ ID NO: 140337 - protein, 456 aa, Glycine max
MERYKLIKEVGDGTFGSVWRAINKQSGEVVAIKKMKKKYYSWEECVNLREVKSLRKMNHANIVKLKEVIRECDTLCLVFEYMEYNLYQLMKNREKLFSENEVRNWCFQVFQGLAYMHQRGYFHRDLKPENLLVTKDVIKIADFGLAREISSLPPYTEYVSTRWYRAPEVLLQSHLYSSKVDMWAMGAIMAELFTLRPLFPGSSEADEIYKICSVLGSPTTESWADGLKLARDINYQFPQLAGVHLSTLIPSRSDDAISLVTSLCSWDPCKRPTAAEVLQHPFFQSCFYIPPSLRTRAVTRTPPSAGTRGSLDRLGLKRYSGALPNTKITNNFTSPKVQASIASGVQRKLDMANEDGIKSKKSLKTTQQSKYRLPAKGSPSYVCLAASINKGRTARGVSETAEKLVNMSIGTRRLSLGQTRPPPMKAGVNWISESGNLLRSGQQIPTERTLTRKVAG

SEQ ID NO: 140338 - DNA, 1395 bp, Glycine max
  CDS (1)..(1395)
atgggggacggaagtgggagccggtggagcagggcggagtgggtgcagcagtacgatctcttaggaaaaatcggcgaaggcacttacggcctcgtcttcctcgcccgaaccaaatcccccgttggcactccctccaaatccattgccataaaaaagttcaagcaatccaaggacggcgacggcgtctcccccaccgccatccgcgaaatcatgttgctgagggagattacgcacgagaacgtcgtcaagctcgtcaacgtacacatcaaccacgccgacatgtctctctacctcgccttcgattacgccgagcacgatctctatgaaattattaggcatcacagggacaaactcaaccattccattaatcagtacactgttaagtctttgctctggcagttgctcaatggactaagctatctgcacagtaattggatgatacatcgtgatttgaagccatcgaatatattggttatgggtgaaggagaggaacatggagttgttaagattgctgactttggacttgcgaggatatatcaagctcctctgaagccgttatctgacaatggggttgttgtaaccatttggtatcgtgcacctgagttgcttcttggagcaaaacattataccagtgctgttgatatgtgggctatgggatgcatttttgctgagttgttgaccttgaagccactatttcaaggggcagaagtcaaagctacatcaaatccctttcagcttgaccaacttgacaagatatttaaggttttaggccatcccacattagaaaagtggccttccttagcaagtcttccacattggcaacaagatgtgcaacatatacaaggacacaaatatgacaatgccggcctctataatgttgtacacctgtctccaaaaagccctgcatatgacctcttgtcaaagatgcttgaatatgatcctcgtaagcgtttaacagcagcacaagctttggagcatgagtatttcaaaattgaaccattacctggacgaaatgcacttgtaccctgccaacttggagagaaaattgtaaattatcccactcgtccagtggacactacaactgatcttgaagggacaaccaatctgccaccttcacaaacggtaaatgcagtttctggtagcatgcctggtcctcatgggtcaaatagatctgtgcctcggccaatgaatgttgttggaatgcaaagactgccccctcaagcaatggcagcttataatctctcatctcaggcagccatgggagatggaatgaatcctggggatatctcaaagcatcgaggtgttccacaggcccatcagccacaacagttgagaaggaaggagcaaatggggatgccgggataccctgcacaacagaagtcaagacgattataa

SEQ ID NO: 140339 - protein, 464 aa, Glycine max
MGDGSGSRWSRAEWVQQYDLLGKIGEGTYGLVFLARTKSPVGTPSKSIAIKKFKQSKDGDGVSPTAIREIMLLREITHENVVKLVNVHINHADMSLYLAFDYAEHDLYEIIRHHRDKLNHSINQYTVKSLLWQLLNGLSYLHSNWMIHRDLKPSNILVMGEGEEHGVVKIADFGLARIYQAPLKPLSDNGVVVTIWYRAPELLLGAKHYTSAVDMWAMGCIFAELLTLKPLFQGAEVKATSNPFQLDQLDKIFKVLGHPTLEKWPSLASLPHWQQDVQHIQGHKYDNAGLYNVVHLSPKSPAYDLLSKMLEYDPRKRLTAAQALEHEYFKIEPLPGRNALVPCQLGEKIVNYPTRPVDTTTDLEGTTNLPPSQTVNAVSGSMPGPHGSNRSVPRPMNVVGMQRLPPQAMAAYNLSSQAAMGDGMNPGDISKHRGVPQAHQPQQLRRKEQMGMPGYPAQQKSRRL

SEQ ID NO: 140340 - DNA, 1227 bp, Triticum aestivum
  CDS (1)..(1227)
atgacctcatttggtgtcgcaccggcatctgggctgagagatgctggtggtagtagtgaagtggataaattgccggatgaaattagtaatatgagaataagtgacgaaaaggaagtagaggcaacaatcatcaatgggaatggaacagaagctggtcatattatagtcacaactataggaggcagagatggccaaaggaagcagacaataagttacatggctgaacgtgtcattggtcaaggatcatttggtgttgtgttccaggcaaaatgtttggagacaagtgagacagtagctatcaagaaggtccttcaggataagagatacaagaaccgtgagttgcaaatgatgcgtctacttgaccatccaaatgtcgtatctctgaaacactgcttcttctcaaccactgaaaaggacgaactctttctgaatcttgtgcttgagtatgttcctgagacagttcaccgtgtcatcagacactacaacaagatgaaccagcgcatgccactgatatatgtgaagctatatacttatcagatttgtagggcactggcctatatccatcgcaccgttggtgtttgccacagggacataaaaccacagaatcttctggttaacccacacactcatcagctgaagatctgtgattttggaagtgcaaaagttctggtgaagggcgaacccaatatatcatacatctgctctaggtactatagggcaccagagcttatttttggtgctactgagtacacaacagcaattgacatctggtctgctggatgtgttcttgctgaacttctgacaggacagcctttgtttcctggtgaaagtggagttgatcaacttgttgaaattatcaagattctgggcactcctacaagggaagaaatcaaatgtatgaacccgaactacacggaatttaagtttccccaaatcaaggcccatccatggcataaggtgttccacagacgaatgccgcctgaagcagtggacctggtctccaggcttcttcagtactcaccgcaccttcggtcctcagctctggacgctctgatccatccgttcttcgacgagctccgggacccaaacacccgcctccccaacggccggttcctacctcccctcttcaacttcaagcctcacgagctgaaggggcttccgatggagatcgcggcgaagctggtccccgagcacgcgaggagccagtgccccttcctagggctgtag

SEQ ID NO: 140341 - protein, 408 aa, Triticum aestivum
MTSFGVAPASGLRDAGGSSEVDKLPDEISNMRISDEKEVEATIINGNGTEAGHIIVTTIGGRDGQRKQTISYMAERVIGQGSFGVVFQAKCLETSETVAIKKVLQDKRYKNRELQMMRLLDHPNVVSLKHCFFSTTEKDELFLNLVLEYVPETVHRVIRHYNKMNQRMPLIYVKLYTYQICRALAYIHRTVGVCHRDIKPQNLLVNPHTHQLKICDFGSAKVLVKGEPNISYICSRYYRAPELIFGATEYTTAIDIWSAGCVLAELLTGQPLFPGESGVDQLVEIIKILGTPTREEIKCMNPNYTEFKFPQIKAHPWHKVFHRRMPPEAVDLVSRLLQYSPHLRSSALDALIHPFFDELRDPNTRLPNGRFLPPLFNFKPHELKGLPMEIAAKLVPEHARSQCPFLGL

SEQ ID NO: 140342 - DNA, 1842 bp, Triticum aestivum
  CDS (1)..(1842)
atgcagcaggatcagcgcaagaagagttccgcagaggcagagttttttacggagtacggcgacgcaagtcgatacaagattcaggaaatcgttggaaagggcagctacggtgtcgtgtgctccgcaatagatgtccacaccggagagaaagtggcgataaaaaagatacatgatatctttgagcacatatctgatgctgcacggattctccgtgagatcaagcttctgaggctcttaagacatcctgacattgttgagatcaagcatattatgttacctccatcgagacgagacttcaaagatatttatgtcgtttttgagctcatggagtctgatctccaccaggttataaaggctaatgatgacttgacaaaggagcattaccaattctttctttaccaattactccgggctctgaagtacattcacactgctaatgtttatcaccgggacctaaagccaaagaatatattggcaaattccaactgcaaactgaagatttgtgattttggattggcacgagttgcattcaacgatacccctacaacaatcttttggacggattatgttgcgacaagatggtatagagctccagagctctgtggttccttcttttcaaagtatacacccgccattgatgtctggagcatcgggtgcatctttgctgaggtcttgacaggaaaacctttgtttcctggtaaaaatgttgtacatcagttagatttgatgactgatcttttgggcacaccatctatggatacaatctctcgggtccggaatgagaaagcaaggaggtatctgagcagcatgagaaagaaagagctgatttcattttcgcataaatttcccaatgcagatcctttggccttagacctgttgcaaaggcttttagcgtttgatccaaaggaccgcccaactgctgaagaggcattgtctcatccgtactttaaagggcttgccaaggttgagagagaaccatcctgccaaccaatcacaaaaatggagtttgagtttgagcgtagaagagtgacaaaagaagacataagggagcttatatttcgtgagatattggaataccatccacaattgctcaaagactacaccaatggcactgaaaggacaacctttctatacccaagtgctgttgatcaatttaggaagcagtttgctcatcttgaagaaaatagtgagaatggccctgtagttccaatggatagaaagcacacctctcttcctaggtctactattgttcactcagctccaattcatggaaaggaacaaccccgtattggcccatcaagggataagccttcgcctgacgagtcttataaaaatcatcgagattcagaaaaatattctggcaatgtccagagaacctcacaggctccacaaagagtgccaacagcaagaccaggaagggttgttggtccagttctgccttacgaaaatggtggcatgaaggatacatatgacccacgaagagtggcagcaatgagctcaggttatcctccccaacagcaaatcccgcaaatatacggttattatcagacaccggcaaagtcagcttgctctgagccatcgcaggccgaaatgtatacgctgcaccagcaggcctatgcttgcgcaaacagttcaactgtgcctgatgttgctctggacatgagagcacctccgttccatcaatcagcagggccgaaaaggggttcttctgataggctatcagcggaatcaaacctatactcgagatcccttaatggcatggctccaactacaacaggagtggcggcaagtgctcacaggaaggtcggcgttgttccctacggtatgtcgcagatgtattag

SEQ ID NO: 140343 - protein, 613 aa, Triticum aestivum
MQQDQRKKSSAEAEFFTEYGDASRYKIQEIVGKGSYGVVCSAIDVHTGEKVAIKKIHDIFEHISDAARILREIKLLRLLRHPDIVEIKHIMLPPSRRDFKDIYVVFELMESDLHQVIKANDDLTKEHYQFFLYQLLRALKYIHTANVYHRDLKPKNILANSNCKLKICDFGLARVAFNDTPTTIFWTDYVATRWYRAPELCGSFFSKYTPAIDVWSIGCIFAEVLTGKPLFPGKNVVHQLDLMTDLLGTPSMDTISRVRNEKARRYLSSMRKKELISFSHKFPNADPLALDLLQRLLAFDPKDRPTAEEALSHPYFKGLAKVEREPSCQPITKMEFEFERRRVTKEDIRELIFREILEYHPQLLKDYTNGTERTTFLYPSAVDQFRKQFAHLEENSENGPVVPMDRKHTSLPRSTIVHSAPIHGKEQPRIGPSRDKPSPDESYKNHRDSEKYSGNVQRTSQAPQRVPTARPGRVVGPVLPYENGGMKDTYDPRRVAAMSSGYPPQQQIPQIYGYYQTPAKSACSEPSQAEMYTLHQQAYACANSSTVPDVALDMRAPPFHQSAGPKRGSSDRLSAESNLYSRSLNGMAPTTTGVAASAHRKVGVVPYGMSQMY

SEQ ID NO: 140344 - DNA, 1146 bp, Linum usitatissimum
  CDS (1)..(1146)
atggtctccaccggaaatacagactccagcagctccatttctgctcccaaggctcccaacatcaagggtgtttcgacccacgccggccgctatgtgcaatacaatctctacggcaactattttgaagtccccagcaagtacgttcctcccattcgccccatcggccgtggcgcttatggcatcgtctgtgctgcggtgaattcagacacgcacgaggaagtggctatcaagaagattggaaatgcatttgacaacaaaattgacgcgaaaaggacattaagagagattaagcttctacgccatatggaccatgaaaatgttattgctatcagggacattatccgaccaccaaagaaggaggcattcaatgatgtgtatatagtgtacgaattgatggatactgaccttcatcagatcattcgttccgaccaatcgttgacggatgatcattgccagtacttcttgtatcaattgctacgtggattgaagtatgtgcactcagccaatgtactgcatcgagatcttaaacccagcaatctgcttctgaatgcaaactgtgaccttaaaattggagattttgggctagcaagaacaacgtccgagacagattttatgacagagtatgttgtcactcgttggtaccgagcaccagaattgctcctaaattgttcagagtacactgctgctatcgatatttggtctgttggttgcattcttgctgaaattgtgacaggagaacccctatttcctggaactgattatgttcatcaacttaaacttattaccgagttaataggcacaccggatgatgctagccttggtttcctaagaagtgacaacgcgagaagatacgttagaatgcttccacagttcagaaaacaaaacttctctatgaggttcctaaacacgtctccagccgctgttgatctgctggaaaagatgcttgtatttgatcccaccaaacgcattacagttgatgatgctcttagccatccatacttgtcagcccttcacataattaacgaagaacccatctgctccgcacctttccacttcgatttcgagcaaccatcatgcaccgaagagcatatcaaggagctcatctggaaggaggcagtgaatttcaatccagatcaccaacagtag

SEQ ID NO: 140345 - protein, 381 aa, Linum usitatissimum
MVSTGNTDSSSSISAPKAPNIKGVSTHAGRYVQYNLYGNYFEVPSKYVPPIRPIGRGAYGIVCAAVNSDTHEEVAIKKIGNAFDNKIDAKRTLREIKLLRHMDHENVIAIRDIIRPPKKEAFNDVYIVYELMDTDLHQIIRSDQSLTDDHCQYFLYQLLRGLKYVHSANVLHRDLKPSNLLLNANCDLKIGDFGLARTTSETDFMTEYVVTRWYRAPELLLNCSEYTAAIDIWSVGCILAEIVTGEPLFPGTDYVHQLKLITELIGTPDDASLGFLRSDNARRYVRMLPQFRKQNFSMRFLNTSPAAVDLLEKMLVFDPTKRITVDDALSHPYLSALHIINEEPICSAPFHFDFEQPSCTEEHIKELIWKEAVNFNPDHQQ

SEQ ID NO: 140346 - DNA, 1134 bp, Linum usitatissimum
  CDS (1)..(1134)
atggcaggaggatatgcccacagcaatggaaccggcggtcagtaccctgatttccctgccattcctattcacggcggtcaatttgttcagtataacatattcgggaatcagtttgagatcaccccaaagtataggcctccgattatgcccatcggccgcggcgcttacggcatcgtctgctcggtattgaactcggagacgaacgagatggtggcgatgaagaagatagccaatgcttttgacaaccacatggacgccaaacgcactctccgtgagattaagcttctccgccacctcgatcacgagaacgtgattggaatcagagatgtggttcctccgccgttgaggagagagtttacagatgtctacatcgcaactgagctaatggacacagatctacaccagatcatccgttccaatcagggtttatcggaggagcactgtcagtatttcatgtaccagctacttcgaggattgaagtacatacactctgctcatgtaatccacagggacttgaagcccagcaatcttctgttgaatgcaaattgtgacttgaagatctgtgattttggtctagctaggcctgcatcggagaatgagttcatgacagaatatgttgttacaagatggtacagggcgcctgagcttctgctcaactctcaggattacactgcagctattgatgtgtggtctgttggctgtatctttatggagctcatgaatcgtaagccattgtttccaggcaaagaccaagtccaccagatgaggttgttgacagagcttcttggaacaccaagtgaatcggatctagggtttgtaaggaatgaggacgctagaaaatatatcaggcagctcagtccacatcctcgacagtcattagccaaacttttccctcatgttcatcccctggccattgatcttgtggataaaatgatgacatttgatcccacaaaaagaataactgttgaggaagcattagcgcacccttatctggaacggttacatgacatagcagatgaaccagtttgtcaagagtcattctcttttgattttgagcaacaagtattgagtgaagaacagatgaaagagatgatatacagggaggcattgtcattcaatccagagtatgcataa

SEQ ID NO: 140347 - protein, 377 aa, Linum usitatissimum
MAGGYAHSNGTGGQYPDFPAIPIHGGQFVQYNIFGNQFEITPKYRPPIMPIGRGAYGIVCSVLNSETNEMVAMKKIANAFDNHMDAKRTLREIKLLRHLDHENVIGIRDVVPPPLRREFTDVYIATELMDTDLHQIIRSNQGLSEEHCQYFMYQLLRGLKYIHSAHVIHRDLKPSNLLLNANCDLKICDFGLARPASENEFMTEYVVTRWYRAPELLLNSQDYTAAIDVWSVGCIFMELMNRKPLFPGKDQVHQMRLLTELLGTPSESDLGFVRNEDARKYIRQLSPHPRQSLAKLFPHVHPLAIDLVDKMMTFDPTKRITVEEALAHPYLERLHDIADEPVCQESFSFDFEQQVLSEEQMKEMIYREALSFNPEYA

SEQ ID NO: 140348 - DNA, 885 bp, Linum usitatissimum; identical to SEQ ID NO: 63069
  CDS (1)..(885)

SEQ ID NO: 140349 - protein, 294 aa, Linum usitatissimum; identical to SEQ ID NO: 63070

SEQ ID NO: 140350 - DNA, 1215 bp, Zea mays
  CDS (1)..(1215)
atgagcggaggaggcgtggacggagctccggtcgccgagttccggcagacggtgacgcacggcggccggttcctgcagtacaacatcttcggcaacctgttcgagatcacgcacaagtaccagccccccatcatgcccatcggccgcggcgcctacgggatcgtctgctcggtgatgaactccgagacgaaggagatggtggccatcaagaagatcgccaacgccttcgacaaccacatggacgccaagcgcacgctccgggagatcaagctgctgaggcacctcgaccacgagaacatcatcggcatcagggacgtgatcccgccgcccgtcccgcaggcgttcaacgacgtgtacatcgggacggagctgatggacacggacctgcaccacatcatccggtccaaccaggagctctcggaggagcactcccagtacttcatgtaccagatcctccgcgggctcaagtacatccactccgccaacgtgatccaccgcgacctcaagcccagcaacctgctggtgaacgccaactgcgacctcaagatctgcgacttcgggctggcgcgcccgtcctccgagagcgacatgatgacggagtacgtggtcacgcgctggtaccgcgcgcccgagctgctgctcaactccaccgactactcggcggccatcgacgtctggtccgtcggctgcatcttcatggagctcatcaaccgccagccgctcttccccggacgcgaccacatgcaccagatgcgcctcataaccgaggcacgagcacgacgcacgcaccacatccttcctataattcaattccttcttcttctgctgctgctgatgaacatcgccggcacgcggcaggtgatcaggacgcccacggacgatgagctcgggttcatccggaacgaggacgcgcggaagtacatgcgccacctcccgcagttcccgcgccggccgttcgtcagcctgttcccgcggatgcagcccgtcgcgctggacctcatcgagcggatgctcaccttcaacccgctgcagaggatcacagtggaagaggcgctggagcacccgtacctggaacggctacacgacgtcgccgacgagcccatctgcacggacccgttctcgttcgacttcgagcagcaggctctgacggaagaccaaatgaagcagctgatattcaacgaggccatcgaactcaaccccaacttccgatactag

SEQ ID NO: 140351 - protein, 404 aa, Zea mays
MSGGGVDGAPVAEFRQTVTHGGRFLQYNIFGNLFEITHKYQPPIMPIGRGAYGIVCSVMNSETKEMVAIKKIANAFDNHMDAKRTLREIKLLRHLDHENIIGIRDVIPPPVPQAFNDVYIGTELMDTDLHHIIRSNQELSEEHSQYFMYQILRGLKYIHSANVIHRDLKPSNLLVNANCDLKICDFGLARPSSESDMMTEYVVTRWYRAPELLLNSTDYSAAIDVWSVGCIFMELINRQPLFPGRDHMHQMRLITEARARRTHHILPIIQFLLLLLLLMNIAGTRQVIRTPTDDELGFIRNEDARKYMRHLPQFPRRPFVSLFPRMQPVALDLIERMLTFNPLQRITVEEALEHPYLERLHDVADEPICTDPFSFDFEQQALTEDQMKQLIFNEAIELNPNFRY

SEQ ID NO: 140352 - DNA, 1632 bp, Zea mays
  CDS (1)..(1632)
atggacttttttacagagtatggcgaggggagcaggtacaagatagaagaggtcatagggaaaggcagttacggtgtggtttgctctgccttggacactcatactggtgaaaaggtcgccataaagaagataaatgacatctttgagcatgtgtctgatgcgacaaggatacttagggaaatcaagttgcttagactcctgcggcatccggatatcgtggaaataaagcatattctacttcctccatcaaggagggaattcagggatatttacgtcgtgtttgaacttatggagtctgatttgcaccaagttataaaggctaatgatgacttaaccccagagcattatcagttcttcttgtatcagttgcttcgaggtttgaaatacatacacacagcaaatgtattccatcgagatctcaaaccaaaaaatattctggcaaatgctgattgtaagctcaaaatatgtgattttggcctagcaagagtagctttcagtgatactccaaccgcgatcttttggacagattatgttgcaactaggtggtaccgagcaccggagctgtgtggatcctttttctcaaagtatacaccagcgatagatatatggagtattggttgtatatttgcagaactattaactggaaaaccgcttttcccgggaaaaaatgtggtacatcaacttgatataattacagatctcatgggaacaccttctccagaagcaatatcgaggattcgtaatgagaaggccaggcgctatttgagtaatatgaggcggaaaaagcccataccttttacacagaagttcccaaatgcagatccacttgcattaggtttgttagagcgaatgctagcttttgagccaaaagacaggccaagtgctgaagaggctcttgctcatccttattttaagaatatagccaatgtggatagagagccttctgcacaagctgtcacaaagctcgaatttgagttcgagagacggagagtcactaaagatgacataagggaacttatatatagagaaattcttgagtatcatccaaagatgttgaaagaatttattgagggaactgagtcaagtggtttcatgtacccaagtgcagtagataattttaaaaagcagtttgcataccttgaggaacattatgccaagggatctacgggaactccacctgagaggcaacataactcgttaccacggccttctgttgtctattcagacaaccaatcacaaagcacggccaatataacagaggatctttccaagtgtataatcagagaaaatgcacagaagacacagcaatataatgcttcagttgcaaataaatttccaccccatgttcctcaaggtgctgctgcaaggcctggtaaagcagttggttcggtgctgcagtacaacctctctcaagcatctgctgctgagcaatatgagcagcgaagggctgctaggcacccagcagttgccccaaacaacatcccttctggaagctcataccccagaagaaatcagacctgcagcgagacaggcgacactgagaggatggacgtgaaccaagctgggcagccgaagccctatgcagcaaacaaactacctgcaactgttgatggtcgcggcggccattggtag

SEQ ID NO: 140353 - protein, 543 aa, Zea mays
MDFFTEYGEGSRYKIEEVIGKGSYGVVCSALDTHTGEKVAIKKINDIFEHVSDATRILREIKLLRLLRHPDIVEIKHILLPPSRREFRDIYVVFELMESDLHQVIKANDDLTPEHYQFFLYQLLRGLKYIHTANVFHRDLKPKNILANADCKLKICDFGLARVAFSDTPTAIFWTDYVATRWYRAPELCGSFFSKYTPAIDIWSIGCIFAELLTGKPLFPGKNVVHQLDIITDLMGTPSPEAISRIRNEKARRYLSNMRRKKPIPFTQKFPNADPLALGLLERMLAFEPKDRPSAEEALAHPYFKNIANVDREPSAQAVTKLEFEFERRRVTKDDIRELIYREILEYHPKMLKEFIEGTESSGFMYPSAVDNFKKQFAYLEEHYAKGSTGTPPERQHNSLPRPSVVYSDNQSQSTANITEDLSKCIIRENAQKTQQYNASVANKFPPHVPQGAAARPGKAVGSVLQYNLSQASAAEQYEQRRAARHPAVAPNNIPSGSSYPRRNQTCSETGDTERMDVNQAGQPKPYAANKLPATVDGRGGHW

SEQ ID NO: 140354 - DNA, 1533 bp, Zea mays
  CDS (1)..(1533)
atggcggtggcggcccctggccagctcaacctcgacgaggccccgtcatggggctcccgcagcgtagactgcttcgagaagctcgagcagatcggcgagggcacctacgggcaagtgtacatggcgaaggagacgggcaccaacgagatcgtcgcgctcaagaagatccgcatggacaacgagcgcgaagggttcccgatcaccgccatacgcgagatcaaaatcctgaagaagcttcaccaccagaacgttatcaagctcaaggagatcgtcacctccccaggcccagagcgggacgagcaagggaagccaattgacggtaacaagtacaaggggagcatttacatggttttcgagtatatggaccatgatctcaccgggcttgctgatcggccaggaatgcggttcactgtgccgcagattaagtgttacatgaggcagctgcttacaggcctgcactattgtcatgtcaaccaagttctgcatcgagatatcaaaggatctaaccttttgatagacaatgagggtaacttgaagcttgctgattttggccttgcaagatcattctcgagtgatcacaatggcaaccttactaaccgtgtgatcactttgtggtatagacctccagagttgctacttggaagcacaaagtatggcccagccgttgacatgtggtcagtgggctgtatttttgcagaacttctcaatgggaagccaatattgcctggaaagaatgagccagagcagctgactaagatcttcgagctttgtggtacccctgatgacacaatctggcctggtgtcacaaaaatgccttggtacaacaacttcaagcctccccggccattaaagagacgagttaaagatttctttaagcattttgatcgacatgcactggatctgttagagaagatgttgactttagatccatcacagaggatatcagcaaaagatgcacttgatgcggaatatttctggactgatcccttaccatgcgatccaaaaagcttgcccaagtatgaggcatcgcatgaattccagactaagaaaaagcgtcagcaacagaggcaagcagaggaagctgcaaagcgtcaaaaacttaaccatcctccaccacattctcgtttgcctccactccagcagcctggccaagcacatcctcaaatgaggcctggccagggtatgcacaatgtgcctcctgtggcagccggcccaggccatcactatgcaaaaccccgaggaccaggaggccctaaccggtatcctcagggtgggaatcaagggggaggctacaatccgaaccgtggagggcagggtggtggctatggcagtggcccttatccccagcaagggcgagggcctccttaccctggagcagctggcccacggggcagcggtggcagtggctatggggctggagggccaaactaccaacagggtggcccatatggtacgtccggtccaagccgaggaccaaactactctcaaggtagtggttcccgcaaccaacagcagtatgggaactggcaataa

SEQ ID NO: 140355 - protein, 510 aa, Zea mays
MAVAAPGQLNLDEAPSWGSRSVDCFEKLEQIGEGTYGQVYMAKETGTNEIVALKKIRMDNEREGFPITAIREIKILKKLHHQNVIKLKEIVTSPGPERDEQGKPIDGNKYKGSIYMVFEYMDHDLTGLADRPGMRFTVPQIKCYMRQLLTGLHYCHVNQVLHRDIKGSNLLIDNEGNLKLADFGLARSFSSDHNGNLTNRVITLWYRPPELLLGSTKYGPAVDMWSVGCIFAELLNGKPILPGKNEPEQLTKIFELCGTPDDTIWPGVTKMPWYNNFKPPRPLKRRVKDFFKHFDRHALDLLEKMLTLDPSQRISAKDALDAEYFWTDPLPCDPKSLPKYEASHEFQTKKKRQQQRQAEEAAKRQKLNHPPPHSRLPPLQQPGQAHPQMRPGQGMHNVPPVAAGPGHHYAKPRGPGGPNRYPQGGNQGGGYNPNRGGQGGGYGSGPYPQQGRGPPYPGAAGPRGSGGSGYGAGGPNYQQGGPYGTSGPSRGPNYSQGSGSRNQQQYGNWQ

SEQ ID NO: 140356 - DNA, 1287 bp, Zea mays; identical to SEQ ID NO: 63071
  CDS (1)..(1287)

SEQ ID NO: 140357 - protein, 428 aa, Zea mays; identical to SEQ ID NO: 63072

SEQ ID NO: 140358 - DNA, 927 bp, Zea mays; identical to SEQ ID NO: 63073
  CDS (1)..(927)

SEQ ID NO: 140359 - protein, 308 aa, Zea mays; identical to SEQ ID NO: 63074

SEQ ID NO: 140360 - DNA, 885 bp, Helianthus annuus; identical to SEQ ID NO: 63075
  CDS (1)..(885)

SEQ ID NO: 140361 - protein, 294 aa, Helianthus annuus; identical to SEQ ID NO: 63076

SEQ ID NO: 140362 - DNA, 885 bp, Helianthus annuus
  CDS (1)..(885)
atggagcagtacgagaaggttgagaagattggtgaaggaacatacggtgtggtctacaaggctcgtgacaaagtgaccaatgaaacaattgctttgaaaaagatccgtttggagcaagaagatgagggtgtcccgagcacggctatcagagagatttcactattgaaggagatgcaacatggaaacattgtcaggttacaggatgttgtgcacagtgacaaacgattgtatctagtttttgagtatctggaccttgatttgaagaagcacatggactcgtgtccagagttttcaaaggatccacgccttgtaaaaacgtttctttatcaaatcctacgtggcattgcttattgtcattcccatagagttctccacagagatctaaaacctcaaaacttgttaattgatcgccgtaccaatgcactaaaacttgccgattttggattggccagggcctttggtatccctgtcaggacattcacacatgaggtggtgacactgtggtatagagcccccgaaattcttcttgggtcccgtcactattctactcctgttgatgtgtggtccgttggttgtatatttgctgagatggtgaaccagcgaccactctttcctggagactcagagattgatgaacttttcaagattttcaggatcatgggaactccaaatgaagagacatggcctggcgtcacttctctgcctgactttaagtccgcctttccaaagtggtcatcaaaggatctggcaaccgtggtcccgaatcttgaaaaaaccggtctcgatctcttacgtaaaatgctgtgcttggatcccagtaaaagaattacagcccggaccgcactggagcatgaatacttcaaagatatcggattcgtgccataa

SEQ ID NO: 140363 - protein, 294 aa, Helianthus annuus; identical to SEQ ID NO: 62970

SEQ ID NO: 140364 - DNA, 1185 bp, Helianthus annuus
  CDS (1)..(1185)
atggatccatcaattcacccttccgacaccgaaatgtctgacgccgccgcacctcctcctcctccgccgcagcagcagcccgtcgccggaatcgacaacatccccgccactcttagccacggcggcaggtttattcagtacaatatttttggtaacatcttcgaagttaccgctaagtataaaccgcctattatgcctattggaaaaggagcgtacggcatcgtctgttcggcgttgaattcggagacgaatgagcatgttgcgattaagaagattgctaacgcgtttgataataagattgatgcgaagaggacgctacgggagattaagcttttgcgtcatatggatcatgaaaatgttgttgcaattagagatataattccacctccagagaggaatgcatttaatgatgtctacattgcttatgagctcatggatactgatctccatcaaataattcgttccaatcaatcattatcagaggagcattgccagtattttttgtatcagatcctgcgtgggttaaaatacatacattctgcaaatgtgctgcacagagatttgaagccaagcaatcttctactgaacgctaattgtgatctgaaaatatgcgatttcggactagctcgtgttacatctgaaaccgatttcatgaccgaatatgttgtcacaagatggtaccgtgcaccagagctgctgttaaactcttctgattatactgctgccattgacgtatggtctgtgggttgcatttttatggaattaatggaccgcaagcccttatttcccggtagagatcatgtgcaccagctaagattgcttatggagttgattggaactccatcagaagcagaattagggtttcttaatgaaaatgcaaaaagatacattcgacaactacaacattatccacgacagtcattcaatgagaagtttcctcaagttcatcctgctgctattgatcttattgaaaagatgttgacatttgaccctagacagaggattacagttgaagatgcacttgctcatccatatctgacatcactgcatgacatcagcgatgagcctgtgtgcatgaccccttttaattttgactttgagcatcatgccccgactgaagaacagatgaaggagatgatttatagggaagctcttgcttttaatcctgaatatcagcatctgtga

SEQ ID NO: 140365 - protein, 394 aa, Helianthus annuus
MDPSIHPSDTEMSDAAAPPPPPPQQQPVAGIDNIPATLSHGGRFIQYNIFGNIFEVTAKYKPPIMPIGKGAYGIVCSALNSETNEHVAIKKIANAFDNKIDAKRTLREIKLLRHMDHENVVAIRDIIPPPERNAFNDVYIAYELMDTDLHQIIRSNQSLSEEHCQYFLYQILRGLKYIHSANVLHRDLKPSNLLLNANCDLKICDFGLARVTSETDFMTEYVVTRWYRAPELLLNSSDYTAAIDVWSVGCIFMELMDRKPLFPGRDHVHQLRLLMELIGTPSEAELGFLNENAKRYIRQLQHYPRQSFNEKFPQVHPAAIDLIEKMLTFDPRQRITVEDALAHPYLTSLHDISDEPVCMTPFNFDFEHHAPTEEQMKEMIYREALAFNPEYQHL

SEQ ID NO: 140366 - DNA, 1146 bp, Brassica napus
  CDS (1)..(1146)
atggctgacgatagggagatgccgccggctgctgtagttgatggacatgaccaagtcactggccacataatctccaccaccatcggtggtaaaaacggagaaccaaaacagacaataagttacatggcggagcgagttgtcggtacaggctccttcgggatagtgttccaggcgaagtgtctggagactggagaaaccgtggcgataaagaaggttttgcaagacaggaggtacaagaaccgagagcttcagctgatgcgtgtgatggaccatccgaatgttgtttgtttgaagcattgcttcttctcgaccacgagcaaagacgagctgtttctgaacttggttatggagtatgtccctgagagcttgtaccgagttctgaaacattacagcactgctaaccagaggatgccgcttgtttatgttaaactctatatgtaccagatcttcagaggacttgcttacattcacaatgttgctggagtttgtcacagagatctaaagcctcaaaatcttctggttgatcctctgactcatcaagtgaagatctgtgattttggcagtgcgaaacagcttgttaaaggtgaagccaacatctcttacatatgttcaagattctaccgtgcacctgaacttatattcggtgccactgagtacacaacttccattgatatttggtctgctggttgtgttctcgctgagcttcttcttggtcagccactattccctggagaaaatgctgtgggtcagctcgttgaaatcatcaaagttcttggtacaccaactcgagaagagatccgttgtatgaatccacactacacagactttaggttcccgcagataaaggcacatccttggcacaagattttccacaaaaggatgcctccagaagccattgattttgcatcaaggctgcttcagtactctccaagtcttagatgcacagcgcttgaagcttgtgcacatccgttctttgatgagcttagagaaccaaatgctcgtttaccaaacggacggcctttcccgccgctcttcaacttcaaacaagaggtagctggagcttcacctgagctggtcaacaagttgattccagaccatatcaagacgcagttgggtctaagcttcttgaatcagtctggaacttaa

SEQ ID NO: 140367 - protein, 381 aa, Brassica napus
MADDREMPPAAVVDGHDQVTGHIISTTIGGKNGEPKQTISYMAERVVGTGSFGIVFQAKCLETGETVAIKKVLQDRRYKNRELQLMRVMDHPNVVCLKHCFFSTTSKDELFLNLVMEYVPESLYRVLKHYSTANQRMPLVYVKLYMYQIFRGLAYIHNVAGVCHRDLKPQNLLVDPLTHQVKICDFGSAKQLVKGEANISYICSRFYRAPELIFGATEYTTSIDIWSAGCVLAELLLGQPLFPGENAVGQLVEIIKVLGTPTREEIRCMNPHYTDFRFPQIKAHPWHKIFHKRMPPEAIDFASRLLQYSPSLRCTALEACAHPFFDELREPNARLPNGRPFPPLFNFKQEVAGASPELVNKLIPDHIKTQLGLSFLNQSGT

SEQ ID NO: 140368 - DNA, 885 bp, Brassica napus; identical to SEQ ID NO: 63077
  CDS (1)..(885)

SEQ ID NO: 140369 - protein, 294 aa, Brassica napus; identical to SEQ ID NO: 63078

SEQ ID NO: 140370 - DNA, 1233 bp, Brassica napus
  CDS (1)..(1233)
atggccacggtgggcgtagagcctagtgccgcggttagagattctaacggaaacgttactgctgatgttgatagattacctgaagagatgaatcacatgaaaattcaagatgataaagaaatggaagctacaatagtaaacggcaatgtcacagagactggtcacattatagtcactaccataggtggaagaaacggccaacctaagcagacaatcagttacatggcagagagagttgttggacacggctccttcggcgttgtcttccaagcgaaatgtttagagacaggagaaactgttgcgataaagaaagttttgcaagaccgaaggtacaagaaccgtgagctacaaacaatgaggctactcgaccatccaaacgtagtctctctaaaacactgcttcttctcaacaaccgagaaagacgagctttacctcaacctggtcctcgaatacgtccctgagacagttcacagagttatcaaacactacaacaaactcaaccaacgcatgcctatcatatacgtcaaactctacacctatcagatctttagggccttagcctacattcaccgttgtattggcgtgtgtcatcgtgacatcaaacctcagaacttgttggtaaatccacacacacatcaagtgaagctatgtgattttggaagtgctaaagtattggtgaaaggagaaccaaacatctcatacatatgctcgaggtattacagagcacctgagcttatctttggagcaaccgagtatacaacagccattgatgtctggtctgcaggatgtgttcttgctgagctcttgcttggacagccattgttccctggtgagagtggtgttgatcaacttgtagagattataaaggttttgggaacgcctactagggaagaaatcaaatgcatgaacccaaactacactgagttcaagttccctcagattaaagctcatccatggcacaagattttccacaaaagcatgcctccagaagctgttgatttggtctcaaggcttcttcaatactctcctaatctccgttgcgctgctcttgatgcattggtccacccgttctttgacgagcttagagatccgaatgcaaggttgcctaatggacgtttccttccaccactgttcaacttcaagcctcatgagcttaaaggtgtgccagtggagatggtggctaagttagtacccgaacatgcgaggaagcagtgtccttggctcggtttgtga

SEQ ID NO: 140371 - protein, 410 aa, Brassica napus
MATVGVEPSAAVRDSNGNVTADVDRLPEEMNHMKIQDDKEMEATIVNGNVTETGHIIVTTIGGRNGQPKQTISYMAERVVGHGSFGVVFQAKCLETGETVAIKKVLQDRRYKNRELQTMRLLDHPNVVSLKHCFFSTTEKDELYLNLVLEYVPETVHRVIKHYNKLNQRMPIIYVKLYTYQIFRALAYIHRCIGVCHRDIKPQNLLVNPHTHQVKLCDFGSAKVLVKGEPNISYICSRYYRAPELIFGATEYTTAIDVWSAGCVLAELLLGQPLFPGESGVDQLVEIIKVLGTPTREEIKCMNPNYTEFKFPQIKAHPWHKIFHKSMPPEAVDLVSRLLQYSPNLRCAALDALVHPFFDELRDPNARLPNGRFLPPLFNFKPHELKGVPVEMVAKLVPEHARKQCPWLGL

SEQ ID NO: 140372 - DNA, 864 bp, Brassica napus
  CDS (1)..(864)
atgacttacagccaaacactcggacacaacaacaacaacaacaacgaaaagtaccagatctgcgaagagatcggtcggggacgcttcggaaccgtcactcgcgtctacgcgccagccaccggtgatttcttcgcatgcaaaaccatcgataaaagctctctcaccgacgcgctcgaccgcgcgtgcatcgacaccgagcccaaactcatggctctcttgtcttaccacccgaacatcgtccaaatccacgacctcgtcgacacggactcgaccctctccatctacatggagctagtggacccctccgtctccatctacgaccgcctcgtctcctccgggaccttctccgagtcccaaaccgcgtcgttcgcgaaacagattctccaggggctctcgcattgccaccggtacggcgtcgttaacagggacatcaaaccggagaatattttattggatcttaggaacgacgcggtgaagatctgtgacttcgggtccggggtttggttgggtgagggagagaccaccgaaggtgtggtgggaacgccgtattacgtggcgccggaggttctgatgggttgttcgtacggagagaaggttgatctctggagcgcgggagtcgttttgtacacgatgctcgctggatctccgcctttttacggggagacggcggaggagattttcgaggcggtgctgagagggaacttgaggtttccgccgaaggtgttcaggggagtttcgtcgatggctaaagatttcttgaggaagatgatgtgtaaggatgcttctcgaagattctcagccgaacaagctctccgacacccttggattcaaagagcaggggaagcagaggagagattcatctaa

SEQ ID NO: 140373 - protein, 287 aa, Brassica napus
MTYSQTLGHNNNNNNEKYQICEEIGRGRFGTVTRVYAPATGDFFACKTIDKSSLTDALDRACIDTEPKLMALLSYHPNIVQIHDLVDTDSTLSIYMELVDPSVSIYDRLVSSGTFSESQTASFAKQILQGLSHCHRYGVVNRDIKPENILLDLRNDAVKICDFGSGVWLGEGETTEGVVGTPYYVAPEVLMGCSYGEKVDLWSAGVVLYTMLAGSPPFYGETAEEIFEAVLRGNLRFPPKVFRGVSSMAKDFLRKMMCKDASRRFSAEQALRHPWIQRAGEAEERFI

SEQ ID NO: 140374 - DNA, 1143 bp, Brassica napus
  CDS (1)..(1143)
atggctgacgataaggagatgccggctgctgtagttaacggacacgaccaagtcactggccacataatctccacaaccatcggaggcaaaaacggagaaccaaaacagacaataagttacatggcggagcgagtcgtcggaacaggctccttcgggatagtcttccaagcaaagtgtttggagacaggagaaaccgtggcgataaagaaggttctgcaagacaggagatacaagaaccgagagcttcagctgatgcgtgtgatggaccatccgaacgtggttcgtttgaaacattgcttcttctccaccacgagtaaagacgagcttttccttaatctggttatggagtatgtccctgagagcttgtaccgtgttctgaaacattacagcactgcgaaccagagaatgcctcttgtctacgttaaactctacatgtaccagatctttaggggacttgcttacgttcacaatgttgctggagtttgccatagagatctaaagccgcaaaatcttctggttgatcctcttacacatcaagtcaagatatgtgactttggcagtgcgaaacagcttgttaaaggtgaagccaacatatcttacatatgttcaagattctaccgtgcaccagagctcatatttggtgccactgagtacacaacttccattgatatctggtctgctggttgtgttcttgctgagcttctccttggtcagccattattccctggagaaaatgctgtggatcagctcgttgaaatcatcaaagttcttggtacaccaactcgagaagagatccgttgcatgaatccacattacacggactttaggttcccacagataaaggcacacccttggcacaagattttccataaaaggatgcctccagaagcgattgatttcgcatcgaggctgcttcagtactctccaagtcttagatgcacagctcttgaagcttgtgcacatccgttctttgatgaactgagagaaccaaatgctcgtttaccaaacggacggcctttcccgccaatcttcaacttcaaacaagaggtagctggagcatcacctgagctggtcaacaagttgattccggaccatatcaagagacagttgggtctaagtttcttgaatcagtctggaacttaa

SEQ ID NO: 140375 - protein, 380 aa, Brassica napus
MADDKEMPAAVVNGHDQVTGHIISTTIGGKNGEPKQTISYMAERVVGTGSFGIVFQAKCLETGETVAIKKVLQDRRYKNRELQLMRVMDHPNVVRLKHCFFSTTSKDELFLNLVMEYVPESLYRVLKHYSTANQRMPLVYVKLYMYQIFRGLAYVHNVAGVCHRDLKPQNLLVDPLTHQVKICDFGSAKQLVKGEANISYICSRFYRAPELIFGATEYTTSIDIWSAGCVLAELLLGQPLFPGENAVDQLVEIIKVLGTPTREEIRCMNPHYTDFRFPQIKAHPWHKIFHKRMPPEAIDFASRLLQYSPSLRCTALEACAHPFFDELREPNARLPNGRPFPPIFNFKQEVAGASPELVNKLIPDHIKRQLGLSFLNQSGT

SEQ ID NO: 140376 - DNA, 1107 bp, Brassica napus; identical to SEQ ID NO: 63079
  CDS (1)..(1107)

SEQ ID NO: 140377 - protein, 368 aa, Brassica napus; identical to SEQ ID NO: 63080

SEQ ID NO: 140378 - DNA, 1119 bp, Brassica napus
  CDS (1)..(1119)
atgtctggagaatcaagctctggtactacagatcattgcatcaaagtcgtacctacacacggaggccgctatattcagtacaacgtttacggacagctctttgaagtttcaagaaagtatgttcctcctatccgtcccattggtagaggcgcttgcggtattgtctgtgctgctgtgaactcagtgactggagagaaagtggctattaagaagatcggtaatgcttttgataacatcattgatgctaagagagctctacgtgaaatcaagcttctcaggcacatggatcatgagaacgtcatagccatcaaagatattgtaagacctccacaacgtgatatcttcaacgatgtttacattgtctatgagttaatggacactgatctccagcgtatcctccgttctaagcaaaccttaagccacgaccagtgccgcttctttgtgtaccagctcttaagagggcttaagtacgtgcactcggccaacatattacatcgtgatctaaggccaagcaacgtgctgcttaactccaaacacgagctaaagatcggtgactttgggcttgcgagaacaacttcagacacagactttatgactgagtatgttgttactcgttggtacagagctcctgagctgcttcttaactgctcggagtacactgcagctattgatatatggtctgttggttgcatattcggtgaaatcatgacggggcaaccgttgttccctggaaaagattatgttcatcagcttaggcttatcacagagcttgtaggctctccagacaactccagtctcggtttccttcgcagtgacaacgcgagaagatacgtgaggcaacttccacgataccctaaacaagagtttgctgctagattccccaaaatgccccctaccgctattgatttgctggagagaatgctcgtctttgatccaaaccgacgtatctcagttgatgaagctctcggccatgcatacttatcaccacaccacgatgtggcaaaagaacctgtatgtccaactccttttagcttcgacttcgagcatccttcatgcacggaagaacacataaaagagcttatctacaaggagtctgtcaaattcaatcctgaccattga

SEQ ID NO: 140379 - protein, 372 aa, Brassica napus
MSGESSSGTTDHCIKVVPTHGGRYIQYNVYGQLFEVSRKYVPPIRPIGRGACGIVCAAVNSVTGEKVAIKKIGNAFDNIIDAKRALREIKLLRHMDHENVIAIKDIVRPPQRDIFNDVYIVYELMDTDLQRILRSKQTLSHDQCRFFVYQLLRGLKYVHSANILHRDLRPSNVLLNSKHELKIGDFGLARTTSDTDFMTEYVVTRWYRAPELLLNCSEYTAAIDIWSVGCIFGEIMTGQPLFPGKDYVHQLRLITELVGSPDNSSLGFLRSDNARRYVRQLPRYPKQEFAARFPKMPPTAIDLLERMLVFDPNRRISVDEALGHAYLSPHHDVAKEPVCPTPFSFDFEHPSCTEEHIKELIYKESVKFNPDH

SEQ ID NO: 140380 - DNA, 951 bp, Brassica napus; identical to SEQ ID NO: 63083
  CDS (1)..(951)

SEQ ID NO: 140381 - protein, 316 aa, Brassica napus; identical to SEQ ID NO: 63084

SEQ ID NO: 140382 - DNA, 1683 bp, Brassica napus
  CDS (1)..(1683)
atgcagcctgatcaacgcaaaaagtcatcagtggaactagatttcttcacggagtacggtgaaggctccaggtacagaatcgaggaagtcatcggcaaaggaagctacggagtcgtctgctcggcctacgacacgcacacgggagagaaagtcgcaatcaagaagatcaacgacatcttcgagcacgtctctgatgcaactcgcattctccgtgagatcaagctcctcagactcttgcgccatcctgacatcgttgagatcaagcacatcttgctgccgccttcgaggagagagttcagagacatttatgtcgttttcgagctcatggaatctgatctgcatcaggttatcaaggctaatgatgatttgactcctgagcattatcagtttttcctttatcagcttctccgtggcctcaagtatatacacacagctaatgtttttcatagggatctaaaaccgaaaaacatattggctaatgctgattgtaaactcaagatttgtgattttggacttgcgagagttgcattcaatgatacaccaactgctattttctggactgactatgtagctactagatggtaccgagctccagaactgtgtggatcatttttctcaaagtatacaccggcgatagatatatggagcatagggtgcatctttgcagagcttttaacagggaaacctcttttccccgggaaaaatgtggttcatcaattggatctgatgactgatatgttaggaactccatctgcggaagccattggaagggtgaggaacgagaaagctcgaagatacttaagcagcatgaggaagaagaagcctattccttttacacacaagtttccacatgctgatcctctcgcccttcgtcttctagagaagatgttgtcttttgaacccaaggaccggcctacagctgaagaggcacttgcggatccctacttcaagaatttagctaaggttgaaagagagccctctgctcaacccgtaacaaagctggaattcgagttcgagaggcggaggatcacaaaagaggacgtgagagagctcatatatagagagtctcttgagtaccacccaaaaatgctgaaagaatacctggatggatcagagccaaccaactttatgtacccgagtgcggtggaacatttcaagaaacagttcgcttacctagaggaacactacaagaatggtacttctcataaccccccggagaggcagcagcacgcatcattacctagggcttgcgttttgtactccgataacaacaatgcagcggcggcacaacagacttcagtggaagtcactgatggactctccaagtgtagcatcagagatgagagaccgcacaggaatgcgcagcgaattcctgttaacgtccctcaaacaatccaaggtgctgcggtagctaggcctggaaaagtagtggggtcagtgttacgctataacaactgcggtgcagccacaggagttgaagctcttgaacaacaacgtaggatggtgagaaatccggttggtgtggctcagtacccaaagagaagttctcaaccttgcaaaagcagcagaggagatgaagactgcgattctgcagaaggttcaagtagattgaaacaaaaccctcagtatatacctcagaaagtcgctgcagcgcaagatactgcaatgagccgctggtactaa

SEQ ID NO: 140383 - protein, 560 aa, Brassica napus
MQPDQRKKSSVELDFFTEYGEGSRYRIEEVIGKGSYGVVCSAYDTHTGEKVAIKKINDIFEHVSDATRILREIKLLRLLRHPDIVEIKHILLPPSRREFRDIYVVFELMESDLHQVIKANDDLTPEHYQFFLYQLLRGLKYIHTANVFHRDLKPKNILANADCKLKICDFGLARVAFNDTPTAIFWTDYVATRWYRAPELCGSFFSKYTPAIDIWSIGCIFAELLTGKPLFPGKNVVHQLDLMTDMLGTPSAEAIGRVRNEKARRYLSSMRKKKPIPFTHKFPHADPLALRLLEKMLSFEPKDRPTAEEALADPYFKNLAKVEREPSAQPVTKLEFEFERRRITKEDVRELIYRESLEYHPKMLKEYLDGSEPTNFMYPSAVEHFKKQFAYLEEHYKNGTSHNPPERQQHASLPRACVLYSDNNNAAAAQQTSVEVTDGLSKCSIRDERPHRNAQRIPVNVPQTIQGAAVARPGKVVGSVLRYNNCGAATGVEALEQQRRMVRNPVGVAQYPKRSSQPCKSSRGDEDCDSAEGSSRLKQNPQYIPQKVAAAQDTAMSRWY

SEQ ID NO: 140384 - DNA, 1122 bp, Brassica napus; identical to SEQ ID NO: 63085
  CDS (1)..(1122)

SEQ ID NO: 140385 - protein, 373 aa, Brassica napus; identical to SEQ ID NO: 63086

SEQ ID NO: 140386 - DNA, 1803 bp, Brassica napus
  CDS (1)..(1803)
atgcagcaagttcaggggaagaagagcatgaaagagatcgactttttcaccgagtacggcgacgccaaccgttaccagatcctcgaagtcatcgggaaaggaagctacggagttgtgtgcgcagccatcgacacgcacacgggagagaaagtcgcaatcaagaagatcaacgacgtcttcgaacacatctccgacgcgctccggatcctccgcgaggtcaagcttctgaggctcctgaggcatcctgatatagtggagatcaaaagcatcatgcttccgccttccaaaagagagttcaaagacatctacgtcgtgtttgagctcatggagtctgatcttcaccaagttattaaagctaacgatgatttgactaaggagcatcaccagttttttctttatcagatgcttcgtgccttaaagtacatgcatacagctaatgtgtatcatcgtgatcttaagccgaagaatatactggcgaatgcgaactgcaagttgaaagtttgtgactttggattggctagagtggcgttcaatgacactcccacaacagtcttttggacggactatgttgcaacgagatggtacagagcgcctgagctatgtggatcattcttttctaagtacactccagctatagatatttggagcattggctgcatctttgcagaggtgcttacagggaagccactgtttcctgggaaaagcgttgctcatcagttggagttgattactgatcttcttggctcaccaaagtcagagaccatctctggagttagaaatgataaagctagaaagtacttgagtgaaatgaggaagaaagatccagtcaccttctctcaaaaattctccaaagcagatcctttagctgtcagacttttgcagaagctgttggcgtttgatccaaaggatagacccactgctgctgaggcattggctgatccttactttaagggtctctctaagattgaaagagagccatcgtgtcagccaatctcgaagatggagtttgagtttgagagaagaaggttgacaaaggatgacattagggaacttatttacagggagatattagagtaccatcctcagttgctcaaggactacatgagcggatctgagggttcaagttttgtatatcctagcgcaataggacatcttaggaagcagttcaattacttagaggagaatagcagtaggaatgggccggtcatacctcctgagaggaagcacgtatcacttcctcggtctacagtacactcaagtgtagtccattccactagtcaacccaacttgtgtgcaacggagagtagacgtgttcatttcgagcagccttcaagaaatggagcagttccttcaggacattcattaactaaagctttaggacctccaccaagagcaccaccaccatcaggtagatcaagtcgtgttgtggaaccatctgcatcttatgagaatgggaggaacctcaaagaagcttatttcagaagcgcagtatcatctcctcactgttacttcaaagcaaacaccatgatgaacccagataaagcttcgtctcagccaaaacctcaagagttcgtccaccaatacagtcccaccgtgccgccgccagctgctaggactaaccaaacaaacccttacttccagtcacatctccccaagacagatcaatcaagcaacaacaacaacacacaaatggccattgatgctaccttgttgcaagcacaatcacagtttggtccagccgcagcggttgcagtagcagcacaccggaacgtaggcacagttggttacagtgcagcgtcgtag

SEQ ID NO: 140387 - protein, 600 aa, Brassica napus
MQQVQGKKSMKEIDFFTEYGDANRYQILEVIGKGSYGVVCAAIDTHTGEKVAIKKINDVFEHISDALRILREVKLLRLLRHPDIVEIKSIMLPPSKREFKDIYVVFELMESDLHQVIKANDDLTKEHHQFFLYQMLRALKYMHTANVYHRDLKPKNILANANCKLKVCDFGLARVAFNDTPTTVFWTDYVATRWYRAPELCGSFFSKYTPAIDIWSIGCIFAEVLTGKPLFPGKSVAHQLELITDLLGSPKSETISGVRNDKARKYLSEMRKKDPVTFSQKFSKADPLAVRLLQKLLAFDPKDRPTAAEALADPYFKGLSKIEREPSCQPISKMEFEFERRRLTKDDIRELIYREILEYHPQLLKDYMSGSEGSSFVYPSAIGHLRKQFNYLEENSSRNGPVIPPERKHVSLPRSTVHSSVVHSTSQPNLCATESRRVHFEQPSRNGAVPSGHSLTKALGPPPRAPPPSGRSSRVVEPSASYENGRNLKEAYFRSAVSSPHCYFKANTMMNPDKASSQPKPQEFVHQYSPTVPPPAARTNQTNPYFQSHLPKTDQSSNNNNTQMAIDATLLQAQSQFGPAAAVAVAAHRNVGTVGYSAAS

SEQ ID NO: 140388 - DNA, 1107 bp, Brassica napus; identical to SEQ ID NO: 63087
  CDS (1)..(1107)

SEQ ID NO: 140389 - protein, 368 aa, Brassica napus; identical to SEQ ID NO: 63088

SEQ ID NO: 140390 - DNA, 1839 bp, Brassica napus
  CDS (1)..(1839)
atgatgcagaaagatcatcagcgtaaaaagaacaatctagagatggagttcttctcagactacggcgacgccaccagattcaaaatccaagaaagaatcggaaaaggcagctacggagtcgtctgctcagccatagacaccctaaccggcgagaaagtcgccataaagaaaatacacgacatcttcgagcatatatcagacgccgcgaggatcctccgcgagataaaactcctcagactcctaaggcatccggacatagtcgaaatcaagcacatcatgctccccccttcgagaagagagttcaaagacatctacgttgtgtttgagctcatggagtctgatcttcaccaagtcattaaagccaatgatgatttgacaaaagagcattaccagtttttcctttatcagttactgcgtgcactcaagtacattcacacagctaatgtttaccatcgagatctgaagccaaagaacatattggcaaatgcaaactgtaaacttaagatttgtgattttggattggcaagagttgcattcaatgatactcccacaacaatcatctggacagactatgttgcgacaagatggtatagagctccagagctttgtggatctttctactctaagtatacaccagcgattgacatctggagtataggctgcatttttgcagaagtattgatgggaaaaccacttttccctggaaagaatgtggttcaccagctggatcttatgactgatctgctaggaacaccttccctggacaccatctccagggtaaggaatgagaaggcaaggaggtacttaacaagcatgaggaaaaagccacccattccttttactcagaaatttccaaacgcagatcctttgtctctgaagctgcttgagaggcttcttgcttttgatcccaaagaccgtccaactgctcaagaggcacttgctgatccatatttcaagggattggcgaaagtggagagggagccttcatgtcaacccatcacgaagatggaatttgagttcgagagaagaaaagtcactaaagaagatatcagagagctaatatctagggagatacttgagtaccatcctcagctgctaaaagatcacatgaacggcgctgataaaaccaactttctctatccaagtgctgttgatcaattcagaagacagtttgcacatcttgaagaaaacagcgggaaaactggccctgtagcacctctagaaaggaaacatgcctctcttcccagatcaacagttatacactcaaccgcagttgcaagaggaggacaaccgaaacttatgaacaacacaaacacattgaaccctgaaacaactcaaaacattcctcttaatcaatacacaacatcacaagcacctcaaagaaacctctcaggtaccaaaccaagcacattcatgggcccggtggcgccttatgacaatggcagaaccagcagagaagcatatgacccgagatcattaatccgcagcactgctcttccctttccacaacagtctgctgcagcaaccatgggaaagcaacaagagaggagaacaacaacaaccatggagtctgagaggcaggcaaggcagatatctcaatacaatagatacgcacaaccagacgtggcaatcaacatagataacaacccgtttatcatggctagaacggggatgcacaaggcggaaaacatgagtgatcaccggatcataatagatacaaatctgttgcaagcaacagcaggaataggagttgcggcggctgctgcagctgctgctcccggtggttctgctcaccggaaagttggaggtgttcggtacggcatgtcaaagatgtactag

SEQ ID NO: 140391 - protein, 612 aa, Brassica napus
MMQKDHQRKKNNLEMEFFSDYGDATRFKIQERIGKGSYGVVCSAIDTLTGEKVAIKKIHDIFEHISDAARILREIKLLRLLRHPDIVEIKHIMLPPSRREFKDIYVVFELMESDLHQVIKANDDLTKEHYQFFLYQLLRALKYIHTANVYHRDLKPKNILANANCKLKICDFGLARVAFNDTPTTIIWTDYVATRWYRAPELCGSFYSKYTPAIDIWSIGCIFAEVLMGKPLFPGKNVVHQLDLMTDLLGTPSLDTISRVRNEKARRYLTSMRKKPPIPFTQKFPNADPLSLKLLERLLAFDPKDRPTAQEALADPYFKGLAKVEREPSCQPITKMEFEFERRKVTKEDIRELISREILEYHPQLLKDHMNGADKTNFLYPSAVDQFRRQFAHLEENSGKTGPVAPLERKHASLPRSTVIHSTAVARGGQPKLMNNTNTLNPETTQNIPLNQYTTSQAPQRNLSGTKPSTFMGPVAPYDNGRTSREAYDPRSLIRSTALPFPQQSAAATMGKQQERRTTTTMESERQARQISQYNRYAQPDVAINIDNNPFIMARTGMHKAENMSDHRIIIDTNLLQATAGIGVAAAAAAAAPGGSAHRKVGGVRYGMSKMY

SEQ ID NO: 140392 - DNA, 1188 bp, Brassica napus
  CDS (1)..(1188)
atggacggtggaacgggtcaaccggcggctgataccgagatgtcggaagctacaggcggtgcggctccatcgcaaccgatgccgggtatagagaatattccggcgacacttagccatggagggatgtttatacagtataacatattcgggaacatcttcgaggtcaccgccaagtatagccctccgatcatgcctattggcaagggtgcttatggcatcgtttgttctgctatgaactctgagacaaatgaaagcgtggcaattaagaaaatcgcaaacgcttttgataataagattgatgccaagaggactctccgtgagatcaagctccttcgccacatggatcatgagaatattgttgcaataagagacataataccaccaccgctaagaaccgctttcaatgatgtttacatcgcttatgagctaatggacactgatctccatcagatcatacgctctaaccaaggcttatccgaagagcattgccagtactttctttaccagatcctccgtggattgaagtacattcactccgcaaacgtgcttcaccgtgatctgaaaccgagcaacctcctcctcaacgcaaactgcgacttaaaaatctgcgattttggtctagctagagtcaactccgagagcgacttcatgactgagtacgttgtcacgagatggtaccgtgcgccggagctgcttttaaactcgtctgattacaccgcggctatcgatgtttggtctgttggttgtattttcatggagttgatggaccgtaagccgctctttcctggacgagatcatgttcatcagcttcgcctgctcatggagctcataggaacaccatcagaacaagagcttgagttcttgaacgaaaacgcaaagcgatacataaaacaactcccaccgtatcctcgccaatccatcactgataagttcccaaatgtgcatcctctagcgatagatcttatcgagaagatgctaacgtttgatcctagacggagaatcacagttttagacgctctggcacatccatacctgaactcactacacgacatcagcgacgagccagagtgcaccatacctttcaacttcgactttgagcaacacgcactctcagaggagcagatgaaggagctcatataccgcgaagcgcttgcattcaatccagagtatcagccagcaatagcttga

SEQ ID NO: 140393 - protein, 395 aa, Brassica napus
MDGGTGQPAADTEMSEATGGAAPSQPMPGIENIPATLSHGGMFIQYNIFGNIFEVTAKYSPPIMPIGKGAYGIVCSAMNSETNESVAIKKIANAFDNKIDAKRTLREIKLLRHMDHENIVAIRDIIPPPLRTAFNDVYIAYELMDTDLHQIIRSNQGLSEEHCQYFLYQILRGLKYIHSANVLHRDLKPSNLLLNANCDLKICDFGLARVNSESDFMTEYVVTRWYRAPELLLNSSDYTAAIDVWSVGCIFMELMDRKPLFPGRDHVHQLRLLMELIGTPSEQELEFLNENAKRYIKQLPPYPRQSITDKFPNVHPLAIDLIEKMLTFDPRRRITVLDALAHPYLNSLHDISDEPECTIPFNFDFEQHALSEEQMKELIYREALAFNPEYQPAIA

SEQ ID NO: 140394 - DNA, 1686 bp, Brassica napus
  CDS (1)..(1686)
atggcggcaggaggagttgaaatctccaaaagctctgtcgtcgttgatcgggttcgggatttgtatcctccccagggtggtagggacggtgaaaggcgtcaaaccaaacgacccagggattctgatcgctggttgaaagatgggcgacgtgatttgtatcaaagaggagaagcccgagagggagatgttggtcagaagaggaggaagtgttctccagtttcaggggagagaaaagatcaagtctttccacctccacttggtgagaagaccattgttgatgtgggtaagatttcatctgagggtgttctgaagtcaacagagtatgtttctgcagtgtcagtgacgtctgttaaacatccttttgatgatcttgaggagggccagttggaggacgagcaggtggttcaggcaccccatattgctacgtctaagtggtgtttggaatctcccaaggatgaggcagttcatgttgtcaggaatagcagatggaataggagcagccttactcctgagagcggtgaatttcaagtggattcgtctgatgaacatcggtccaattcttctggatctcgcagcttagaacccatcagtgctcatgaggattcagagcatgagttggagggtcgtattgacatggatgttggtgaagaagaatgttgtgcttctgattttaacgactcggaagttgatgaaccagagggaggcctgagcatgctatctggcagtagagatgttaatgaataccagaagctaagcaagataaatgaaggaacttatggtgttgtctacaaagccaaggacagaaagacggaagagattgtggcacttaaaatgatcaagatgaacatggaagacgaatatggattcccattgacatctttgagggagatcaacattcttttgtcttgcaatcacccgtcgattgtgaacgtcaaggaagtcgtggtgggaaacggtgacagtgttttcatggtcatggaacacttggaacacgacttgaggggtgttatggacaggatgaaacagccttttagcaccagtgaggtcaaatgcttgatgattcagctgttggagggtttgaagtacctacatagcaactggatcatccacagggatctgaagccatctaatcttctactgaacaacagtggggagctgaaaatatgcgattttggaatggctaggcaatatgggagtcctatcaagccctacacgcagttggttgtcacacagtggtacaggtccccggagcttcttctaggaacaaaggagtattcaaccgcagttgatatgtggtccatcgggtgcattatgggtgagttgctgtctctaaaacctcttttccgagggaaaagtcagaatgacattgaccagcttcaacagatatttgcggttcttggaacaccgagtgagacaacttggcctggattcacttcgctgccaggttccaaagccaagtttcgtaagcagccatacaatttactgcgtaagaaatttcctgctgcatcttttaccggaggtccagttctttcagaattgggatttgatttgttgaacagattattgaatgttgaccctgagaagcgactaacagttgacgaggctcttaaccacgcctggttcaatgaagtacctctccagaaatccaaggagttcatgcctacatttccttcaaagcgtaactga

SEQ ID NO: 140395 - protein, 561 aa, Brassica napus
MAAGGVEISKSSVVVDRVRDLYPPQGGRDGERRQTKRPRDSDRWLKDGRRDLYQRGEAREGDVGQKRRKCSPVSGERKDQVFPPPLGEKTIVDVGKISSEGVLKSTEYVSAVSVTSVKHPFDDLEEGQLEDEQVVQAPHIATSKWCLESPKDEAVHVVRNSRWNRSSLTPESGEFQVDSSDEHRSNSSGSRSLEPISAHEDSEHELEGRIDMDVGEEECCASDFNDSEVDEPEGGLSMLSGSRDVNEYQKLSKINEGTYGVVYKAKDRKTEEIVALKMIKMNMEDEYGFPLTSLREINILLSCNHPSIVNVKEVVVGNGDSVFMVMEHLEHDLRGVMDRMKQPFSTSEVKCLMIQLLEGLKYLHSNWIIHRDLKPSNLLLNNSGELKICDFGMARQYGSPIKPYTQLVVTQWYRSPELLLGTKEYSTAVDMWSIGCIMGELLSLKPLFRGKSQNDIDQLQQIFAVLGTPSETTWPGFTSLPGSKAKFRKQPYNLLRKKFPAASFTGGPVLSELGFDLLNRLLNVDPEKRLTVDEALNHAWFNEVPLQKSKEFMPTFPSKRN

SEQ ID NO: 140396 - DNA, 1044 bp, Brassica napus; identical to SEQ ID NO: 63089
  CDS (1)..(1044)

SEQ ID NO: 140397 - protein, 347 aa, Brassica napus; identical to SEQ ID NO: 63090

SEQ ID NO: 140398 - DNA, 1113 bp, Brassica napus
  CDS (1)..(1113)
atgaacaacgccggcggccaatatccagattttccggcggtgcagacgcacggaggacagttcataagctacgatatcttcggtagtttattcgaggtcacatccaagtaccgtcctccgattgttccaatcggtcgaggcgcatacggcatcgtttgctctgtgttggattcggagacgaacgagctagtggcgatgaagaagatagccaacgccttcgataatcacatggacgccaagcgtacacttcgcgagatcaagcttcttcgtcatctcgatcatgaaaacatcatagctataagagatgtggttcctccaccacttagaagacagttcagtgatgtttatatcgccactgagttaatggacactgatcttcatcaaatcatcagatccaaccagggcttgtctgaggaacactgtcagtacttcttgtaccagcttcttcgagggctcaagtacatccactcggctaaagttatccacagggatctaaagcctagcaatcttctcctgaacgccaactgcgatttaaagatctgtgattttggtcttgctagacccacttcagagaacgagtttatgactgagtatgttgttaccagatggtatagagcacctgagcttctgctgaactcatccgattacactgctgctattgatgtttggtctgttggttgtatcttcatggagctcatgaacagaaagcctttgttccctggtaaagaccatgtccatcagatgcgcttattgacagagttgcttggcacaccgacagaatcagatctcggttttacacacaacgaggatgccaaaagatacatccggcaacttcccaacttccctcgccagccgttagctaaactgttctctcatgttaacccattggccattgatctagttgacagaatgttgacgtttgaccccagcaaaagaatcactgttgaagaagctctgaatcacccgtacctagccaagttgcacgacccgaatgatgagccaatctgtctaaagccattctctttcgactttgaacaacaacctctagacgaggaacagataaaagagatgatctacagggaagccattgcactcaatccaacatatgcttag

SEQ ID NO: 140399 - protein, 370 aa, Brassica napus
MNNAGGQYPDFPAVQTHGGQFISYDIFGSLFEVTSKYRPPIVPIGRGAYGIVCSVLDSETNELVAMKKIANAFDNHMDAKRTLREIKLLRHLDHENIIAIRDVVPPPLRRQFSDVYIATELMDTDLHQIIRSNQGLSEEHCQYFLYQLLRGLKYIHSAKVIHRDLKPSNLLLNANCDLKICDFGLARPTSENEFMTEYVVTRWYRAPELLLNSSDYTAAIDVWSVGCIFMELMNRKPLFPGKDHVHQMRLLTELLGTPTESDLGFTHNEDAKRYIRQLPNFPRQPLAKLFSHVNPLAIDLVDRMLTFDPSKRITVEEALNHPYLAKLHDPNDEPICLKPFSFDFEQQPLDEEQIKEMIYREAIALNPTYA

SEQ ID NO: 140400 - DNA, 1107 bp, Brassica napus; identical to SEQ ID NO: 63091
  CDS (1)..(1107)

SEQ ID NO: 140401 - protein, 368 aa, Brassica napus; identical to SEQ ID NO: 63092

SEQ ID NO: 140402 - DNA, 1188 bp, Brassica napus
  CDS (1)..(1188)
atggacggtggaacgggtcaaccggcggctgataccgagatgtcggaagcttcaggcggtgcggttgcatcgcaaccgatgccggggaaagagaatattccggcgactctaagccacggagggaggtttatacagtataacatattcgggaacatcttcgaggtcaccgctaagtataaccctccgatcatgcctattggcaagggcgcttatggcatcgtttgctcggctatgaactctgaaacgaatgaaagcgttgctattaagaaaatcgcaaacgctttcgataataagattgatgccaagagaactctccgtgagatcaagctccttcgccacatggatcatgagaatattgttgcaataagagacataataccaccaccgctaagaaccgctttcaatgatgtttacatcgcttatgagctaatggacactgatctccatcagatcatacggtctaaccaaggcttatccgaagagcattgccagtattttctttaccagatcctccgtggattgaaatacattcactccgcaaatgtgcttcaccgtgatctgaagcctagcaatctcctcctgaacgcaaactgcgacttaaaaatctgcgacttcgggttagctcgagtcaattccgagagcgacttcatgactgagtacgttgtcacgaggtggtaccgtgcaccagagctgcttttaaactcttctgactatactgcggcgatagatgtttggtctgttggttgtattttcatggagttaatggaccgtaagccactcttccctggcagagatcatgttcatcagcttcgcctgctcatggagctcataggaacaccatcagaacaagaggttgagttcttgaacgaaaatgcaaagcgatacataagacaacttccaccgtatcctcgccaatccatcactgataagttcccaaatgtgcatcctctagcgatagatcttatcgagaagatgctaacgtttgatcctagacggagaatcacagttttagacgctctggcacatccatacctgaactctctacacgacatcagcgatgagccagagtgcacgatacctttcaacttcgactttgagcagcacgcactctcagaggagcagatgaaggagctcatataccgtgaagcgcttgcattcaatccagagtatcagccagcaatagcttga

SEQ ID NO: 140403 - protein, 395 aa, Brassica napus
MDGGTGQPAADTEMSEASGGAVASQPMPGKENIPATLSHGGRFIQYNIFGNIFEVTAKYNPPIMPIGKGAYGIVCSAMNSETNESVAIKKIANAFDNKIDAKRTLREIKLLRHMDHENIVAIRDIIPPPLRTAFNDVYIAYELMDTDLHQIIRSNQGLSEEHCQYFLYQILRGLKYIHSANVLHRDLKPSNLLLNANCDLKICDFGLARVNSESDFMTEYVVTRWYRAPELLLNSSDYTAAIDVWSVGCIFMELMDRKPLFPGRDHVHQLRLLMELIGTPSEQEVEFLNENAKRYIRQLPPYPRQSITDKFPNVHPLAIDLIEKMLTFDPRRRITVLDALAHPYLNSLHDISDEPECTIPFNFDFEQHALSEEQMKELIYREALAFNPEYQPAIA

SEQ ID NO: 140404 - DNA, 1143 bp, Brassica napus
  CDS (1)..(1143)
atggctgacgataaggagatgccggctgctgtagttgatggacatgaccaagtcactggtcacataatctccaccaccatcggtggcaaaaacggagaacctaaacagacaataagttacatggcggagcgagtcgtgggcacaggctccttcgggatagtgttccaagcaaagtgtttggagacaggagagaccgtggcgatcaagaaggttctgcaagacaggagatacaagaaccgagagcttcagctgatgcgtgtgatggaccatccgaacgtggttcgtttgaaacattgcttcttctcgaccacgagtaaagacgagcttttccttaatctggttatggagtatgtccctgagagcttgtaccgtgttctgaaacattacagcactgctaaccagagaatgcctcttgtctacgttaaactctacatgtaccagatcttcaggggacttgcttacattcacaatgttgctggagtttgtcacagagatctaaagcctcaaaatcttctggttgatcctcttactcatcaagtcaagatctgtgactttggcagtgctaaacagcttgttaaaggtgaagccaacatctcttacatatgttcaagattctaccgtgcacctgaactcatatttggtgccactgagtacacaacttccattgatatctggtctgctggttgtgttctcgctgagcttcttcttggtcagccactattccctggagaaaatgctgtggatcagctcgttgaaatcatcaaagttcttggtacaccaactcgagaagagatccgttgtatgaatccacactacacagactttaggttcccgcagataaaggcacatccttggcacaagattttccacaaaaggatgcctccagaagccattgattttgcatcaaggctgcttcagtactctccaagtcttagatgcacagcgcttgaagcttgtgcacatccgttctttgatgagcttagagaaccaaatgctcgtttaccaaacggacggcctttcccgccgctcttcaacttcaaacaagaggtagctggagcttcacctgagctggtcaacaagttgattccagaccatatcaagaggcagttgggtctaagcttcttgaatcagtctggaacttaa

SEQ ID NO: 140405 - protein, 380 aa, Brassica napus
MADDKEMPAAVVDGHDQVTGHIISTTIGGKNGEPKQTISYMAERVVGTGSFGIVFQAKCLETGETVAIKKVLQDRRYKNRELQLMRVMDHPNVVRLKHCFFSTTSKDELFLNLVMEYVPESLYRVLKHYSTANQRMPLVYVKLYMYQIFRGLAYIHNVAGVCHRDLKPQNLLVDPLTHQVKICDFGSAKQLVKGEANISYICSRFYRAPELIFGATEYTTSIDIWSAGCVLAELLLGQPLFPGENAVDQLVEIIKVLGTPTREEIRCMNPHYTDFRFPQIKAHPWHKIFHKRMPPEAIDFASRLLQYSPSLRCTALEACAHPFFDELREPNARLPNGRPFPPLFNFKQEVAGASPELVNKLIPDHIKRQLGLSFLNQSGT

SEQ ID NO: 140406 - DNA, 885 bp, Brassica napus; identical to SEQ ID NO: 63093
  CDS (1)..(885)

SEQ ID NO: 140407 - protein, 294 aa, Brassica napus; identical to SEQ ID NO: 63094

SEQ ID NO: 140408 - DNA, 1233 bp, Brassica napus
  CDS (1)..(1233)
atggccacggtgggcgtggagcctagtgccgcggttagagattctaacggaaacgttactgctgatgttgatagattacctgaggagatgaatcacatgaaaattcaagatgataaagaaatggaagctacaattgtaaacggcaatgtcacagagactggtcatattatagttactaccataggtggaagaaacggccagccaaagcagacaatcagttacatggcagagagagttgttggacacggctccttcggcgttgtcttccaagcgaaatgtttagagacaggagaaactgttgcgataaagaaagttttgcaagaccgaaggtacaagaaccgtgagctacaaacaatgaggctactcgaccatccaaacgtagtctctttaaaacactgcttcttctcaacaaccgagaaagacgagctttacctcaacttggtcctcgaatacgttcctgagacagttcacagagttatcaaacactacaacaaacttaaccaacgcatgcctatcgtctacgtcaaactctacacctatcagatatttaggtccttagcctacattcaccgttgtattggcgtgtgtcatcgtgacataaagcctcagaacttgttggtgaatccacacacacatcaagtgaagctttgtgattttggaagtgctaaagtattggttagaggagagccaaacatttcatatatatgctcaaggtattatagagcacctgagcttatttttggagcaactgagtatactacagccattgatgtctggtctacaggatgtgttctcgctgagcttcttcttggacagccattgttccctggtgagagtggtgttgatcagcttgtagagattataaaggttttgggaacaccaacaagggaagagatcaaatgcatgaaccccaattacactgagttcaagttccctcagattaaagctcatccatggcataagattttccacaagaggatgcctccggaagctgttgatttggtctcaaggcttcttcaatactctcctaatctccgttgctctgctcttgatgcattggtccacccgttctttgacgagcttagagatccgaatgcacggttgcctaatggacgtttccttccaccactattcaacttcaagcctcatgagcttaaaggtgtgcctgtggagatggtggctaggttagtacctgaacatgcgaggaagcagtgtccatggctcggtttatga

SEQ ID NO: 140409 - protein, 410 aa, Brassica napus
MATVGVEPSAAVRDSNGNVTADVDRLPEEMNHMKIQDDKEMEATIVNGNVTETGHIIVTTIGGRNGQPKQTISYMAERVVGHGSFGVVFQAKCLETGETVAIKKVLQDRRYKNRELQTMRLLDHPNVVSLKHCFFSTTEKDELYLNLVLEYVPETVHRVIKHYNKLNQRMPIVYVKLYTYQIFRSLAYIHRCIGVCHRDIKPQNLLVNPHTHQVKLCDFGSAKVLVRGEPNISYICSRYYRAPELIFGATEYTTAIDVWSTGCVLAELLLGQPLFPGESGVDQLVEIIKVLGTPTREEIKCMNPNYTEFKFPQIKAHPWHKIFHKRMPPEAVDLVSRLLQYSPNLRCSALDALVHPFFDELRDPNARLPNGRFLPPLFNFKPHELKGVPVEMVARLVPEHARKQCPWLGL

SEQ ID NO: 140410 - DNA, 1107 bp, Glycine max; identical to SEQ ID NO: 63095
  CDS (1)..(1107)

SEQ ID NO: 140411 - protein, 368 aa, Glycine max; identical to SEQ ID NO: 63096

SEQ ID NO: 140412 - DNA, 1224 bp, Zea mays
  CDS (1)..(1224)
atggaggcgccgccgggaccggggcccatggagctggacgccccacctcccgccgccgccgccgccgcagccgcggcgccggttcctcccgccggcagcgacaagcacaaggtggacggggaagggggagacgctgtgacgggccatatcatctccaccaccatcggcgggaagaacggcgagcccaagcggaccatcagttacatggcagaacgtgtcgtgggcacaggctcatttgggatcgtcttccaggctaagtgtttggagacaggagagaccttcgccattaagaaggtgctgcaggatcggcgttacaagaaccgggagctgcaacttatgcgtgccatggagcaccccaacgtcatctgcctgaagcactgcttcttctcaacaacgagcagggacgagttgtttctaaaccttgtcatggaatttgtccccgagaccctgtaccgtgtcctgaagcactacagcaatgcgaaccagaggatgcctcttatctacgtcaagctctacatgtatcagctttttagaggcctagcttatattcataatgtaccaggagtctgccatagggatgtgaagccacaaaacgttttggttgatcctctcacccaccaggtcaagctctgtgactttggtagtgcaaaagttctgattcctggtgaaccgaacatatcttacatatgctctcgttactatcgtgcccctgagctcatatttggtgcgacggagtatacaagttcaatagacatatggtcagctggttgtgttctagctgagttgcttcttggacagccactatttccaggagagagcgctgttgatcagttggtagagatcatcaaggttcttggtactccaacccgtgaggagatacgatgcatgaatcccaactatactgagttcaggtttcctcagataaaggctcatccgtggcacaagattttccacaagagaatgcctccggaagccattgaccttgcttcccgtctccttcagtattcgccaagtcttcgctgctctgctcttgatgcatgcgctcatcccttctttgatgagctgcgggcgccgaatgcacgtctaccaaacggccgtccattccctccgctctttaacttcaaacatgagctagcaaatgcctccccggacctcatcaacaggcttgtaccggagcacattagacggcagaacggtgtcaactttgggcatatcgggagctag

SEQ ID NO: 140413 - protein, 407 aa, Zea mays
MEAPPGPGPMELDAPPPAAAAAAAAAPVPPAGSDKHKVDGEGGDAVTGHIISTTIGGKNGEPKRTISYMAERVVGTGSFGIVFQAKCLETGETFAIKKVLQDRRYKNRELQLMRAMEHPNVICLKHCFFSTTSRDELFLNLVMEFVPETLYRVLKHYSNANQRMPLIYVKLYMYQLFRGLAYIHNVPGVCHRDVKPQNVLVDPLTHQVKLCDFGSAKVLIPGEPNISYICSRYYRAPELIFGATEYTSSIDIWSAGCVLAELLLGQPLFPGESAVDQLVEIIKVLGTPTREEIRCMNPNYTEFRFPQIKAHPWHKIFHKRMPPEAIDLASRLLQYSPSLRCSALDACAHPFFDELRAPNARLPNGRPFPPLFNFKHELANASPDLINRLVPEHIRRQNGVNFGHIGS

SEQ ID NO: 140414 - DNA, 1176 bp, Glycine max
  CDS (1)..(1176)
atggaaggaggaggagctgctccgccggccgacaccgtgatgtccgacgcggcgcctccgccgcagcaagcgatggctatggggatcgagaatattccggcgacgctgagccacggtggcaggttcatccaatacaacatattcggaaacatattcgaagtcaccgccaaatacaagccacccatcatgcccatcggaaaaggcgcatacggcatcgtttgctcggctttgaactcggagacgaatgagcacgttgccatcaagaagattgcgaatgcgtttgataacaagattgatgcaaagaggaccctccgtgaaatcaagctgcttcgtcacatggatcatgaaaacgtggttgcaatcagggatatagtgccaccacctcaaagggagatattcaatgatgtttacattgcatatgagttgatggacactgaccttcaccaaattattcgttcaaaccaaggattatcagaggagcactgtcagtattttctgtatcaaatcctccgtgggttgaagtacatacattctgccaatgttctgcatagggacttaaaacctagcaaccttctcctgaatgccaactgtgacttaaaaatttgtgattttggactggctcgtgtcacgtctgaaactgattttatgactgaatatgttgttacaagatggtaccgtgcaccagagcttctgttgaactcttctgattacactgcagcaattgatgtatggtctgttggttgtattttcatggaactgatggatcgcaagcctttgtttcctggcagagatcatgtgcatcagttgcgtctacttatggagctgattggcaccccatcagaggctgatttggggttcctgaatgaaaatgctaagagatacattaggcaactacccctttaccgctgtcaatctttccaggaaaagtttccacatgtccatcctgaagctatagatcttgttgaaaaaatgttaacttttgatcctagaaaaaggattactgttgaagatgcactggcgcacccgtacttgacatctctgcatgacatcagtgatgaaccagtgtgcatgactcccttcaactttgactttgaacaacatgctttgacggaggaacagatgaaagaactgatataccgagaggctctagcatctaaccctgagtatcagcagtag

SEQ ID NO: 140415 - protein, 391 aa, Glycine max
MEGGGAAPPADTVMSDAAPPPQQAMAMGIENIPATLSHGGRFIQYNIFGNIFEVTAKYKPPIMPIGKGAYGIVCSALNSETNEHVAIKKIANAFDNKIDAKRTLREIKLLRHMDHENVVAIRDIVPPPQREIFNDVYIAYELMDTDLHQIIRSNQGLSEEHCQYFLYQILRGLKYIHSANVLHRDLKPSNLLLNANCDLKICDFGLARVTSETDFMTEYVVTRWYRAPELLLNSSDYTAAIDVWSVGCIFMELMDRKPLFPGRDHVHQLRLLMELIGTPSEADLGFLNENAKRYIRQLPLYRCQSFQEKFPHVHPEAIDLVEKMLTFDPRKRITVEDALAHPYLTSLHDISDEPVCMTPFNFDFEQHALTEEQMKELIYREALASNPEYQQ

SEQ ID NO: 140416 - DNA, 885 bp, Glycine max; identical to SEQ ID NO: 63097
  CDS (1)..(885)

SEQ ID NO: 140417 - protein, 294 aa, Glycine max; identical to SEQ ID NO: 63098

SEQ ID NO: 140418 - DNA, 1221 bp, Glycine max
  CDS (1)..(1221)
atggcttcagttggtgtggcaccaacatcatcaggcttgagagaatccagtggtgttgataggttgccagaggagatgaatgatatgagaattagggatgataaagaaatggaagccaccgttgtcgatggtaacggaacagagaccggacatattattgttactaccattgggggtagaaatggtcaaccgaagcagactataagctatatggcagagcggattgttggacatggatcatttggggttgtcttccaggctaaatgcttggagactggtgaaactgtggctatcaaaaaagttcttcaagacaagaggtataaaaaccgggagctgcaaacaatgcgccttcttgaccacccaaatgttgtctgtttgaagcattgtttcttttcaaccaccgaaaaggatgaactataccttaatttggtacttgagtatgttcccgaaacagttaatcgtgtgatcaaacattacaacaagttgaaccaacggatgcctctgatatatgtaaaactctatacataccagatctttagggcactatcttatattcatcgttgcattggagtctgccatcgggatatcaagcctcaaaatctattggttaatccgcacactcaccaggttaaaatatgtgactttggaagtgcaaaagtcttggtgaaaggcgaaccaaatatatcgtacatatgttctagatattatagagcacctgagcttatatttggagcaactgaatatactacagctattgacatttggtcagttggttgtgtattggctgagcttatgcttggacagcccttgttccccggtgagagtggagttgatcagcttgttgagatcatcaaggttctgggaactccaacaagggaagagataaagtgcatgaatcctaactacacggaatttaaattcccacagattaaagcacatccatggcacaagatctttcacaagcgcatgcctccagaagctgttgatctggtatcaagactactacaatactcccctaacttgcggtgcactgctttagataccttgacccatcctttctttgatgaacttcgtgacccaaacactcgcttgccaaatggtcgtttccttccaccattgttcaattttaaatctcatgaattgaagggagtcccagttgagattttgctgaaattgattccagaacatgcaaggaagcagtgcccgtttcttggcttgtga

SEQ ID NO: 140419 - protein, 406 aa, Glycine max
MASVGVAPTSSGLRESSGVDRLPEEMNDMRIRDDKEMEATVVDGNGTETGHIIVTTIGGRNGQPKQTISYMAERIVGHGSFGVVFQAKCLETGETVAIKKVLQDKRYKNRELQTMRLLDHPNVVCLKHCFFSTTEKDELYLNLVLEYVPETVNRVIKHYNKLNQRMPLIYVKLYTYQIFRALSYIHRCIGVCHRDIKPQNLLVNPHTHQVKICDFGSAKVLVKGEPNISYICSRYYRAPELIFGATEYTTAIDIWSVGCVLAELMLGQPLFPGESGVDQLVEIIKVLGTPTREEIKCMNPNYTEFKFPQIKAHPWHKIFHKRMPPEAVDLVSRLLQYSPNLRCTALDTLTHPFFDELRDPNTRLPNGRFLPPLFNFKSHELKGVPVEILLKLIPEHARKQCPFLGL

SEQ ID NO: 140420 - DNA, 1230 bp, Glycine max
  CDS (1)..(1230)
atggcatcggcgggtgtagcacctgcttctggggtaagagatgtgaatgcaagttctgttgctgttgaaaggttgcctgatgagatgaatggcatgaaaattagggatgaaagggaaatggaagcaactgtggtagatggaaatgggactgaaacaggacatataattgttactaccattggtggtaaaaatggccagccaaagcagacaataagctacatggctgagcgagttgttggaaatggatcatttggtgtagttttccaggcaaagtgcttggagacaggggaaactgtggctataaagaaggttcttcaagacaagaggtacaagaaccgggaactgcaaaccatgcgtcttctggaccatcccaatgttgtaactttgaagcattgcttcttttcaacaactgaaaaagacgagctttatcttaatttggtacttgagtatgttcctgagactgtccaccgagttatcagacattacaacaaaatgaatcaaagaatgcctttgatatacgtgaaactctatttttaccagatatgtagagcactagcttatattcacaactgcattggagtgtctcacagggacataaaacctcaaaatttactggtcaatcctcacactcaccagctaaagatttgtgactttgggagtgcaaaagtcttggtcaaaggggaaccaaacatatcttacatctgctctaggtactatagagcacctgaacttatatttggtgcaactgagtacaccacggccattgatatttggtcagccggttgtgtacttggtgaactaatgcttggccagcctctattccctggtgagagtggagtagatcagcttgttgaaattatcaaggttttaggaaccccgacaagggaagaaatcaagtgtatgaatcctaattataccgagttcaaatttccacaaattaaagctcacccatggcataagatctttcacaagcgtttacctcctgaggctgtggatctcgtctcaaggctactgcaatactctccaaatcttcgatgcacagctctggaggccttggctcacccattctttgatgaactgcgtgatccaaatactcgcctaccaaatgggcgttaccttcccccactctttaacttcagagccaatgagcttaaaggagtgcctccagagatgctggtgaaactgattccatctcatgcaagaaagcagtgtgccttgtttgcgtcatag

SEQ ID NO: 140421 - protein, 409 aa, Glycine max
MASAGVAPASGVRDVNASSVAVERLPDEMNGMKIRDEREMEATVVDGNGTETGHIIVTTIGGKNGQPKQTISYMAERVVGNGSFGVVFQAKCLETGETVAIKKVLQDKRYKNRELQTMRLLDHPNVVTLKHCFFSTTEKDELYLNLVLEYVPETVHRVIRHYNKMNQRMPLIYVKLYFYQICRALAYIHNCIGVSHRDIKPQNLLVNPHTHQLKICDFGSAKVLVKGEPNISYICSRYYRAPELIFGATEYTTAIDIWSAGCVLGELMLGQPLFPGESGVDQLVEIIKVLGTPTREEIKCMNPNYTEFKFPQIKAHPWHKIFHKRLPPEAVDLVSRLLQYSPNLRCTALEALAHPFFDELRDPNTRLPNGRYLPPLFNFRANELKGVPPEMLVKLIPSHARKQCALFAS

SEQ ID NO: 140422 - DNA, 1698 bp, Glycine max
  CDS (1)..(1698)
atgcttcctgatcagaaaaaaaagtcatctgtagaggtggacttctttactgaatacggtgaagggagcagatacagaatagaggaagtaattggtaaaggaagctatggtgttgtctgctctgcatatgatacacacactggagaaaaggttgcaataaagaaaattaatgacatatttgaacatgtttctgatgccactcgcattcttcgcgagattaagcttcttagacttttacgccatccagatattgtggagatcaaacatattctgttgcctccttctagaagggaattcaaagatatatatgttgtcttcgaactcatggaatctgatttacatcaggtcatcaaagctaatgatgatctgacaccagaacattaccagttttttttgtatcagcttctacgaggcttgaagtatatacacacagcaaatgtttttcaccgtgatctaaagccaaaaaacattttagcaaatgctgactgcaaactgaagatttgcgactttggtcttgccagagtggctttcaatgatactcccactgctattttctggacagattatgttgcaaccaggtggtatagggctcctgagttgtgtggatcctttttttccaagtatacaccagctatagacatatggagcattggctgcatttttgcagaacttttgacgggaaaacctcttttccctgggaagaatgttgtccatcaactagaccttatgactgatcttcttggaactccatctcttgaagccattgctagggtacgaaatgagaaagctcggagatatttgagcagcatgcgaaagaagaagcctgttcctctctcgcagaagtttcctaatgcagacccccttgctcttcgtttgttagaaaaaatgttggcatttgagcctaaggatcggcctactgctgaagaggctctagcagatccatattttaaaggcctggccaaggttgagagagaaccatctgcccagccagttaccaagatagaatttgaattcgagagacgccggataacaaaggaagatgtacgagagcttatataccgagagactttggagtaccatccgaagatgttaaaagaatttctagagggagcagagccaacaggattcatgtatccaagtgctgtggatcacttcaagaaacaatttgcatatcttgaggagcattatggaaaaggtggaactgttactccacccgagaggcaacatgcatcattacctaggccatgtgtgttgtattcagataactcaagacaaaatatggctgaggttgcagatgatatctccaagtgtatcatcaaagaagttgagaagccagccatggacaggactggtggtatcccaatgaccaggcttcctttacaagctcctcaaaatattcaagttgcttcaggtgttgctgcgcggcccggaaaagttgtaggttcaatattgcattacaacaactgtggggcagcagttacagctgatgctgagcagcggaggatgggtagaaatccatctgtttcagcccagtatgctgctccaagcagttcatatccaagacgaaacccaagctgtaaaagtgagagggcagaagaagtgatcgaaggtgctaatggacttcagactaagcctcaacacataacacaaaaagttgctgctgctgctctagggggacctggtggtaattggtattga

SEQ ID NO: 140423 - protein, 565 aa, Glycine max
MLPDQKKKSSVEVDFFTEYGEGSRYRIEEVIGKGSYGVVCSAYDTHTGEKVAIKKINDIFEHVSDATRILREIKLLRLLRHPDIVEIKHILLPPSRREFKDIYVVFELMESDLHQVIKANDDLTPEHYQFFLYQLLRGLKYIHTANVFHRDLKPKNILANADCKLKICDFGLARVAFNDTPTAIFWTDYVATRWYRAPELCGSFFSKYTPAIDIWSIGCIFAELLTGKPLFPGKNVVHQLDLMTDLLGTPSLEAIARVRNEKARRYLSSMRKKKPVPLSQKFPNADPLALRLLEKMLAFEPKDRPTAEEALADPYFKGLAKVEREPSAQPVTKIEFEFERRRITKEDVRELIYRETLEYHPKMLKEFLEGAEPTGFMYPSAVDHFKKQFAYLEEHYGKGGTVTPPERQHASLPRPCVLYSDNSRQNMAEVADDISKCIIKEVEKPAMDRTGGIPMTRLPLQAPQNIQVASGVAARPGKVVGSILHYNNCGAAVTADAEQRRMGRNPSVSAQYAAPSSSYPRRNPSCKSERAEEVIEGANGLQTKPQHITQKVAAAALGGPGGNWY

SEQ ID NO: 140424 - DNA, 1119 bp, Glycine max
  CDS (1)..(1119)
atgtctgctgttgagtcagctgaacacaacaacatcagaggagtaccaactcatggtggacgctatgttcagtacaatatctatggcaatctcttcgaagtttccagaaagtatgtccctcctattcgccctgtcggtagaggtgcttatggtattgtttgcgctgctgtaaatgcagagacaggtgaggaagttgccattaagaagattggcaatgcattcgacaacagaatagatgccaaaaggaccttacgagaaattaaacttcttcggcacatggatcatgaaaatattatatccattaaagacattatacgaccaccacagagggataacttcaatgatgtgtacattgtttctgagttaatggacacagatctgcatcaaataattcgttccaatcagcaattgactgatgatcattgtcggtattttctgtatcaattgttacgaggactcaaatatgtacattcagcaaatgttttgcaccgagatctaaagcctagtaatttgctattgaatgccaattgtgaccttaagattgcggactttggtcttgctagaaccacatctgaaactgactttatgactgagtatgtggtcactagatggtaccgagctcccgaattgcttcttaattgttcagaatatacagcagccattgatatatggtctgttggttgcatacttggtgaaatcataacaagacaaccactctttcctggcaaagattatgttcatcagctgagacttatcacagagctgataggttcgccagatgatgccagccttggatttctacgaagtgataatgctcgtagatacgtaaaacagcttccgcagtatccaaaacaaaacttttctgctagatttcccaccatgtctcctggtgcggttgacttgctagagaagatgctcatctttgatccaaacaggcgtattacagttgacgaggcgttgagccacccatacatgtcacctctccatgacatcaatgaggaacctgtttgcaccagacctttcagttttgactttgagcaaccatcattcactgaagaagacatcaaggaactcatctggagagaatctgtgaagttcaatcctgctccagtctactga

SEQ ID NO: 140425 - protein, 372 aa, Glycine max
MSAVESAEHNNIRGVPTHGGRYVQYNIYGNLFEVSRKYVPPIRPVGRGAYGIVCAAVNAETGEEVAIKKIGNAFDNRIDAKRTLREIKLLRHMDHENIISIKDIIRPPQRDNFNDVYIVSELMDTDLHQIIRSNQQLTDDHCRYFLYQLLRGLKYVHSANVLHRDLKPSNLLLNANCDLKIADFGLARTTSETDFMTEYVVTRWYRAPELLLNCSEYTAAIDIWSVGCILGEIITRQPLFPGKDYVHQLRLITELIGSPDDASLGFLRSDNARRYVKQLPQYPKQNFSARFPTMSPGAVDLLEKMLIFDPNRRITVDEALSHPYMSPLHDINEEPVCTRPFSFDFEQPSFTEEDIKELIWRESVKFNPAPVY

SEQ ID NO: 140426 - DNA, 885 bp, Zea mays; identical to SEQ ID NO: 63099
  CDS (1)..(885)

SEQ ID NO: 140427 - protein, 294 aa, Zea mays; identical to SEQ ID NO: 63100

SEQ ID NO: 140428 - DNA, 981 bp, Zea mays; identical to SEQ ID NO: 63101
  CDS (1)..(981)

SEQ ID NO: 140429 - protein, 326 aa, Zea mays; identical to SEQ ID NO: 63102

SEQ ID NO: 140430 - DNA, 1197 bp, Zea mays
  CDS (1)..(1197)
atggacggcggggggcagcccccggacaccgagatgtcggaggccggcgcgggcggcggagggcagccgccgcagcagccactgccgccggtgggcgggggcgtgatgttggacaacatccaggcgacgctcagccacggcggccgcttcatccagtacaacatcttcggcaacgtgttcgaggtcaccgccaagtacaagccccccgtcctccccatcggcaagggcgcctacggcatcgtctgctcggcgctcaactccgagacggcggagcaggtggccatcaagaagatcgccaacgccttcgacaacaagatcgatgccaagcgcacgctccgcgagatcaagctgctccgccacatggaccacgagaatattgttgcaataagggatatcatacctcctgcgcagagggctgcattcaatgatgtgtatattgcatatgaattgatggatactgatctgcatcaaattattcgttcaaatcaagctttgtcagaggagcactgtcagtattttctttatcaaattcttcgtggcttgaagtatatacattcagcaaatgttcttcaccgtgacttgaagcctagcaatcttcttttgaatgcaaactgtgacctcaagatatgtgattttgggcttgctcgcaccacctcagaaactgattttatgactgaatatgttgtcacaagatggtatagagcaccagagcttttattgaactcctctgaatatactgctgccatcgatgtgtggtctgtgggctgtatatttatggaactgatggaccgcaaacccttgtttcctggaagagaccatgtccatcagctacgtcttctaatggagctcattggcacaccaaatgagggtgatcttgattttgtaaatgaaaatgcaagaagatatatccgccaacttccctgtcatgctagacagtccttccctgaaaaatttccacatgtacaacctttagcaattgacctagtggaaaagatgctaacttttgatcctagacagagaataactgttgaaggcgcacttgcacacccttacttggcatcacttcatgacataagtgatgagccagtctgctcaatgcccttcagcttcgacttcgagcagcatgcattatctgaagaacagatgaaggatctgatctaccaagaggctcttgcattcaacccagattaccagtag

SEQ ID NO: 140431 - protein, 398 aa, Zea mays
MDGGGQPPDTEMSEAGAGGGGQPPQQPLPPVGGGVMLDNIQATLSHGGRFIQYNIFGNVFEVTAKYKPPVLPIGKGAYGIVCSALNSETAEQVAIKKIANAFDNKIDAKRTLREIKLLRHMDHENIVAIRDIIPPAQRAAFNDVYIAYELMDTDLHQIIRSNQALSEEHCQYFLYQILRGLKYIHSANVLHRDLKPSNLLLNANCDLKICDFGLARTTSETDFMTEYVVTRWYRAPELLLNSSEYTAAIDVWSVGCIFMELMDRKPLFPGRDHVHQLRLLMELIGTPNEGDLDFVNENARRYIRQLPCHARQSFPEKFPHVQPLAIDLVEKMLTFDPRQRITVEGALAHPYLASLHDISDEPVCSMPFSFDFEQHALSEEQMKDLIYQEALAFNPDYQ

SEQ ID NO: 140432 - DNA, 1119 bp, Zea mays; identical to SEQ ID NO: 63103
  CDS (1)..(1119)

SEQ ID NO: 140433 - protein, 372 aa, Zea mays; identical to SEQ ID NO: 63104

SEQ ID NO: 140434 - DNA, 1110 bp, Zea mays; identical to SEQ ID NO: 63105
  CDS (1)..(1110)

SEQ ID NO: 140435 - protein, 369 aa, Zea mays; identical to SEQ ID NO: 63106

SEQ ID NO: 140436 - DNA, 1626 bp, Glycine max; identical to SEQ ID NO: 63111
  CDS (1)..(1626)

SEQ ID NO: 140437 - protein, 541 aa, Glycine max; identical to SEQ ID NO: 63112

SEQ ID NO: 140438 - DNA, 885 bp, Glycine max; identical to SEQ ID NO: 63113
  CDS (1)..(885)

SEQ ID NO: 140439 - protein, 294 aa, Glycine max; identical to SEQ ID NO: 63114

SEQ ID NO: 140440 - DNA, 1308 bp, Glycine max
  CDS (1)..(1308)
atggaaagatataaaattttgagagagcttggggatggttcttgcggtcatgtatataaagcccgcgatatgagaacatatgagattgtcgcggtcaaaaggttgaaaagaaagttttatttctgggaagaatacacaaatttaagagaagttatgatcctccgtaaaatgaatcacccaaatatcataaagttgaaagaggttgttagagaaaataatgaactatttttcatttttgaatacatggattgtaatctttatcaattaataaaggagagagaaaagcccttttcagaggaagagatacggtgctttatgaggcaagtgctacaaggacttagtcacatgcacaagaaaggattctttcatcgggatttaaaacctgagaatatgctggtaacaaatgatgttttgaaaattgctgattttggactggctagagaagtatcatcgatgcctccatatactcaatatgtttccacacggtggtatcgagctccagaagttttgttgcgagccccttgttatactcctgctgttgacatgtgggcagttggtgctatattagctgagctttttactttgacccccatatttcctggtgaaagtgaaatagatcaactgtacaaaatatacggcattcttggtatgccagattccactgctttcaccataggggaaaacaactctcagttattggacgtagttgctcatgaagttgttccacctgtgaagctttctaatattattgcgaatgctagtttggaagctatagacttgatcacacaactgttacattgggacccatcaagaaggccagatgcagatcagtcattgcaacatccatttttccatgtggatgcatgggttccttgtccgcccagtgatccacttgagctgaagctgagtagcaagagggcaaagccaaatcttgagctgaaactgcaggattttggccctgatcccgatgattgttttcttggcttgactttaggtgtaaagcctagtgtttcaaactcagatgtggtccaaaatgtatctcagggtgtcagagagaatgtgctattttgctcagatttcaatgatcattcagaccagtcagtattttggacattattatctcctgatcaaaatggaattcataactcagcagagacttcgttgtcattgtcattcagtccagttcaacatccgccaattggagttccacagtctgtgggattttcttttcagcctttgcagcctaacatcttaacctcaccatttttggctctctcttctcccttccagcgcggccactgcctttga

SEQ ID NO: 140441 - protein, 435 aa, Glycine max
MERYKILRELGDGSCGHVYKARDMRTYEIVAVKRLKRKFYFWEEYTNLREVMILRKMNHPNIIKLKEVVRENNELFFIFEYMDCNLYQLIKEREKPFSEEEIRCFMRQVLQGLSHMHKKGFFHRDLKPENMLVTNDVLKIADFGLAREVSSMPPYTQYVSTRWYRAPEVLLRAPCYTPAVDMWAVGAILAELFTLTPIFPGESEIDQLYKIYGILGMPDSTAFTIGENNSQLLDVVAHEVVPPVKLSNIIANASLEAIDLITQLLHWDPSRRPDADQSLQHPFFHVDAWVPCPPSDPLELKLSSKRAKPNLELKLQDFGPDPDDCFLGLTLGVKPSVSNSDVVQNVSQGVRENVLFCSDFNDHSDQSVFWTLLSPDQNGIHNSAETSLSLSFSPVQHPPIGVPQSVGFSFQPLQPNILTSPFLALSSPFQRGHCL

SEQ ID NO: 140442 - DNA, 1122 bp, Glycine max
  CDS (1)..(1122)
atgtctgctgttgagtcagctgaacacaacaacatcagaggagtaccaactcatggtggacgctatgttcagtacaatatctatggcaatctcttcgaagtttccagaaagtatgtccctcctattcgccctgtcggtagaggtgcttatggtattgtttgcgctgctgtaaatgcagagacaggcgaggaagttgccattaagaagattggcaatgcattcgacaacagaatagatgccaaaaggaccttacgggaaattaaacttcttcggcacatggatcatgcaaatattatgcccattaaagatattatacgtcctccacagaaggaaaacttcaatgatgtgtaccttgtttctgagttaatggacacagatctgcatcaaataattcgttccaatcagcaattgactgatgatcattgtcggtattttctgtatcaattgttacgagggctcaaatatgtacattcagcaaatgttttgcaccgagatctaaagcctagtaatttgctattgaatgccaattgtgaccttaagattgcggactttggtcttgctagaaccacatctgaaactgactttatgactgagtatgtggtcactagatggtaccgagctcccgaattgcttcttaattgttcagaatatacagcagccattgatatatggtctgttggttgcatacttggtgaaatcataacaagacaaccgctctttcctggcaaagattatgttcatcagctgagacttatcacagagctgataggttcgccagatgatgccagccttggatttctacgaagtgataatgctcgtagatacgtaaaacagcttccgcagtatccaaaacaaaacttttctgctagatttcccaccatgtctcctggtgcggttgacttgctagagaagatgctcatctttgatccaaacaggcgtattacagttgacgaggcgttgagccacccatacatgtcacctctccatgacatcaatgaggaacctgtttgcaccagacctttcagttttgactttgagcaaccatcattcactgaagaagacatcaaggaactcatctggagagaatctgtgaagttcaatcctgttccaccagtctactga

SEQ ID NO: 140443 - protein, 373 aa, Glycine max
MSAVESAEHNNIRGVPTHGGRYVQYNIYGNLFEVSRKYVPPIRPVGRGAYGIVCAAVNAETGEEVAIKKIGNAFDNRIDAKRTLREIKLLRHMDHANIMPIKDIIRPPQKENFNDVYLVSELMDTDLHQIIRSNQQLTDDHCRYFLYQLLRGLKYVHSANVLHRDLKPSNLLLNANCDLKIADFGLARTTSETDFMTEYVVTRWYRAPELLLNCSEYTAAIDIWSVGCILGEIITRQPLFPGKDYVHQLRLITELIGSPDDASLGFLRSDNARRYVKQLPQYPKQNFSARFPTMSPGAVDLLEKMLIFDPNRRITVDEALSHPYMSPLHDINEEPVCTRPFSFDFEQPSFTEEDIKELIWRESVKFNPVPPVY

SEQ ID NO: 140444 - DNA, 1692 bp, Glycine max
  CDS (1)..(1692)
atgcttcctgatcagagaaaaaagtcatctgtagaggtggacttctttactgaatacggtgaagggagcagatacagaatagaggaagtaattggtaaaggaagctatggtgttgtctgctctgcatatgatacacacactggagaaaaggttgcaataaagaaaataaatgacatatttgaacatgtttctgatgccactcgcattcttcgtgagattaagcttcttagacttttacgccatccagatattgtggagatcaaacatattctgttacctccttctagaagggaattcaaagatatatatgttgtcttcgaactcatggaatctgatttacatcaggtcatcaaagctaatgatgatctgacaccagagcattaccagttttttttgtatcagcttcttcgaggcatgaagtatattcatacagcaaatgtttttcaccgtgatctaaagccaaaaaacattttagcaaatgctgactgcaaactgaagatttgcgactttggtcttgccagagtggctttcaatgatactcccactgctattttctggacagattatgttgcaaccaggtggtatagggctcctgagttgtgtggatcctttttttccaagtatacaccagctatagacatatggagcattggctgcatttttgcagaacttttgacgggaaaacctcttttccctgggaagaatgttgtccatcaactagaccttatgactgatcttcttggaactccatctcttgaagccattgctagggtacgaaatgagaaagctcggagatatttgagcagcatgcgaaagaagaagcctgttcctctctcgcagaagtttcctaatgcagacccccttgctcttcgtttgttagaaaaaatgttggcatttgagcctaaggatcggcctactgctgaagaggctctagcggatccatattttaaaggcctggccaaggttgagagagaaccatctgctcagccagttactaagatggagtttgaatttgagagacgccggataacaaaggaagatgtacgagagcttatataccgagagattctggagtatcatccaaagatgttgaaggaatttctagagggatcagagccaacaggtttcatgtatccaagtgctgtggaccacttcaagaaacaatttgcatatcttgaggagcattacggcaaaggggggactgttactccccctgagaggcaacatgcatcattaccaagaccttgtgtattgtattcagaccactcaatgcagaatacatctgaggttgcagatgacctatccaaatgttgcatcaaagaagttgagaaacaacccatagatagcagtagtgccatccctatgtctcgacttcctttacaagcaccacaaaatattcaaggtgttgctgcaaggcctggaaaggttgtgggttcggtaatgcgttacaacaactgtggggtagccgggacggccgaggctgaacagcgtcgggtggtcaggaatccatctgtttcagctcagtacgcagcatcgagctgttcatatcctaggagaaactcaggctataaaagtgaaagggggacagaggagggtgggattgaaggttcaaatggactgcagccaaagcctcaatacatggcaagaaaagtggctgctgctcaagctggacctggtggtcagtggtattga

SEQ ID NO: 140445 - protein, 563 aa, Glycine max
MLPDQRKKSSVEVDFFTEYGEGSRYRIEEVIGKGSYGVVCSAYDTHTGEKVAIKKINDIFEHVSDATRILREIKLLRLLRHPDIVEIKHILLPPSRREFKDIYVVFELMESDLHQVIKANDDLTPEHYQFFLYQLLRGMKYIHTANVFHRDLKPKNILANADCKLKICDFGLARVAFNDTPTAIFWTDYVATRWYRAPELCGSFFSKYTPAIDIWSIGCIFAELLTGKPLFPGKNVVHQLDLMTDLLGTPSLEAIARVRNEKARRYLSSMRKKKPVPLSQKFPNADPLALRLLEKMLAFEPKDRPTAEEALADPYFKGLAKVEREPSAQPVTKMEFEFERRRITKEDVRELIYREILEYHPKMLKEFLEGSEPTGFMYPSAVDHFKKQFAYLEEHYGKGGTVTPPERQHASLPRPCVLYSDHSMQNTSEVADDLSKCCIKEVEKQPIDSSSAIPMSRLPLQAPQNIQGVAARPGKVVGSVMRYNNCGVAGTAEAEQRRVVRNPSVSAQYAASSCSYPRRNSGYKSERGTEEGGIEGSNGLQPKPQYMARKVAAAQAGPGGQWY

SEQ ID NO: 140446 - DNA, 1107 bp, Glycine max; identical to SEQ ID NO: 63115
  CDS (1)..(1107)

SEQ ID NO: 140447 - protein, 368 aa, Glycine max; identical to SEQ ID NO: 63116

SEQ ID NO: 140448 - DNA, 1176 bp, Glycine max
  CDS (1)..(1176)
atggaaggaggaggagctgctccgccggccgacaccgtgatgtccgacgcggcgcctccgccgcagcaagcgatggctatggggatcgagaatattccggcgacgctgagccacggtggcaggttcatccaatacaacatattcggaaacatattcgaagtcaccgccaaatacaagccacccatcatgcccatcggaaaaggcgcatacggcatcgtttgctcggctttgaactcggagacgaatgagcacgttgccatcaagaagattgcgaatgcgtttgataacaagattgatgcaaagaggaccctccgtgaaatcaagctgcttcgtcacatggatcatgaaaacgtggttgcaatcagggatatagtgccaccacctcaaagggagatattcaatgatgtttacattgcatatgagttgatggacactgaccttcaccaaattattcgttcaaaccaaggattatcagaggagcactgtcagtattttctgtatcaaatcctccgtgggttgaagtacatacattctgccaatgttctgcatagggacttaaaacctagcaaccttctcctgaatgccaactgtgacttaaaaatttgtgattttggactggctcgtgtcacgtctgaaactgattttatgactgaatatgttgttacaagatggtaccgtgcaccagagcttctgttgaactcttctgactacactgcagcaattgatgtatggtctgttggttgtattttcatggaactgatggatcgaaagcctttgtttcctggcagagatcacgtgcatcagttgcgtctacttatggagctgattggcaccccatcagaggctgatttggggtttctgaatgaaaatgctaagagatacattaggcaactacccctttaccgccgtcaatctttccaggaaaagtttccacatgtccatcctgaagctatagatcttgttgaaaaaatgttaacttttgatcctagaaaaaggattactgttgaagatgcactggcgcacccatacttgacatctctgcatgacatcagtgatgaacctgtgtgcttgactcccttcagctttgactttgaacaacatgctttgacggaggaacagatgaaagaactgatataccgagaggctctagcatttaaccctgagtatcagcagtag

SEQ ID NO: 140449 - protein, 391 aa, Glycine max
MEGGGAAPPADTVMSDAAPPPQQAMAMGIENIPATLSHGGRFIQYNIFGNIFEVTAKYKPPIMPIGKGAYGIVCSALNSETNEHVAIKKIANAFDNKIDAKRTLREIKLLRHMDHENVVAIRDIVPPPQREIFNDVYIAYELMDTDLHQIIRSNQGLSEEHCQYFLYQILRGLKYIHSANVLHRDLKPSNLLLNANCDLKICDFGLARVTSETDFMTEYVVTRWYRAPELLLNSSDYTAAIDVWSVGCIFMELMDRKPLFPGRDHVHQLRLLMELIGTPSEADLGFLNENAKRYIRQLPLYRRQSFQEKFPHVHPEAIDLVEKMLTFDPRKRITVEDALAHPYLTSLHDISDEPVCLTPFSFDFEQHALTEEQMKELIYREALAFNPEYQQ

SEQ ID NO: 140450 - DNA, 1107 bp, Glycine max; identical to SEQ ID NO: 63117
  CDS (1)..(1107)

SEQ ID NO: 140451 - protein, 368 aa, Glycine max; identical to SEQ ID NO: 63118

SEQ ID NO: 140452 - DNA, 945 bp, Glycine max; identical to SEQ ID NO: 63119
  CDS (1)..(945)

SEQ ID NO: 140453 - protein, 314 aa, Glycine max; identical to SEQ ID NO: 63120

SEQ ID NO: 140454 - DNA, 1116 bp, Glycine max; identical to SEQ ID NO: 63121
  CDS (1)..(1116)

SEQ ID NO: 140455 - protein, 371 aa, Glycine max; identical to SEQ ID NO: 63122

SEQ ID NO: 140456 - DNA, 1353 bp, Glycine max
  CDS (1)..(1353)
atggagaggtacaagttaattaaggaagttggtgatgggacttttgggagtgtctggagagctattaataagcaaaccggtgaagttgttgctatcaagaaaatgaagaagaaatattactcttgggaggagtgtgtaaacctgagagaagtcaagtcattacgtaaaatgaatcacccaaatattgtgaagctgaaggaagttattcgagaaagtgatatcttgtactttgtttttgagtacatggaatgcaacctataccaactcatgaaagacagggaaaaactattttctgaagctgaagttagaaattggtgttttcaagtttttcaaggtcttgcttacatgcaccagcgtggatacttccatcgtgacctgaagcctgaaaacttgctggttaccaaggatttcatcaaaatcgctgattttggactagcccgagaaatcagttcacaaccaccctacactgagtatgtctccacacgatggtatcgtgctcctgaagtgctgcttcagtcttatatgtatacctctaaagttgatatgtgggcaatgggtgctataatggctgagcttttctctcttcgtcctcttttcccaggtgccagtgaagcggatgagatttacaaaatatgtggtgtgataggcaatccaacctttgaatcatgggcggatggactcaaacttgcaagggatattaactaccagtttccacagcttgccggtgtgcatctttctgctttgattccgtctgctagtgatgatgcaatcagccttattacatcactttgctcctgggatccctgcaagaggccaacagcttcagaggctcttcaacatcctttcttccagagttgcttttacattcctccatcccttcgcaacagagcagtagcgagaactcctccacccgctggaacaagaggagcactggatcagcaaggagtcaagagatattccggtgctttacctacttcaaagctctccaataatttttcttccatgaaattacatcctcctttagcttcaggtgtgcaacggaagctggatatggtaaatcaggatggaattaagaacgaaaaaccaatgaggactactaaaccaaaatatcgtcagccaggaaaggacagcccaacttctatgaacaaagggaggtctgtacgtggggtttcagaaacagctgaaaagttgggcaatttgtctgtttccagtcgaagacaatcaatggggcaacctcgtcctcctccaccaatgaaggctggaggcaattggatttctgaatctggaaacttcatccttgggcccgcacagcagattccgactggaagaacttttgcaagaaaagttgcctga

SEQ ID NO: 140457 - protein, 450 aa, Glycine max
MERYKLIKEVGDGTFGSVWRAINKQTGEVVAIKKMKKKYYSWEECVNLREVKSLRKMNHPNIVKLKEVIRESDILYFVFEYMECNLYQLMKDREKLFSEAEVRNWCFQVFQGLAYMHQRGYFHRDLKPENLLVTKDFIKIADFGLAREISSQPPYTEYVSTRWYRAPEVLLQSYMYTSKVDMWAMGAIMAELFSLRPLFPGASEADEIYKICGVIGNPTFESWADGLKLARDINYQFPQLAGVHLSALIPSASDDAISLITSLCSWDPCKRPTASEALQHPFFQSCFYIPPSLRNRAVARTPPPAGTRGALDQQGVKRYSGALPTSKLSNNFSSMKLHPPLASGVQRKLDMVNQDGIKNEKPMRTTKPKYRQPGKDSPTSMNKGRSVRGVSETAEKLGNLSVSSRRQSMGQPRPPPPMKAGGNWISESGNFILGPAQQIPTGRTFARKVA

SEQ ID NO: 140458 - DNA, 1281 bp, Glycine max
  CDS (1)..(1281)
atggtttttgagcaacagcagttaaaagagaaaagggattcagcgaagatgacatcggttggtgtggcaccaacttcgggtttgagagaagccagtgggcatggagcagcagctgcggatagattgccagaggagatgaacgatatgaaaattagggatgatagagaaatggaagccacagttgttgatggcaacggaacggagacaggacatatcattgtgactaccattgggggtagaaatggtcagcccaagcagactataagctacatggcagagcgtgttgtagggcatggatcatttggagttgtcttccaggctaagtgcttggaaaccggtgaaactgtggctatcaaaaaggttcttcaagataagaggtacaagaaccgggagctgcaaacaatgcgccttcttgaccacccaaatgttgtcgctttgaagcactgtttcttttcaaccactgaaaaggatgaactatacctcaatttggtacttgaatatgttcctgaaacagttaatcgtgtgatcaaacattacaacaagttaaaccaaaggatgccgctgatatatgtgaaactctatacataccagatctttagggcgttatcttatattcatcgttgtattggagtctgccatcgggatatcaagcctcaaaatctattggtcaatccacacactcaccaggttaaattatgtgactttggaagtgcaaaggttttggtaaaaggcgaaccaaatatatcatacatatgttctagatactatagagcacctgagctcatatttggcgcaactgaatatacttcagccattgacatctggtctgttggatgtgttttagctgagctgctgcttggacagcctctgttccctggtgagagtggagttgatcaacttgttgagatcatcaaggttctgggcactccaacaagggaagagattaagtgcatgaaccctaattatacagaatttaaattcccacagattaaagcacatccatggcacaagatcttccataagcgcatgcctccagaggctgttgatttggtatcaagactactacaatactcccctaacttgcggtgcacagcttttgatgccttgacgcatcctttcttcgacgagcttcgtgatccaaatactcgcttgccaaatggccgattccttccaccactatttaatttcaaatcccatgaactgaaaggagtcccatctgagattttggtgaaattggttccagagcatgcaaggaagcaatgcccgtttctaggctcgtga

SEQ ID NO: 140459 - protein, 426 aa, Glycine max
MVFEQQQLKEKRDSAKMTSVGVAPTSGLREASGHGAAAADRLPEEMNDMKIRDDREMEATVVDGNGTETGHIIVTTIGGRNGQPKQTISYMAERVVGHGSFGVVFQAKCLETGETVAIKKVLQDKRYKNRELQTMRLLDHPNVVALKHCFFSTTEKDELYLNLVLEYVPETVNRVIKHYNKLNQRMPLIYVKLYTYQIFRALSYIHRCIGVCHRDIKPQNLLVNPHTHQVKLCDFGSAKVLVKGEPNISYICSRYYRAPELIFGATEYTSAIDIWSVGCVLAELLLGQPLFPGESGVDQLVEIIKVLGTPTREEIKCMNPNYTEFKFPQIKAHPWHKIFHKRMPPEAVDLVSRLLQYSPNLRCTAFDALTHPFFDELRDPNTRLPNGRFLPPLFNFKSHELKGVPSEILVKLVPEHARKQCPFLGS

SEQ ID NO: 140460 - DNA, 1551 bp, Glycine max
  CDS (1)..(1551)
atggcaattgcagccccagggcatctgaacgtgaatgaatcacccatttggggatctagaagtgttgattgcttcgagaaattggagcaaattggcgagggcacatatggtcaggtttacatggctaaagagatcaaaactggtgaaattgttgctctgaagaaaatacgaatggacaatgagagagaggggtttcctataactgccatacgagaaatcaaaattctaaagaaactacaccatgaaaatgtgatcaagctgaaggaaattgtgactgatacaggtcctgagaaagatgaacaggggaagccagatggtaacaaatataaaggtggcatctatatggtctttgaatacatggaccatgatttaacaggtcttgctgaccgacctgggatgagatttacagttccccaaattaagtgttacatgagacagcttttgactgggcttcactattgtcatgtaaatcaagtacttcatcgtgatatcaaaggctcaaatcttcttatagacaatgaaggaaatcttaagcttgcagattttggactggcacgatcattttctaatgaccaaaatgcaaatcttactaatcgtgtcattacgttatggtacagaccacctgagttgctgctaggaacaacaaagtatgggccagctgtggatatgtggtctgtagggtgcatttttgctgagcttcttcaagggaagcctatatttcctggaaaagatgagccagaacaattaaataaaatatatgagctgtgtggagcaccaaatgaagtcaattggcctggggtttccaagataccttattataataaatttatgccaacaaggccgatgaaaagacgtttgagggaagttttcaggcattttgatcatcatgctctggaattgttggagaagatgttgacacttgatccggctcagagaattactgcgaaagatgcacttgatgctgagtatttctggacagatccattaccgtgcgatcccaagagtttacccaagtacgaatcatcacatgagtttcagacaaagaaaaagcgccaacaacaacggcaaaatgaagaaatggctaagcgtcagaaaattcagcacccacagcctcacactcgtcttccccccattcagcagcctggacaacatggccaaatgcggtcaggaccaaaccaaccagttcatggttctcaaccccaagttgcggcaggacctacacatcattatgggaagccccggggtccatctggtgggccaggaagatatcctcccaatgggaacccaggtggaggatacaatcacccaaatcgaggaggtcaaggtggtggtggttatggcagtggaccttatcctcctcaagggcggggggcaccttacgggtccaatagtatgcctggtggcggtcctcgtggcggtggtgccagcggctatgttggagctccaaattatccccaacaaggtggtccatatgggggctcagcggctggtcgtggctcgaacatgatgggtggaaaccgcaatcaacaacagtatggttggcagcagtaa

SEQ ID NO: 140461 - protein, 516 aa, Glycine max
MAIAAPGHLNVNESPIWGSRSVDCFEKLEQIGEGTYGQVYMAKEIKTGEIVALKKIRMDNEREGFPITAIREIKILKKLHHENVIKLKEIVTDTGPEKDEQGKPDGNKYKGGIYMVFEYMDHDLTGLADRPGMRFTVPQIKCYMRQLLTGLHYCHVNQVLHRDIKGSNLLIDNEGNLKLADFGLARSFSNDQNANLTNRVITLWYRPPELLLGTTKYGPAVDMWSVGCIFAELLQGKPIFPGKDEPEQLNKIYELCGAPNEVNWPGVSKIPYYNKFMPTRPMKRRLREVFRHFDHHALELLEKMLTLDPAQRITAKDALDAEYFWTDPLPCDPKSLPKYESSHEFQTKKKRQQQRQNEEMAKRQKIQHPQPHTRLPPIQQPGQHGQMRSGPNQPVHGSQPQVAAGPTHHYGKPRGPSGGPGRYPPNGNPGGGYNHPNRGGQGGGGYGSGPYPPQGRGAPYGSNSMPGGGPRGGGASGYVGAPNYPQQGGPYGGSAAGRGSNMMGGNRNQQQYGWQQ

SEQ ID NO: 140462 - DNA, 1230 bp, Glycine max
  CDS (1)..(1230)
atggcatcggcgggtgtagcacctgcttctggggtaagagatgtgaatgcaagttctgttgctgttgaaaggttgcctgatgagatgaatggcatgaaaattagggatgaaagggaaatggaagcaactgtggtagatggaaatgggactgaaacaggacatataattgttactaccattggtggtaaaaatggccagccaaagcagacaataagctacatggctgagcgagttgttggaaatggatcatttggtgtagttttccaggcaaagtgcttggagacaggggaaactgtggctataaagaaggttcttcaagacaagaggtacaagaaccgggaattgcaaaccatgcgtcttctggatcaccccaatgttgtaactttgaagcattgcttcttttcaacaactgaaaaagacgagctttatcttaatttggtacttgagtatgttcctgagactgtccaccgagttatcaggcattacaacaaaatgaatcaaagaatgcctttgatatacgtgaaactctatttttaccagatatgtagagcactagcttatattcacaactgcattggagtgtctcacagggacataaaacctcaaaatttactggtcaatcctcacactcaccagctaaagatttgtgactttgggagtgcaaaagtcttggtcaaaggcgaaccaaacatatcttatatctgttctaggtactatagagcacctgagcttatatttggtgcaactgagtacaccacggccattgatatctggtcagccggttgtgtacttggtgaactattgcttggccagcctctattccctggtgagagtggagtagatcagcttgttgaaattatcaaggttttaggaaccccgacaagggaagaaatcaagtgtatgaatcctaattacaccgagttcaaatttccacaaattaaagctcatccatggcataagatatttcacaagcgtttacctcctgaggctgtggatctcgtctcaaggctactgcaatactctccaaatcttcgatgcacagctctggaggccttggctcacccattctttgatgaactgcgtgatccaaatactcgcctaccaaatgggcgttaccttcccccactctttaacttcagagccaatgagcttaaaggagtgcctccaggcatgctggtgaaactgattccatctcatgcaagaaagcagtgtgccttgtttgcgtcatag

SEQ ID NO: 140463 - protein, 409 aa, Glycine max
MASAGVAPASGVRDVNASSVAVERLPDEMNGMKIRDEREMEATVVDGNGTETGHIIVTTIGGKNGQPKQTISYMAERVVGNGSFGVVFQAKCLETGETVAIKKVLQDKRYKNRELQTMRLLDHPNVVTLKHCFFSTTEKDELYLNLVLEYVPETVHRVIRHYNKMNQRMPLIYVKLYFYQICRALAYIHNCIGVSHRDIKPQNLLVNPHTHQLKICDFGSAKVLVKGEPNISYICSRYYRAPELIFGATEYTTAIDIWSAGCVLGELLLGQPLFPGESGVDQLVEIIKVLGTPTREEIKCMNPNYTEFKFPQIKAHPWHKIFHKRLPPEAVDLVSRLLQYSPNLRCTALEALAHPFFDELRDPNTRLPNGRYLPPLFNFRANELKGVPPGMLVKLIPSHARKQCALFAS

SEQ ID NO: 140464 - DNA, 2091 bp, Glycine max
  CDS (1)..(2091)
atgggttgcatatgttctaagagttcagctatagaggacagcaaggaaagtgtcactaagaaatttcaatcgtatagcacacggccttcagagttgaatgttttacggttgaattcaactaggagggttgatgagggtggggtgaaagatgtgttaatagatggtggtcatgtgaagggttcattgattgaaaggaaggccaatggttcagggcagttgtatggtgatcatcatgatgcaaagaagaaattagagaagccggaattgactgtcgtggatcatattggccctggaagggttccaaaggctattgaaggagagcaagttgcagctggatggccggcatggctttcttctgttgctggtgaagctattaagggatggataccacggagtgcgaatacgtttgagaggttgcataaaattgggcaaggaacttacagtactgtatataaggcacgggatgtgattaaccaaaagtttgttgcattgaagaaagtacgctttgacaatcttgatcccgagagtgtcaagtttatgacaagggaaatccatgttctgcgtaggcttgaccatccaaacataattaaattggagggcttgattacatcacgaatgtctcgcagcctgtaccttgtttttgagtatatggagcatgatcttacgggacttgcatcaaatcctgatattaagttctctgaaccacagctgaaatgctacatgcagcaacttcttagtggattggatcattgccatagtcatggtgtcctccatcgtgacataaagggctcaaatcttctcattgacaataatggagtagtaaagattgctgattatggtttggcaagttcttatgaccctcaccacaatgttccattgacaagccgagtagtaactctatggtatagaccaccagaacttttacttggagccaatcattatggggttgcagtggatttatggagcactggttgcatactgggggaactatatactggaaggccaattttgcctggaaaaacggaggttgagcagttgcatcggatttttaaactttgtggctcaccatctgatgactattggcttaaattgcggttgtcacattcaacagtattcaggccgccacaccattataggaaatgtgttgcagatacatttaaggactacccatctaccgcggtaaagcttatagagaccctactttctgtagagccagcacatcgagggactgcagcagctgctctgaaaagtgagttctttacgtcagagcctctgccttgtgatccatcaagtttaccaaaatatgctcccagcaaggagattgatgctaaattacgggatgaagccagaaggcaaagagctgttggaggtagggaacaaaaagttgcctcaggagttggacaggaaaaagggcatagagcaaatgttgcaacaaaagacaatgctgacccaggcttattggtgcagcaaggacgttattccagctcaaggaaccaaagtgaattatccaaccctcatagaggaacggtgtctggaattctggttttccctcacaaacagtcagaaaaagaaatggataataatttctctgggcatatctataagaggccttcacattccggcccattggttcctggttctgtctgggcaaaaggcaggaaggaagttgatgatgtacctcctgtttcaaacagagtgaacctatcaaaactatctgggctagtggcatctaggactttgcctgaagatcaggaggttaaaccggttcacttgcaccacagaaaaccaattgaagtaagaaaatctgtggagtcaactaatggatcagagtcaagaagaaggcaggatcaaaaacggattgttgatctcaatcaaattgaaagtagaagggtcgcggctgaaaaatcaactccgggcgggcgcgagtccatgggaaacaagatatacctctcaggtccattaatggtttcgtcaagcaacatggatcagatgctcaaagatcatgacagaaagatccaagagttttcaagacgagcgagaatcgacaagtcaagagcaagaggtgagaaagttcgtgctctgcggaagtag

SEQ ID NO: 140465 - protein, 696 aa, Glycine max
MGCICSKSSAIEDSKESVTKKFQSYSTRPSELNVLRLNSTRRVDEGGVKDVLIDGGHVKGSLIERKANGSGQLYGDHHDAKKKLEKPELTVVDHIGPGRVPKAIEGEQVAAGWPAWLSSVAGEAIKGWIPRSANTFERLHKIGQGTYSTVYKARDVINQKFVALKKVRFDNLDPESVKFMTREIHVLRRLDHPNIIKLEGLITSRMSRSLYLVFEYMEHDLTGLASNPDIKFSEPQLKCYMQQLLSGLDHCHSHGVLHRDIKGSNLLIDNNGVVKIADYGLASSYDPHHNVPLTSRVVTLWYRPPELLLGANHYGVAVDLWSTGCILGELYTGRPILPGKTEVEQLHRIFKLCGSPSDDYWLKLRLSHSTVFRPPHHYRKCVADTFKDYPSTAVKLIETLLSVEPAHRGTAAAALKSEFFTSEPLPCDPSSLPKYAPSKEIDAKLRDEARRQRAVGGREQKVASGVGQEKGHRANVATKDNADPGLLVQQGRYSSSRNQSELSNPHRGTVSGILVFPHKQSEKEMDNNFSGHIYKRPSHSGPLVPGSVWAKGRKEVDDVPPVSNRVNLSKLSGLVASRTLPEDQEVKPVHLHHRKPIEVRKSVESTNGSESRRRQDQKRIVDLNQIESRRVAAEKSTPGGRESMGNKIYLSGPLMVSSSNMDQMLKDHDRKIQEFSRRARIDKSRARGEKVRALRK

SEQ ID NO: 140466 - DNA, 1230 bp, Glycine max
  CDS (1)..(1230)
atggcatcggcgggtgtagcacctgcttctggagtaagagatgtgaatgcaaattcggttgctgttgaaaggttgcctgatgagatgaatggcatgaaaattagggatgaaagggaaatggaagcaactgtggtagatggaaatgggactgaaacaggacatataattgttactaccattggtggtaaaaatggccagccaaagcagacaataagctatatggctgagcgagttgttggaaatggatcatttggtgtagttttccaggcaaagtgcttggagacaggggaaactgtggctataaagaaggttcttcaagacaagagatacaagaaccgggaactgcaaaccatgcgtcttctggaccatcccaatgttgtaactttgaagcattgtttcttttcaacaactgaaaaagacgagctttatcttaatttggtacttgagtatgttcctgagactgtccaccgagttatcagacattacaacaaaatgaatcaaagaatgcctttgatatatgtgaaactctatttttaccagatatgtagagctctagcttatattcacaactgtattggagtgtctcacagggacataaaacctcaaaatttactggtcaatcctcacactcaccagctaaagatttgtgactttgggagtgcaaaagtcttggtcaaaggggaaccaaacatatcttacatctgctctaagtactatacagcacctgaacttacatctggtgcaactgagtacaccacggccattgatatttggtcacctggttgtgtacatggtgaactaatgcgtggccagcctctattcccgggtgagagtggagtacatcagcttgttgaaattatcaaggttttaggtaccccaacaagggaagaaatcaagtgcatgaatcctaattataccgagtccaaatttccacaaattaaagctcacccatggcacaagatctttcacaagcgcttacctcctgaggctgtggatctcgtctcaaggctactgcaatactctccaaatcttcgatgcacagctctggaggccttggttcatccattctttgatgaactgcgtgatccaaatacccgcctaccaaatgggcgttaccttcccccactctttaacttcagagccaatgagcttaaaggagtgcctccaggcatgctggtgaaactgattccatctcatgcaagaaagcagtgtgccttgtttgcgtcatag

SEQ ID NO: 140467 - protein, 409 aa, Glycine max
MASAGVAPASGVRDVNANSVAVERLPDEMNGMKIRDEREMEATVVDGNGTETGHIIVTTIGGKNGQPKQTISYMAERVVGNGSFGVVFQAKCLETGETVAIKKVLQDKRYKNRELQTMRLLDHPNVVTLKHCFFSTTEKDELYLNLVLEYVPETVHRVIRHYNKMNQRMPLIYVKLYFYQICRALAYIHNCIGVSHRDIKPQNLLVNPHTHQLKICDFGSAKVLVKGEPNISYICSKYYTAPELTSGATEYTTAIDIWSPGCVHGELMRGQPLFPGESGVHQLVEIIKVLGTPTREEIKCMNPNYTESKFPQIKAHPWHKIFHKRLPPEAVDLVSRLLQYSPNLRCTALEALVHPFFDELRDPNTRLPNGRYLPPLFNFRANELKGVPPGMLVKLIPSHARKQCALFAS

SEQ ID NO: 140468 - DNA, 1122 bp, Glycine max
  CDS (1)..(1122)
atgtctgttgtcgagtcaggtgaacacaacaacatcagaggagtaccaactcatggtggacgctatgttcagtacaatatctatggcaatctctttgaagtttccagaaagtatgtccctcctattcgccctgtgggtagaggcgcttatggtattgtttgcgctgctgtaaatgcagagacaggtgaggaagttgccattaagaagattggcaatgcatttgacaacagaatagatgccaaaaggaccttacgagaaattaaacttcttcggcacatggatcatgcaaatattatgtccattaaagatattatacgtcctccacagaaggaaaacttcaatgatgtgtaccttgtttctgagttaatggacacagatctgcatcaaataatacgttccaatcagcaattgactgatgatcattgtcggtattttctgtatcaattgttacgagggctcaaatatgtacattcagcaaatgttttgcaccgtgatctaaagcctagtaatttgctattgaatgccaattgtgaccttaagattgcggactttggtcttgctagaaccacatctgaaactgactttatgactgagtatgtggtcactagatggtaccgagctcccgaattgcttcttaattgttcagaatatacagcagccattgatatatggtctgttggttgcatacttggtgaaatcataacaagacaaccgctctttcctggcaaagattatgttcatcagctgagacttatcacagagctgataggttcgccagatgatgccagccttggatttctacgaagtgataatgctcgtagatacgtaaaacagcttccgcagtatccaaaacaaaacttttctgctagatttcccaccatgtctcctggtgcggttgacttgctagagaagatgctcatctttgatccaaacaggcgtattacagttgacgaggcgttgagccacccatacatgtcacctctccatgacatcaatgaggaacctgtttgcaccagacctttcagttttgactttgagcaaccatcattcactgaagaagacatcaaggaactcatctggagagaatctgtgaagttcaatcctgcaaccatatatgtttag

SEQ ID NO: 140469 - protein, 373 aa, Glycine max
MSVVESGEHNNIRGVPTHGGRYVQYNIYGNLFEVSRKYVPPIRPVGRGAYGIVCAAVNAETGEEVAIKKIGNAFDNRIDAKRTLREIKLLRHMDHANIMSIKDIIRPPQKENFNDVYLVSELMDTDLHQIIRSNQQLTDDHCRYFLYQLLRGLKYVHSANVLHRDLKPSNLLLNANCDLKIADFGLARTTSETDFMTEYVVTRWYRAPELLLNCSEYTAAIDIWSVGCILGEIITRQPLFPGKDYVHQLRLITELIGSPDDASLGFLRSDNARRYVKQLPQYPKQNFSARFPTMSPGAVDLLEKMLIFDPNRRITVDEALSHPYMSPLHDINEEPVCTRPFSFDFEQPSFTEEDIKELIWRESVKFNPATIYV

SEQ ID NO: 140470 - DNA, 1116 bp, Glycine max
  CDS (1)..(1116)
atggccggagttaatccgaacggcgtcgccgattttccggcgactccaacgcacggcggacagttcattcagtacaacatattcggaaacctcttcgaggttacggcgaagtaccgtcctccgatcatgcctgtcggacgcggcgcgtatggaatcgtttgctcgctgttgaataccgagacgaatgagctggtggcggttaagaagatagcgaacgctttcgacaatcacatggacgctaagcgtacgcttcgtgagattaagcttcttaggcatttggatcatgaaaatgtaattggtttgagagatgtaattcctccacccttgcgtagagagtttaatgatgtctacatagccactgaactcatggatactgatcttcaccatatcattcgctccaatcaaaatctgtcagaggagcactctcaatacttcttgtaccagattcttcgtgggcttaagtatatacattctgcaaacgtaatccatagagatttaaaaccaagcaacctgctgctaaactcaaattgtgacttgaagattattgattttggtcttgcgagaccaactttggaaagtgacttcatgacagaatatgtagtcacaagatggtacagagctcccgaattgttgttgaattcctctgattacacctctgctatagatgtgtggtctgttggttgcatctttatggagcttatgaataaaaagcctctgtttccgggcaaagaccatgtgcatcagatgcgcttattgacagagcttcttggcaccccaactgaggctgaccttgggttagtgaaaaatgaagatgcaagaagatatatcagacaacttcctcaatatcctcgccaacctttagctcaagtcttcccccatgttcatccggcagccattgatcttgttgataaaatgttgacagttgatcccaccaaaagaattacagttgaagaagcactagcccatccataccttgaaaaactgcatgatgtagctgatgaaccaatctgcatggagccattttcatttgattttgagcaacaacaattggatgaagagcaaataaaagagatgatctacagggaagcattagcactcaatcctgagtatgcttaa

SEQ ID NO: 140471 - protein, 371 aa, Glycine max
MAGVNPNGVADFPATPTHGGQFIQYNIFGNLFEVTAKYRPPIMPVGRGAYGIVCSLLNTETNELVAVKKIANAFDNHMDAKRTLREIKLLRHLDHENVIGLRDVIPPPLRREFNDVYIATELMDTDLHHIIRSNQNLSEEHSQYFLYQILRGLKYIHSANVIHRDLKPSNLLLNSNCDLKIIDFGLARPTLESDFMTEYVVTRWYRAPELLLNSSDYTSAIDVWSVGCIFMELMNKKPLFPGKDHVHQMRLLTELLGTPTEADLGLVKNEDARRYIRQLPQYPRQPLAQVFPHVHPAAIDLVDKMLTVDPTKRITVEEALAHPYLEKLHDVADEPICMEPFSFDFEQQQLDEEQIKEMIYREALALNPEYA

SEQ ID NO: 140472 - DNA, 1143 bp, Glycine max
  CDS (1)..(1143)
atggctgaggataaggagatgtctacctctgtcatcaatgggaatgattccctaactggtcacatcatatctacaactattggaggcaaaaatggggaacccaaacagactattagctacatggcagaacgggttgtaggaactggatcatttggaatcgttttccaggcaaaatgcttggaaactggggaggcagtggcaattaaaaaggttttacaagacagaagatacaagaatcgtgaactgcagttaatgcgtgtgatggatcatccaaatgtgatctctttgaagcattgtttcttttcaactacaagtacagatgaactttttctcaatttggtgatggagtatgttccagagtccatgtatagagtcttaaagcactatagcaatgctaatcaaagaatgccaatcatctacgtaaaactttatatgtaccagattttcagggggttggcttacatccacactggtcccaaagtttgccacagagatttgaagcctcaaaatatactggtggatcctcttacacaccaagtgaagctatgtgattttggaagtgcaaaagttctagtcgaaggtgaagctaatatatcatacatatgttcacgattctatcgagcaccagaacttatatttggggccacagagtataccagttcgattgatatttggtcagctggctgtgttcttgctgaacttcttttgggccagccattattccctggcgaaaatgcagtagaccagcttgtacatattataaaggtgcttggcacacccacccgagaggaagtacgctgtatgaatcccaattacaatgactttaggtttccacagataaaagcacacccatggcacaagatattccacaaaaagatgcctccagaagctattgatcttgcatcccggcttttgcaatactccccaagtctccggtgcactgcgcttgaagcatgtgcacatcctttctttgatgaacttcgtgaacctaatgctcgcttgccaaatggtcgtccatttccccctctatttaacttcaaacaggaattatctggagcatcttccgagcttgttaataagttgatacctgaccatgtgaagcggcaaatggggatacagtttatgcatctgggaggatcgtga

SEQ ID NO: 140473 - protein, 380 aa, Glycine max
MAEDKEMSTSVINGNDSLTGHIISTTIGGKNGEPKQTISYMAERVVGTGSFGIVFQAKCLETGEAVAIKKVLQDRRYKNRELQLMRVMDHPNVISLKHCFFSTTSTDELFLNLVMEYVPESMYRVLKHYSNANQRMPIIYVKLYMYQIFRGLAYIHTGPKVCHRDLKPQNILVDPLTHQVKLCDFGSAKVLVEGEANISYICSRFYRAPELIFGATEYTSSIDIWSAGCVLAELLLGQPLFPGENAVDQLVHIIKVLGTPTREEVRCMNPNYNDFRFPQIKAHPWHKIFHKKMPPEAIDLASRLLQYSPSLRCTALEACAHPFFDELREPNARLPNGRPFPPLFNFKQELSGASSELVNKLIPDHVKRQMGIQFMHLGGS

SEQ ID NO: 140474 - DNA, 1221 bp, Glycine max
  CDS (1)..(1221)
atggcttcagttggtgtggcaccaacatcatcaggcttgagagaatccagtggtgttgataggttgccagaggagatgaatgatatgagaattagggatgataaagaaatggaagccaccgttgtcgatggtaacggaacagagaccggacatattattgttactaccattgggggtagaaatggtcaaccgaagcagactataagctatatggcagagcggattgttggacatggatcatttggggttgtcttccaggctaaatgcttggagactggtgaaactgtggctatcaaaaaagttcttcaagacaagaggtataaaaaccgggagctgcaaacaatgcgccttcttgaccacccaaatgttgtctgtttgaagcattgtttcttttcaaccactgaaaaggatgaactataccttaatttggtacttgagtatgttcctgaaacagttaatcgtgtgatcaaacattacaacaagttgaaccaacggatgcctctgatatatgtaaaactctatacataccagatctttagggcactatcttatattcatcgttgcattggagtctgccatcgggatatcaagcctcaaaatctattggttaatccgcacactcaccaggttaaaatatgtgactttggaagtgcaaaagtcttggtgaaaggcgaaccaaatatatcgtacatatgttctagatattatagagcacctgagcttatatttggagcaactgaatatactacagctattgacatttggtcagttggctgtgtattggctgagcttatgcttggacagcccttgttccccggtgagagtggagttgatcagcttgttgagatcatcaaggttctgggaactccaacaagggaagagataaagtgcatgaatcctaactatacagaatttaaattcccacagattaaagcacatccatggcacaagatctttcacaagcgcatgcctccagaagctgttgatttggtatcaagactactacaatactcccctaacttgcggtgcacagctttagatgccttgacgcatcctttctttgatgaacttcgtgatccaaattctcgcttgccaaatggccgattccttccaccactatttaatttcaaatcccatgaactgaaaggtgtcccagctgagattttggtgaaattggttccagagcatgcaaggaagcaatgcccgtttcttggcttgtga

SEQ ID NO: 140475 - protein, 406 aa, Glycine max
MASVGVAPTSSGLRESSGVDRLPEEMNDMRIRDDKEMEATVVDGNGTETGHIIVTTIGGRNGQPKQTISYMAERIVGHGSFGVVFQAKCLETGETVAIKKVLQDKRYKNRELQTMRLLDHPNVVCLKHCFFSTTEKDELYLNLVLEYVPETVNRVIKHYNKLNQRMPLIYVKLYTYQIFRALSYIHRCIGVCHRDIKPQNLLVNPHTHQVKICDFGSAKVLVKGEPNISYICSRYYRAPELIFGATEYTTAIDIWSVGCVLAELMLGQPLFPGESGVDQLVEIIKVLGTPTREEIKCMNPNYTEFKFPQIKAHPWHKIFHKRMPPEAVDLVSRLLQYSPNLRCTALDALTHPFFDELRDPNSRLPNGRFLPPLFNFKSHELKGVPAEILVKLVPEHARKQCPFLGL

SEQ ID NO: 140476 - DNA, 1122 bp, Glycine max
  CDS (1)..(1122)
atgtctgctgttgagtcagctgaacacaacaacatcagaggagtaccaactcatggtggacgctatgttcagtacaatatctatggcaatctctttgaagtttccagaaagtatgtccctcctattcgccctgtcggtagaggtgcttatggtattgtttgcgctgctgtaaatgcagagacaggtgaggaagttgccattaagaagattggcaatgcatttgacaacagaatagatgccaaaaggaccttacgagaaattaaacttcttcggcacatggatcatgcaaatattatgtccattaaagatattatacgtcctccacagaaggaaaacttcaatgatgtgtaccttgtttctgagttaatggacacagatctgcatcaaataatacgttccaatcagcaattgactgatgatcattgtcggtattttctgtatcaattgttacgagggctcaaatatgtacattcagcaaatgttttgcaccgagatctaaagcctagtaatttgctattgaatgccaattgtgaccttaagattgcggactttggtcttgctagaaccacatctgaaactgactttatgactgagtatgtggtcactagatggtaccgagctcccgaattgcttcttaattgttcagaatatacagcagccattgatatatggtctgttggttgcatacttggtgaaatcataacaagacaaccgctctttcctggcaaagattatgttcatcagctgagacttatcacagagctgataggttcgccagatgatgccagccttggatttctacgaagtgataatgctcgtagatacgtaaaacagcttccgcagtatccaaaacaaaacttttctgctagatttcccaccatgtctcctggtgcggttgacttgctagagaagatgctcatctttgatccaaacaggcgtattacagttgacgaggcgttgagccacccatacatgtcacctctccatgacatcaatgaggaacctgtttgcaccagacctttcagttttgactttgagcaaccatcattcactgaagaagacatcaaggaactcatctggagagaatctgtgaagttcaatcctgcaaccatatatgtttag

SEQ ID NO: 140477 - protein, 373 aa, Glycine max
MSAVESAEHNNIRGVPTHGGRYVQYNIYGNLFEVSRKYVPPIRPVGRGAYGIVCAAVNAETGEEVAIKKIGNAFDNRIDAKRTLREIKLLRHMDHANIMSIKDIIRPPQKENFNDVYLVSELMDTDLHQIIRSNQQLTDDHCRYFLYQLLRGLKYVHSANVLHRDLKPSNLLLNANCDLKIADFGLARTTSETDFMTEYVVTRWYRAPELLLNCSEYTAAIDIWSVGCILGEIITRQPLFPGKDYVHQLRLITELIGSPDDASLGFLRSDNARRYVKQLPQYPKQNFSARFPTMSPGAVDLLEKMLIFDPNRRITVDEALSHPYMSPLHDINEEPVCTRPFSFDFEQPSFTEEDIKELIWRESVKFNPATIYV

SEQ ID NO: 140478 - DNA, 1413 bp, Glycine max
  CDS (1)..(1413)
atgaatatgatgcgaaggttgaagagcattgcttctgggaggacttccatttcttcagatcctggaggggattctaactcaaaaagagccaagtttgaaccagaaactgaagggaaggctgatgagaaaacaaataccattgaaacaatctgcacagatcaggaacagcctatagacacatcaaaagaaacttccaatgtaggcacatccgatgtatctacagtagctagaactgagaagtcaggtttcgatgagcttcctaaagaattaaatgaaatgaaaattagagatgagaaaagcaaaaacaacaatgaaaaggatatagaagctactgtagtgagtggtaatggaacagaaacaggacaaataattacaactgccattggtggtcgagatggacaaccaaagcagacaatctcttacatggctgaacgtgtggttgggactggttcttttggtgttgtttttcaggctaagtgccttgaaactggtgaatctgttgccataaagaaggtgttgcaagacaggagatataagaatagggaactccaggttatgcgcacagttgaccatcctaatgttgtcaaactaaagcactacttcttttcaactaccgataaagatgaattgtaccttaacctggttttggagtatgtacctgaaactgtctacaaagtttcaaaacactatgttaggatgcaccaacacatgcctatcatttatgtgcaactttatacctaccagatatgtcgtgcgttaaattatttacatcaagtgattggtgtttgtcatcgtgacatcaaaccccagaacctattggtaaatccgcagacacatcagttaaagatatgtgattttgggagcgcaaaggtgttggttcctggtgaacccaacatatcgtacatttgctctcgatattatagagctccagaacttatatttggggctactgaatacacaattgctattgatatgtggtctgttggttgtgttttagctgaactactcctaggacagccattgtttcctggagagagtggggttgatcagttagttgagatcattaaggtcttgggaacacccaccagagaagaaataaggtgcatgaatccaaactacaatgaatttaagtttcctcagattaaagctcacccatggcacaaggtttttcacaagagaatgccgcctgaagccgtggatcttgtgtcaaggctgctgcaatattcaccaaatctacgttgcaccgctttggctgcatgtgcgcatcccttcttcaatgatctgcgggacccaaatgcatgcttgcctaatgggcgacctctacctcctttgttcaacttcacatctcaagaactggctaatgcacctgaagagttgcgccaacgcctcattcctgagcatgcaaggagttga

SEQ ID NO: 140479 - protein, 470 aa, Glycine max
MNMMRRLKSIASGRTSISSDPGGDSNSKRAKFEPETEGKADEKTNTIETICTDQEQPIDTSKETSNVGTSDVSTVARTEKSGFDELPKELNEMKIRDEKSKNNNEKDIEATVVSGNGTETGQIITTAIGGRDGQPKQTISYMAERVVGTGSFGVVFQAKCLETGESVAIKKVLQDRRYKNRELQVMRTVDHPNVVKLKHYFFSTTDKDELYLNLVLEYVPETVYKVSKHYVRMHQHMPIIYVQLYTYQICRALNYLHQVIGVCHRDIKPQNLLVNPQTHQLKICDFGSAKVLVPGEPNISYICSRYYRAPELIFGATEYTIAIDMWSVGCVLAELLLGQPLFPGESGVDQLVEIIKVLGTPTREEIRCMNPNYNEFKFPQIKAHPWHKVFHKRMPPEAVDLVSRLLQYSPNLRCTALAACAHPFFNDLRDPNACLPNGRPLPPLFNFTSQELANAPEELRQRLIPEHARS

SEQ ID NO: 140480 - DNA, 885 bp, Glycine max; identical to SEQ ID NO: 63123
  CDS (1)..(885)

SEQ ID NO: 140481 - protein, 294 aa, Glycine max; identical to SEQ ID NO: 63124

SEQ ID NO: 140482 - DNA, 1353 bp, Glycine max
  CDS (1)..(1353)
atggagaggtacaagttaattaaggaagtaggtgatggaacatttgggagtgtttggagagccattaataagcaaagtggtgaagttgttgcaatcaagaaaatgaaaaagaaatattactcttgggaggagtgtgtaaacctgagagaagtcaagtcattacggaaaatgaatcatgcaaatattgtgaagctgaaggaagttatacgagaatgtgacactctgtgccttgtttttgagtacatggaatacaacctgtaccaacttatgaaaaacagggaaaagctgttttctgaaaatgaagttagaaattggtgttttcaagttttccaaggtttagcttacatgcaccagcgtggatactttcatcgtgatcttaagcctgaaaacttgctggtcaccaaagatgtcatcaagattgctgattttggcctagccagagagatcagttcactaccaccctatactgagtatgtctccacacggtggtatcgtgctcctgaagtcctgcttcagtcccatctatatagctctaaagttgatatgtgggcaatgggtgctataatggctgagttgttcactctccgtcctctattccccggttccagtgaagcagatgagatttacaaaatatgcagtgtgctaggtagtccaaccactgaatcttgggcagatggactcaaacttgccagggatatcaactatcagtttccacagcttgctggtgtacatctctctacactgatcccatccagaagcgatgatgcaatcagccttgtgacgtcactttgttcatgggatccctgcaagagaccaactgcagcagaggttcttcaacatcctttttttcagagttgcttttacatccctccatcccttcgcaccagagctgtaaccagaactccaccatctgctgggaccaggggatcactggatcggctgggcctcaagagatactctggtgctttgcctaatacaaaaatcaccaacaattttacttccccaaaagtacaagcttctatagcttcaggtgtgcaaaggaagctggatatggcaaatgaggatggaattaagagcaagaaatcattgaagactactcaacaatcaaaatatcgattaccaggaaaaggcagcccaacttctataaacaaggggaggactgcacgtggggtttcagaaacagctgagaagttggtcaatatgtcaatcggtactcgaagactgtccttgggacaaacccgtccgcctcccatgaaggctggagtcaattggatttctgaatctggaaacttgctcaggtccggacaacaaattccaactgaaagaactttgacaagaaaagttgccgggtga

SEQ ID NO: 140483 - protein, 450 aa, Glycine max
MERYKLIKEVGDGTFGSVWRAINKQSGEVVAIKKMKKKYYSWEECVNLREVKSLRKMNHANIVKLKEVIRECDTLCLVFEYMEYNLYQLMKNREKLFSENEVRNWCFQVFQGLAYMHQRGYFHRDLKPENLLVTKDVIKIADFGLAREISSLPPYTEYVSTRWYRAPEVLLQSHLYSSKVDMWAMGAIMAELFTLRPLFPGSSEADEIYKICSVLGSPTTESWADGLKLARDINYQFPQLAGVHLSTLIPSRSDDAISLVTSLCSWDPCKRPTAAEVLQHPFFQSCFYIPPSLRTRAVTRTPPSAGTRGSLDRLGLKRYSGALPNTKITNNFTSPKVQASIASGVQRKLDMANEDGIKSKKSLKTTQQSKYRLPGKGSPTSINKGRTARGVSETAEKLVNMSIGTRRLSLGQTRPPPMKAGVNWISESGNLLRSGQQIPTERTLTRKVAG

SEQ ID NO: 140484 - DNA, 1836 bp, Glycine max
  CDS (1)..(1836)
atgcagcaagatcacaggaaaaagagttcagctgagatggactttttctccgaatatggtgatgccaaccggtacaaaattcaagaagtcattgggaagggaagttatggtgttgtctgttcagccattgacactcacacaggtgaaaaagtggcaattaagaagattcatgacatcttcgagcatatatccgatgctgctcgtattctccgtgagataaagctgcttagacttctacgacatcctgatattgttgaaataaaacacattatgctgcctccgtcaaggaaggactttaaagatatttacgttgtttttgagctcatggagtctgatcttcatcaagtcattaaagccaatgatgacttgacaaaagaacactatcaattttttctttatcaattacttcgagcactgaagtacattcacaccgcaaatgtctatcatcgagatctgaagccaaagaatatactggcaaatgcaaactgtaagcttaaaatctgtgattttgggttagctagagttgccttcagtgacacaccaacaactatattttggacggattatgttgctacaaggtggtatagagcaccagaactctgtggatcattttactcaaggtatactccagcaattgacatttggagtataggttgcatatttgctgaagtattaataggaaagcctcttttccctgggaaaaatgttgtccatcagttggatctgatgacagatttgcttggcactccctcgctggatgctatatccaaggtacgcaatgataaggcacggagatacctgactagtatgaggaaaaaacaacctataccatttgcacaaaaatttcctaatgctgatcctttagcactacgactactggaaaggttgcttgcctttgatccaaaagaccggcctactgctgaagaggcattagctgatccttacttcaagagactttcaaagattgagagggaaccatcttgccagcctattacaaaaatggagtttgaattcgaaaggagaagagtcacaaaggaagaaattggagagttaattttccgtgagattctagagtaccatcctcaattattgaaagactacataaatggaacagagagaactaattttctttatccaagtgctgttgatcagttcaaacagcagttttctcatctcgaggaaaatggtggtaaaagttatccaattatgccacttgaaagaaagcatgcatcacttccaaggtcaacaatggtacattcaaatatggtaccctcgaaagagcaatcaaacattgcttcctgcataaaccggcagacaactggggaatttaataataattccagggatacagaaagtcctgcgccaaggtctattccgggtctgcaaaaattttcacaagcaaaacctggaaaagttgttgggccagtgattccatacgaatatgcaagtgttgtcaagggtacatatgatccaaggacatttatgagaggttctgttcttccttctcaacctatcctccctacgaatcattatcaacgatcaacctctggaaaacaagaaaggtcagcaacagaagctgacaagggtgtatctttacaatcaaaacttgctcagcaatgtggtgtgaatgccaaaatagcaccagacacagctatcaatattgacaccaacccttttttcatgacacgagcaggagtgaacaagatagagcaggatgaccgaatagccattgagacaaagttgctgcagtcaaaggctcatcaatatggtgggattagtaccactgctcatagaaaggttggacctgttcagtatggcatgacaaggttgttctag

SEQ ID NO: 140485 - protein, 611 aa, Glycine max
MQQDHRKKSSAEMDFFSEYGDANRYKIQEVIGKGSYGVVCSAIDTHTGEKVAIKKIHDIFEHISDAARILREIKLLRLLRHPDIVEIKHIMLPPSRKDFKDIYVVFELMESDLHQVIKANDDLTKEHYQFFLYQLLRALKYIHTANVYHRDLKPKNILANANCKLKICDFGLARVAFSDTPTTIFWTDYVATRWYRAPELCGSFYSRYTPAIDIWSIGCIFAEVLIGKPLFPGKNVVHQLDLMTDLLGTPSLDAISKVRNDKARRYLTSMRKKQPIPFAQKFPNADPLALRLLERLLAFDPKDRPTAEEALADPYFKRLSKIEREPSCQPITKMEFEFERRRVTKEEIGELIFREILEYHPQLLKDYINGTERTNFLYPSAVDQFKQQFSHLEENGGKSYPIMPLERKHASLPRSTMVHSNMVPSKEQSNIASCINRQTTGEFNNNSRDTESPAPRSIPGLQKFSQAKPGKVVGPVIPYEYASVVKGTYDPRTFMRGSVLPSQPILPTNHYQRSTSGKQERSATEADKGVSLQSKLAQQCGVNAKIAPDTAINIDTNPFFMTRAGVNKIEQDDRIAIETKLLQSKAHQYGGISTTAHRKVGPVQYGMTRLF

SEQ ID NO: 140486 - DNA, 1281 bp, Glycine max
  CDS (1)..(1281)
atggtttttgagcaacagcagttaaaagagaaaagggattcagcgaagatgacatcggttggtgtggcaccaacttcgggtttgagagaagccagtgggcatggagcagcagctgcggatagattgccagaggagatgaacgatatgaaaattagggatgatagagaaatggaagccacagttgttgatggcaacggaacggagacaggacatatcattgtgactaccattgggggtagaaatggtcagcccaagcagactataagctacatggcagagcgtgttgtagggcatggatcatttggagttgtcttccaggctaagtgcttggaaaccggtgaaactgtggctatcaaaaaggttcttcaagataagaggtacaagaaccgggagctgcaaacaatgcgccttcttgaccacccaaatgttgttgctttgaagcactgtttcttttcaaccactgaaaaggatgaactatacctcaatttggtacttgaatatgttcctgaaacagttaatcgggtgataaaacattacaacaagttgaaccaaaggatgccactgatatatgtgaaactctatacataccagatctttagggcattatcttatattcatcgttgtattggagtctgccatcgggatatcaagcctcaaaatctattggtcaatccacacactcaccaggttaaattatgtgactttggaagtgcaaaggttttggtaaaaggtgaaccaaatatatcatacatatgttctagatactatagagcacctgagctcatatttggcgcaactgaatatactacagccattgacgtctggtctgttggatgtgttttagctgagctgctgcttggacagcctctgttccctggtgagagtggagttgatcaacttgttgagatcatcaaggttctgggcactccaacaagggaagagattaagtgcatgaaccctaattatacagaatttaaattcccacagattaaagcacatccatggcacaagatcttccataagcgcatgcctccagaggctgttgatttggtatcaagactactacaatactcccctaacttgcggtgcacagcttttgatgccttgacgcatcctttcttcgacgagcttcgtgatccaaatactcgcttgccaaatggccgattccttccaccactatttaatttcaaatcccatgaactgaaaggagtcccatctgagattttggtgaaattggttccagagcatgcaaggaagcaatgcccgtttctaggctcgtga

SEQ ID NO: 140487 - protein, 426 aa, Glycine max
MVFEQQQLKEKRDSAKMTSVGVAPTSGLREASGHGAAAADRLPEEMNDMKIRDDREMEATVVDGNGTETGHIIVTTIGGRNGQPKQTISYMAERVVGHGSFGVVFQAKCLETGETVAIKKVLQDKRYKNRELQTMRLLDHPNVVALKHCFFSTTEKDELYLNLVLEYVPETVNRVIKHYNKLNQRMPLIYVKLYTYQIFRALSYIHRCIGVCHRDIKPQNLLVNPHTHQVKLCDFGSAKVLVKGEPNISYICSRYYRAPELIFGATEYTTAIDVWSVGCVLAELLLGQPLFPGESGVDQLVEIIKVLGTPTREEIKCMNPNYTEFKFPQIKAHPWHKIFHKRMPPEAVDLVSRLLQYSPNLRCTAFDALTHPFFDELRDPNTRLPNGRFLPPLFNFKSHELKGVPSEILVKLVPEHARKQCPFLGS

SEQ ID NO: 140488 - DNA, 1116 bp, Glycine max; identical to SEQ ID NO: 63125
  CDS (1)..(1116)

SEQ ID NO: 140489 - protein, 371 aa, Glycine max; identical to SEQ ID NO: 63126

SEQ ID NO: 140490 - DNA, 1218 bp, Helianthus annuus
  CDS (1)..(1218)
atggcttctgatggagcagctcctgcagcagcagctggagaagttattggcaaactgccaaaggaaatcaatgaaatgaaaattaaagatgacaaggtggaaaaggaaatggaggaaacagtggtggatggaaatggcactgaaactggacacataattgttaccacaattggaggtagaaatggtcaaccaaagcagacaataagctatatggctgagcgtgtcgttggccagggttctttcggaatcgtatttcaggcgaagtgcttagaaactggagaagctgttgcaattaaaaaggtgttgcaggataaacgatacaagaaccgtgaattgcaaacaatgcggcttcttgatcatcccaacattgtttctctcaaacattgcttcttttcaaccacagataaggatgaactttatctcaatttggttcttgaatatgtgccagaaactgcttatcgtgtaacaaggcattacagcaaggcaaaccagaggatgcctatgatatatgtcaaactatacacatatcagatatttagagctctggcatatattcatgcaataggcgtctgccaccgagacataaagcctcaaaatcttctggtgaatccacatactcaccagctcaaactctgtgactttggaagtgcaaaagttttggtgaaaggtgaaccaaatatatcatatatatgttcccgatattaccgtgctcctgaacttatttttggggcaaccgaatacacaactgcaattgatgtatggtcagttggttgtgttcttgctgaactgcttctaggacagcctcttttcccaggtgagagtggagttgaccaacttgtagagatcatcaaggtccttggtacaccaacccgtgaagaaatcaaatgcatgaatccaaactacacagaatttaagttcccacaaatcaaagctcacccatggcacaaaatttttcacaagcggaccccaccagaagctgtagatcttgtttcaagactcctccaatattctccgaacttgaggtgcaacgctttggaggcatgtatccacccgttctttaacgaacttcgtgatccaaacactcgtctacctaacggccgccctttgccacccctctttaatttcaagcctcaagagctaaaaggggcatcgttggagcttgtggctaaactgataccagagcatgctcgtaagcagtgtgcctttcttggcttttaa

SEQ ID NO: 140491 - protein, 405 aa, Helianthus annuus
MASDGAAPAAAAGEVIGKLPKEINEMKIKDDKVEKEMEETVVDGNGTETGHIIVTTIGGRNGQPKQTISYMAERVVGQGSFGIVFQAKCLETGEAVAIKKVLQDKRYKNRELQTMRLLDHPNIVSLKHCFFSTTDKDELYLNLVLEYVPETAYRVTRHYSKANQRMPMIYVKLYTYQIFRALAYIHAIGVCHRDIKPQNLLVNPHTHQLKLCDFGSAKVLVKGEPNISYICSRYYRAPELIFGATEYTTAIDVWSVGCVLAELLLGQPLFPGESGVDQLVEIIKVLGTPTREEIKCMNPNYTEFKFPQIKAHPWHKIFHKRTPPEAVDLVSRLLQYSPNLRCNALEACIHPFFNELRDPNTRLPNGRPLPPLFNFKPQELKGASLELVAKLIPEHARKQCAFLGF

SEQ ID NO: 140492 - DNA, 1110 bp, Hordeum vulgare; identical to SEQ ID NO: 63127
  CDS (1)..(1110)

SEQ ID NO: 140493 - protein, 369 aa, Hordeum vulgare; identical to SEQ ID NO: 63128

SEQ ID NO: 140494 - DNA, 1110 bp, Hordeum vulgare
  CDS (1)..(1110)
atggacggcgctccggtggccgagttccggccgacgatgacgcacggcggccggttcctcctctacaacatattcggcaaccagttcgagatcacggccaagtaccagccgccgatcatgcccatcggccgcggcgcctacgggatcgtctgctcggtgatgaacttcgagacgagggagatggtggcaatcaagaagatcgcaaacgccttcgacaacaacatggacgccaagcgcacgctccgggaaatcaaactcctcaagcacctcgaccacgagaacatagtaggcctccgagacgtgatcccgccggcgatcccgcagtccttcaacgacgtctacatcgccactgagctcatggacacggaccttcaccacatcatccgttccaaccaagaactctcagaagaacactgccagtacttcctgtaccagctgctgcgcggtctcaagtacatccactcggcgaacgtgatccatcgcgacctgaagccgagcaacctgctgctgaacgccaactgcgacctcaagatctgcgacttcggcctggcgcggccgtcgtcggagagcgacatgatgacggagtacgtggtcacgcggtggtaccgggccccggagctgctgctcaactccaccgactactccgccgccatcgacgtctggtcggtcggctgcatcttcatggagctcatcaaccgcgcaccgctcttcccggggagggaccacatgcaccagatgcggctcatcacggaggtgatcggcacccccaccgacgacgacctgggcttcatccggaacgaggacgccaggagatacatgaggcacctgccgcagttccctcgccggccgttcccgggccagttccccaaggtgcagccagccgcgctcgacctcatagagcggatgctcaccttcaacccgcttcagaggatcacagttgaagaggcgctggagcacccgtacctagagcggcttcacgacgttgccgacgagcccatatgcacggaccccttctccttcgacttcgagcagcaccctctgacggaagaccagatgaagcagctcatattcaacgaagctctcgagttgaaccccaacttccgatactag

SEQ ID NO: 140495 - protein, 369 aa, Hordeum vulgare
MDGAPVAEFRPTMTHGGRFLLYNIFGNQFEITAKYQPPIMPIGRGAYGIVCSVMNFETREMVAIKKIANAFDNNMDAKRTLREIKLLKHLDHENIVGLRDVIPPAIPQSFNDVYIATELMDTDLHHIIRSNQELSEEHCQYFLYQLLRGLKYIHSANVIHRDLKPSNLLLNANCDLKICDFGLARPSSESDMMTEYVVTRWYRAPELLLNSTDYSAAIDVWSVGCIFMELINRAPLFPGRDHMHQMRLITEVIGTPTDDDLGFIRNEDARRYMRHLPQFPRRPFPGQFPKVQPAALDLIERMLTFNPLQRITVEEALEHPYLERLHDVADEPICTDPFSFDFEQHPLTEDQMKQLIFNEALELNPNFRY

SEQ ID NO: 140496 - DNA, 1737 bp, Hordeum vulgare
  CDS (1)..(1737)
atggggggagggaacggcatcgtcgacggcttccgccgcttgttccaccgccgcacgccctccggctccgtgctcggcagctccaaccagtcctccgccggcgaggactcctcggagctcgaggccgtcgaggacctggatctcgtgggcctccgccccatccgcgtccccaagcgcaagatgccgctccccgtcgagagccacaagaagaacataatggagaaagaattcttcactgagtacggagaggcaagccagtaccaaatccaagaagttgttggcaaagggagttatggagtggttgctgctgcaatagatacccgcaccggcgagcgggttgcgattaagaagatcaatgatgtgtttgagcatgtctcggatgccacacgcatcctccgtgaggtcaagctccttcggctgctccgtcatccggacgtggtagagatcaagcacataatgctccccccttctcggagggagttccaagatatatatgttgttttcgagctcatggagtcggatctccatcaggtcatcagagctaatgatgacctcacggcggagcattaccagtttttcctttaccagcttctccgcgctctcaagtacatccatggggctaatgtatttcatcgcgatctgaagcccaagaatatactggccaacgcagactgcaaactgaaaatttgtgactttggacttgcgcgtgtatcatttaatgatgctccttcagctatattttggacggattatgtagcaacaaggtggtacagagctcctgaattatgtggctcctttttctcgaaatacactcctgctattgatatttggagtattggatgtatatttgccgagcttctcactggacgaccactttttcctgggaagaatgttgtacaccagttagatataataacagatcttcttggaactccatcatcagaaaccttatctcggattcgaaacgagaaggccaggaggtacttaagttgcatgcgaaaaaaacatcctgtgcccttgactcagaaatttcctaatgctgatccgttggcggttcgcctactggggcgtttacttgcatttgatcctaaagaccggccttcagctgaagaggctttggcagacccatatttcgcatctcttgctaatgtggaacgtgagccttcaaggcatccaatttcgaaacttgagtttgagtttgagagacgaaaggtgacaaaagatgatgttagagaattgatctatcgagagattttggagtaccatccacaaatgctggaggagtacatgaaagggggagatcagattagcttcctctatccaagtggggttgaccgctttaagcggcagtttgcgcacctggaggagcattacagcaaaggagaacgaggttctccactgcaaagaaagcatgcctctttaccgaggcagagagtaggtgcatcgaacgacagtaataatgaacagcatattagtgatcaggagatgagtgcagagcctgatgcccatggtgcagtgagccctcaaaagccacaggatgcacccggtgttggtcagaatggtctgagccccaccagcttgagctcgcggacctacctcaagagcgcgagcattagtgcttccaagtgtgtcgttgtcaacccgaataaacagccagagtatgacgatgcgatctccgaggaaacggaaggggccgtcgacggactatccgagaaggtctccaagatgcatgcctag

SEQ ID NO: 140497 - protein, 578 aa, Hordeum vulgare
MGGGNGIVDGFRRLFHRRTPSGSVLGSSNQSSAGEDSSELEAVEDLDLVGLRPIRVPKRKMPLPVESHKKNIMEKEFFTEYGEASQYQIQEVVGKGSYGVVAAAIDTRTGERVAIKKINDVFEHVSDATRILREVKLLRLLRHPDVVEIKHIMLPPSRREFQDIYVVFELMESDLHQVIRANDDLTAEHYQFFLYQLLRALKYIHGANVFHRDLKPKNILANADCKLKICDFGLARVSFNDAPSAIFWTDYVATRWYRAPELCGSFFSKYTPAIDIWSIGCIFAELLTGRPLFPGKNVVHQLDIITDLLGTPSSETLSRIRNEKARRYLSCMRKKHPVPLTQKFPNADPLAVRLLGRLLAFDPKDRPSAEEALADPYFASLANVEREPSRHPISKLEFEFERRKVTKDDVRELIYREILEYHPQMLEEYMKGGDQISFLYPSGVDRFKRQFAHLEEHYSKGERGSPLQRKHASLPRQRVGASNDSNNEQHISDQEMSAEPDAHGAVSPQKPQDAPGVGQNGLSPTSLSSRTYLKSASISASKCVVVNPNKQPEYDDAISEETEGAVDGLSEKVSKMHA

SEQ ID NO: 140498 - DNA, 1134 bp, Hordeum vulgare
  CDS (1)..(1134)
atggacacctccggcggcggcggcggcgccgcgggcggggccgcgcagatccaggggatggcgacgcacggcggccgctacgtgctctacaacgtctacggcaacctcttcgaggtcgcctccaagtacgcccctcccatccgccccatcggccgaggcgcctacggcattgtctgcgcggctgttagctcggatacaggagaggaggttgcgatcaagaagattggaaatgcgtttgacaaccacatcgacgccaaacggacgcttagagaaataaagcttcttcgccacatggaccatgagaatattcttgccatgaaggatttaatacgccccccaagaagagatgattttaaggatgtgtacattgttactgagttgatggacactgatctccatcagatcattcgctcaaatcaatcattgactgatgaccattgccagtacttcttgtatcaattgcttcgagggctaaaatatgtgcactcagcaaatgtcttgcaccgtgatctgaagccaagcaatttgttcctaaacgcaaattgcgatctcaagattgctgactttgggcttgcaaggaccacttcagaaactgatctcatgacagagtatgtggtcactcgttggtaccgagcgccagagttgctgttgaactgttcacaatatactgctgctattgatgtctggtcagttgggtgcatacttggtgaaattattactcgtcaacccctgtttcctggaagagattacatccaacagttaaagttaatcaccgagctgataggatcaccagatgattcaagcctgggatttcttcggagtgataatgcacgaagatacatgaagcaattaccacagtacccaaggcaggacttccgcctgcgcttccgcaacatgtctgatggtgcagttgatctgttagagaggatgctggtgtttgacccaagcagacgcattactgttgatgaggctctgcatcacccatacttggcttctcttcatgacatcaatgaagaacccacttgcccggcacctttcagctttgattttgagcaaccatcttttacagaagaacatatgaaagagctcatctggagggaaactttagcatttaaccctgatccgccctactaa

SEQ ID NO: 140499 - protein, 377 aa, Hordeum vulgare
MDTSGGGGGAAGGAAQIQGMATHGGRYVLYNVYGNLFEVASKYAPPIRPIGRGAYGIVCAAVSSDTGEEVAIKKIGNAFDNHIDAKRTLREIKLLRHMDHENILAMKDLIRPPRRDDFKDVYIVTELMDTDLHQIIRSNQSLTDDHCQYFLYQLLRGLKYVHSANVLHRDLKPSNLFLNANCDLKIADFGLARTTSETDLMTEYVVTRWYRAPELLLNCSQYTAAIDVWSVGCILGEIITRQPLFPGRDYIQQLKLITELIGSPDDSSLGFLRSDNARRYMKQLPQYPRQDFRLRFRNMSDGAVDLLERMLVFDPSRRITVDEALHHPYLASLHDINEEPTCPAPFSFDFEQPSFTEEHMKELIWRETLAFNPDPPY

SEQ ID NO: 140500 - DNA, 1233 bp, Hordeum vulgare
  CDS (1)..(1233)
atggcctcggttggtgcggtgcgtccttcctcgcgctttcagaatgacacgagtactagtggtgatgccgaacgacttccgaacgagatgggcaatatgagcataagggatgacagggaccctgaagatatagtagtcaacggcaatgggacggaaccaggccatattatagtcacaagcattgagggaagaaatgggcaagcaaaacagaccattagctacatggctgagcgcgtggttggtcatgggtcatttggaactgttttccaggccaagtgtcttgaaactggcgagacggtggctataaagaaggttcttcaagacaagagatataagaaccgtgagctgcaaacgatgcgagttcttgaccatccaaatgttgtggctttgaagcattgttttttctcgaagactgagaaggaggagctttacctcaacctggtgcttgaatatgtgccagagactgctcatcgtgttattaagcattacaacaagatgaaccaacgcatgcccttgatatatgcaaaactgtacatgtatcagatatgtagatctttggcatacattcacaacagcattggagtatgtcacagagacatcaagcctcaaaatcttctggtgaatccacatactcatcagttgaaattatgtgactttggaagcgcgaaagtgttggtgaaaggagagccaaatatttcctatatctgttcaaggtactatagagccccagagctcatatttggtgctactgaatacacaacggcaattgatgtttggtctgctggctgtgttcttgctgaactccttctaggacagcctatattccctggcgacagtggtgttgatcagcttgttgaaatcatcaaggttttaggtacccctacacgagaagaaattaagtgcatgaatccaaattataccgagtttaaattcccgcaaatcaaagctcacccatggcacaagatcttccataaaagaatgcctgctgaagcagtagatcttgtctcgagactcttgcaatattcaccaagcctgcgttcgactgctttggaagcattaattcatccattcttcgatgaactccgggacccaaacacccgcttaccgaatggccgttttcttcctcccctctttaacttcaagccccatgagttgaagggcgtgccgatggacatcctggtgaagctcatccctgaacatgctcggaagaactgcgcctttgtagggtggtga

SEQ ID NO: 140501 - protein, 410 aa, Hordeum vulgare
MASVGAVRPSSRFQNDTSTSGDAERLPNEMGNMSIRDDRDPEDIVVNGNGTEPGHIIVTSIEGRNGQAKQTISYMAERVVGHGSFGTVFQAKCLETGETVAIKKVLQDKRYKNRELQTMRVLDHPNVVALKHCFFSKTEKEELYLNLVLEYVPETAHRVIKHYNKMNQRMPLIYAKLYMYQICRSLAYIHNSIGVCHRDIKPQNLLVNPHTHQLKLCDFGSAKVLVKGEPNISYICSRYYRAPELIFGATEYTTAIDVWSAGCVLAELLLGQPIFPGDSGVDQLVEIIKVLGTPTREEIKCMNPNYTEFKFPQIKAHPWHKIFHKRMPAEAVDLVSRLLQYSPSLRSTALEALIHPFFDELRDPNTRLPNGRFLPPLFNFKPHELKGVPMDILVKLIPEHARKNCAFVGW

SEQ ID NO: 140502 - DNA, 1209 bp, Hordeum vulgare
  CDS (1)..(1209)
atggagcatccggcgccggcgccggagccgatgctgctcgacgagcagccccccaccgcagtcgcctgcgagaagaagcagcaggatggcgaggcgccgtatgcggaggggaacgacgccatgaccggccacatcatctctaccaccatcggcggcaagaacggcgagcccaagcagacgattagctacatggcagagcgcgttgtgggcactggttcgtttggcatcgtctttcaggctaaatgcttggaaactggggagacggtggccattaagaaggtactgcaggaccggcggtacaagaaccgtgagctgcagcttatgcgttcgatgaaccattccaatgttgtctccctcaagcactgcttcttctcaaccacaagtagagatgagctgtttctgaaccttgtcatggagtatgtcccggagacgctctaccgcgtgcttaagcattacagtaatgccaaacaggggatgccacttatctatgtcaagctttacacctatcagctattcagggggctggcgtacattcatactgttccaggagtctgtcacagggatgtgaagccacaaaatgttttggttgatcctttaacacatcaagttaaggtctgtgactttggaagcgcaaaagttctggtggcgggtgagcccaatatatcatacatatgctcacgctactaccgtgctccggagcttatatttggtgcgactgaatatacatcatcgatagatatatggtcagctggttgtgttcttgcagaactgctccttggtcagccattatttccaggagagagtgcagtcgatcaactcgtagagataatcaaggttcttggaacaccaactcgggaggaaatacgttgcatgaacccgaattatacggagtttaggtttccgcagataaaagctcatccttggcacaaggtttttcacaagaaaatgcctcctgaagccatagatcttgcttcacgtcttcttcaatattcaccaagcctccgctgcactgctcttgacgcatgcgcgcatcctttctttgatgagctacgggagcctaacgcgcacctgccaaacggacgcccgttcccacctctgttcaacttcaagcatgaactggccaatgtttcacaagacctcatcaacaggcttgtacctgaacatgttcgccgacaagctggtctcgctttcttgcatgcagggagctaa

SEQ ID NO: 140503 - protein, 402 aa, Hordeum vulgare
MEHPAPAPEPMLLDEQPPTAVACEKKQQDGEAPYAEGNDAMTGHIISTTIGGKNGEPKQTISYMAERVVGTGSFGIVFQAKCLETGETVAIKKVLQDRRYKNRELQLMRSMNHSNVVSLKHCFFSTTSRDELFLNLVMEYVPETLYRVLKHYSNAKQGMPLIYVKLYTYQLFRGLAYIHTVPGVCHRDVKPQNVLVDPLTHQVKVCDFGSAKVLVAGEPNISYICSRYYRAPELIFGATEYTSSIDIWSAGCVLAELLLGQPLFPGESAVDQLVEIIKVLGTPTREEIRCMNPNYTEFRFPQIKAHPWHKVFHKKMPPEAIDLASRLLQYSPSLRCTALDACAHPFFDELREPNAHLPNGRPFPPLFNFKHELANVSQDLINRLVPEHVRRQAGLAFLHAGS

SEQ ID NO: 140504 - DNA, 1002 bp, Hordeum vulgare
  CDS (1)..(1002)
atgtcaaaggccagggtctacgccgacgttaacgtcgtacgccccaaggagtactgggattacgaggccctcgccgtccagtggggtgagcaggatgactatgaagttgtgcggaaagttggaagaggcaaatacagtgaagtctttgagggcatcaacgtcaacaataatgagaaatgtgttattaagatcctgaagcctgtgaagaagaagaagatcaaaagagagatcaaaatacttcagaatctctgtggaggtccaaatattgtgaagctgcttgatattgtcagagatcagcattcaaaaacaccaagcttgatctttgaatacatcaataacacagatttcaaagtgttatatccgacattgacagattatgacattcgctactatatctatgagttactgaaggctttggattactgccattcacaaggcattatgcaccgagatgtgaagcctcacaatgttatgatagatcatgagcttcgaaaactccggttaatagattggggccttgctgaattctaccatcctggaaaggagtataacgttcgtgttgcatcaaggtacttcaagggacctgagcttcttgttgacttacaagattacgactactctttggacatgtggagtcttggctgcatgtttgctggaatgatattccgcaaggaaccatttttctatggccatgacaaccatgatcaacttgttaagattgcaaaggtacttggaacagatgggctaaatgcttatttgaacaagtacagaattgagcttgaccctcagcttgaagcccttgtgggaaggcacagcagaaaaccctggtcaaagtttatcaatgcagacaaccagcatctggtatcccctgaggccatagatttccttgataagcttctgcgatatgatcaccaggacaggctcactgcacgtgaagctatggcacatccatacttcctgcaggtgagggccgctgaaaacagcaggactcgcgcgcaatag

SEQ ID NO: 140505 - protein, 333 aa, Hordeum vulgare
MSKARVYADVNVVRPKEYWDYEALAVQWGEQDDYEVVRKVGRGKYSEVFEGINVNNNEKCVIKILKPVKKKKIKREIKILQNLCGGPNIVKLLDIVRDQHSKTPSLIFEYINNTDFKVLYPTLTDYDIRYYIYELLKALDYCHSQGIMHRDVKPHNVMIDHELRKLRLIDWGLAEFYHPGKEYNVRVASRYFKGPELLVDLQDYDYSLDMWSLGCMFAGMIFRKEPFFYGHDNHDQLVKIAKVLGTDGLNAYLNKYRIELDPQLEALVGRHSRKPWSKFINADNQHLVSPEAIDFLDKLLRYDHQDRLTAREAMAHPYFLQVRAAENSRTRAQ

SEQ ID NO: 140506 - DNA, 882 bp, Hordeum vulgare; identical to SEQ ID NO: 63129
  CDS (1)..(882)

SEQ ID NO: 140507 - protein, 293 aa, Hordeum vulgare; identical to SEQ ID NO: 63130

SEQ ID NO: 140508 - DNA, 1248 bp, Linum usitatissimum
  CDS (1)..(1248)
atggacggaggagcaagtggtcccttcccgccagctgacaccgagatggcggatgcgcagccggcgcaaccccctcccggcgccgctgaccaccaccaacagcagcaacaacaggttccgcctccgggagggatcgagaatattccggcgacgctaagccacggcggacgcttcatccaatacaacattttcggcaacattttcgaggtcaccgccaagtataagcctccaatcatgcctattggcaagggcgcgtacggaatcgtctgctcggctttgaactcggagaccgcggagcatgtggcgattaagaagattgcaaatgcttttgacaacaagattgatgccaagaggactcttcgcgagatcaagcttcttcgtcacatggaccacgaaaatgtggttgccatcagggatataattccgccacccctgagagagtcatttaatgatgtctatattgcatatgaactgatggacaccgatctacatcagattatcaggtcgaatcaaggattgtcagaggagcactgccagtattttttgtaccagatccttcgtggattgaaatacatccattcagcaaacgttctacacagagatctaaagccaagcaatcttctcctgaatgccaattgtgatctgaagatttgcgactttgggcttgctcgtgtaacctctgagactgatttcatgactgaatatgttgttacaagatggtacagagcaccggagttgttgttgaactcctctgattatactgctgcaattgatgtatggtcagttggttgcatatttatggagttgatggaccggaagcctctatttcccggacgagatcatgtccaccagcttcgcttgttaatggagctcatcggcaccccttcagaggctgagctggggtttctaaatgagaatgcgaagcgatacatccgccaacttccgctctatcggcgccaatcattcaccgaaaagtttccaactgtgcacccgtcagctatcgatctcgtcaagaagatgctgacatttgatccccgacagagaataacagttgaagatgcgcttgcccatccatacctgaactcgctccatgacattagcgatgagccggtgtgcactactccgttcagtttcgactttgagcagcgtgcgctgacggaagagcagatgaaggagctgatatacagggaggcattagcgttcaacccggactatgacccttcgacgtttgatcagaatgctttctag

SEQ ID NO: 140509 - protein, 415 aa, Linum usitatissimum
MDGGASGPFPPADTEMADAQPAQPPPGAADHHQQQQQQVPPPGGIENIPATLSHGGRFIQYNIFGNIFEVTAKYKPPIMPIGKGAYGIVCSALNSETAEHVAIKKIANAFDNKIDAKRTLREIKLLRHMDHENVVAIRDIIPPPLRESFNDVYIAYELMDTDLHQIIRSNQGLSEEHCQYFLYQILRGLKYIHSANVLHRDLKPSNLLLNANCDLKICDFGLARVTSETDFMTEYVVTRWYRAPELLLNSSDYTAAIDVWSVGCIFMELMDRKPLFPGRDHVHQLRLLMELIGTPSEAELGFLNENAKRYIRQLPLYRRQSFTEKFPTVHPSAIDLVKKMLTFDPRQRITVEDALAHPYLNSLHDISDEPVCTTPFSFDFEQRALTEEQMKELIYREALAFNPDYDPSTFDQNAF

SEQ ID NO: 140510 - DNA, 1002 bp, Linum usitatissimum
  CDS (1)..(1002)
atgtccaaggctaaagtttacaccgacgttaacgtcattcgcccgaaggagtactgggattacgagtctcttactgttcagtggggggaccaagatgattatgaggttgtacgaaaagttggaaggggcaagtacagtgaggtctttgaagggattaatgtgaatacgaatgaaaaatgcgtaatcaagatcctaaagcctgttaagaagaagaagataaagagggagattaagatacttcagaacctctgtggtggcccaaatataatcaagcttcatgatattgtcagagatcagcactcaaaaactcctagcttgatatttgaatacgtgaatagcacagacttcaaagtcctgtatccgactttgactgattatgatattcgttactacatatatgaacttctcaaggctttggattactgccattcgcaaggaataatgcacagagatgtcaaaccgcacaatgtcatgattgatcatgaattgcgtaaacttcgattgattgactggggtcttgccgaattttaccatcctgccaaggaatacaatgttagggtggcctccagatatttcaagggtcctgagctcttagttgatctgcaggactatgactattctttggacatgtggagccttgggtgcatgtttgctggaatgatcttcaggaaggaaccattcttttatggtcatgacaaccatgaccaacttgttaaaattgcaaaggtactcgggactgatgagctgaatgcatatctaaataagtaccatctagagcttgatccgcaactggatgcacttgtcggaaggcacagtaggaaaccatggtccaagtttgtaaatgcagataaccagcaccttgtttctccagaggcgattgacttccttgacaagctcctccgatacgaccatcaggaccgtttgaccgcgaaagaagcaatggcacacccgtatttcgctcaagtgaaggctgccgaaagttgcagaatgcggacgcagtag

SEQ ID NO: 140511 - protein, 333 aa, Linum usitatissimum
MSKAKVYTDVNVIRPKEYWDYESLTVQWGDQDDYEVVRKVGRGKYSEVFEGINVNTNEKCVIKILKPVKKKKIKREIKILQNLCGGPNIIKLHDIVRDQHSKTPSLIFEYVNSTDFKVLYPTLTDYDIRYYIYELLKALDYCHSQGIMHRDVKPHNVMIDHELRKLRLIDWGLAEFYHPAKEYNVRVASRYFKGPELLVDLQDYDYSLDMWSLGCMFAGMIFRKEPFFYGHDNHDQLVKIAKVLGTDELNAYLNKYHLELDPQLDALVGRHSRKPWSKFVNADNQHLVSPEAIDFLDKLLRYDHQDRLTAKEAMAHPYFAQVKAAESCRMRTQ

SEQ ID NO: 140512 - DNA, 1128 bp, Linum usitatissimum
  CDS (1)..(1128)
atggcaactccagttgagccaccaaatggggttaggattcaagggaagcactactattcaatgtggcaaactttgtttgagatcgacataaagtatgtccccataaagccaatcggccgtggtgcttatggtatagtgtgttcttcagtgaatagggaaaccaatgagaaagttgctattaaaaagatacacaatgtgttcgaaaaccgtatcgatgccctcaggactctgcgtgaactcaagctcctgcgccatcttcgccacaccaatgtgattgctttgaaagatgtgatgatgccaatccacaggaggagcttcaaggatgtttatttcgtttacgaattaatggataccgatctccaccagattattaagtcctctcagtcactctccaatgatcactgccagtacttcctattccagctgcttagaggtctgaagtatcttcactcagcaaacatcctacaccgtgatctcaaacctggaaacctcctcatcaacgcaaattgcgacctcaaaatctgcgatttcggcctagcaagaaccagcacgggaaaaggccagttcatgaccgagtatgtagtgacgcgctggtaccgtgctccggagctcctcctttgctgcgacaactatggaacgtcgatcgatgtctggtctgtgggatgcatatttgctgaactactgggaaggaagcctctctttcccggcacagaatgtctcaaccaactgaagctcataatcaacattcttggtagccagagggaagaggatctcgagttcatcgacaacgcaaaagctaaaaagtttataaaatcacttccttattctccagggactgcattcgcccatctttaccccaatgcaaatcctttggccattgacctattgaggaagatgctcatcttcgacccttcgaagaggataactgtgatcgaagcattacagcatccctacctgtctccactttatgatcccaactgtaatcctcctgctcagttgctagtcgatgatattgagattgatgaggagttgggggaagaaatgatccgcgagactatgtggaaggagatgttacattaccatcctgagttcgcagcagcaagtggtggggagttctgctaccagtag

SEQ ID NO: 140513 - protein, 375 aa, Linum usitatissimum
MATPVEPPNGVRIQGKHYYSMWQTLFEIDIKYVPIKPIGRGAYGIVCSSVNRETNEKVAIKKIHNVFENRIDALRTLRELKLLRHLRHTNVIALKDVMMPIHRRSFKDVYFVYELMDTDLHQIIKSSQSLSNDHCQYFLFQLLRGLKYLHSANILHRDLKPGNLLINANCDLKICDFGLARTSTGKGQFMTEYVVTRWYRAPELLLCCDNYGTSIDVWSVGCIFAELLGRKPLFPGTECLNQLKLIINILGSQREEDLEFIDNAKAKKFIKSLPYSPGTAFAHLYPNANPLAIDLLRKMLIFDPSKRITVIEALQHPYLSPLYDPNCNPPAQLLVDDIEIDEELGEEMIRETMWKEMLHYHPEFAAASGGEFCYQ

SEQ ID NO: 140514 - DNA, 885 bp, Linum usitatissimum; identical to SEQ ID NO: 63131
  CDS (1)..(885)

SEQ ID NO: 140515 - protein, 294 aa, Linum usitatissimum; identical to SEQ ID NO: 63132

SEQ ID NO: 140516 - DNA, 1128 bp, Linum usitatissimum
  CDS (1)..(1128)
atggcaactccagttgagccaccaaatggggttaggattcaagggaagcactattattcaatgtggcaaactttgtttgagatcgatataaagtatgtccctataaagccaatcggccgtggtgcttatggtatagtgtgttcttcagtgaatagggaaaccaatgagaaagttgctattaagaagatacacaatgtgttcgaaaaccgtattgatgccctcaggactctgcgtgaactcaagctccttcgccatcttcgccacaccaatgtgattgctttgaaagatgtgatgatgccaatccacaggaggagcttcaaggatgtttatttcgtttacgaattaatggataccgatctccaccagattattaagtcctctcagtcactctccaatgatcactgccagtacttcctattccagctgcttagaggtctgaagtatcttcactcagcaaacatcctacaccgtgatctcaaacctggaaacctcctcatcaacgcaaattgcgacctcaaaatctgcgatttcggcctagcaagaaccagcacgggaaaaggccagttcatgaccgagtatgtagtgacgcgctggtaccgtgctccggagctcctcctttgctgcgacaactatggaacgtcgatcgatgtctggtctgtgggatgcatatttgctgaactactgggaaggaagcctctctttcccggcacagaatgtctcaaccaactgaagctcataatcaacattcttggtagccagagggaagaggatctcgagttcatcgacaacgcaaaagctaaaaagtttataaaatcacttccttattctccagggactgcattcgcccatctttaccccaatgcgcatcctttggccattgacctattgaggaagatgcttatctttgacccttcgaagaggataactgtgatcgaagcattacagcatccctacctgtctccactttatgatcccaactgtaatcctcctgctcagttgctagtcgatgatcttgagattgatgaggagttgggggaagaaatgatccgtgagactatgtggaaggagatgttacattaccatcctgagtttgcagcagcaagtggtggggagttctgctaccagtag

SEQ ID NO: 140517 - protein, 375 aa, Linum usitatissimum
MATPVEPPNGVRIQGKHYYSMWQTLFEIDIKYVPIKPIGRGAYGIVCSSVNRETNEKVAIKKIHNVFENRIDALRTLRELKLLRHLRHTNVIALKDVMMPIHRRSFKDVYFVYELMDTDLHQIIKSSQSLSNDHCQYFLFQLLRGLKYLHSANILHRDLKPGNLLINANCDLKICDFGLARTSTGKGQFMTEYVVTRWYRAPELLLCCDNYGTSIDVWSVGCIFAELLGRKPLFPGTECLNQLKLIINILGSQREEDLEFIDNAKAKKFIKSLPYSPGTAFAHLYPNAHPLAIDLLRKMLIFDPSKRITVIEALQHPYLSPLYDPNCNPPAQLLVDDLEIDEELGEEMIRETMWKEMLHYHPEFAAASGGEFCYQ

SEQ ID NO: 140518 - DNA, 1479 bp, Zea mays
  CDS (1)..(1479)
atggacttcttcacggaatatggggaggcgagtcagtatcaaatccaagaggtcattggtaagggaagttatggagtagttgctgctgcaattgatagtcacactggggagcgggttgcgatcaagaagataaatgatatttttggtaatgtctcggatgctgctcgcattttgcgggaaaacaagcttcttcggtctgcttcgtcacccaaacatagtcccaaattaagcacaattatgttgccccctacccgaagggagttcaaagatatctatgttgtttttgagctcatggagtctgacctgcatcaagtgatcaaagcaaatgataacctgactccagagcatcaccgctttttcctgtatcaacttattcgtgctctcaagtacatgcattcagcccatgtatttcatcgtgatttaaagcccaggaacatactggccaattcagacagcaaactaaagatctgcgactttggacttgcacgtgcatcatttaacgactctctttcagctatctattggacagattatgtcgcaacaaggtggtaccgggctcctgaattatgtggctcctttttctccagttacacccctgcaattgatatttggagtatagggtgcatttttgctgaagttctcaccggaacgccattgtttcctgggaggaatgttgtgcaccaattagacttaataacagatctccttggaacaccatcgtttagatccttatcccagattcacagtgataaggccagggaatatttgcttggcatgccgaggaagcgccctattccattttctcataagttccgtaatgccgatcctctggctctccggttgctagagcgtttacttgcatttgacccgaaagatcgacctactgctgaagaggctttagctgatccatacttcagtggcctttctaaattggaacttgagccttcagcacaaccaattttgaaggttgactttgaattcgagggaaggaaactaacaaaggctggtgtgagagaaatgatatatcgggagattttggagtaccatccccagatgcttcaggagtacatcgaaggtggagatcagattcacttcctatacccaagtggggttgatcgcttccagcgacagtttgctcatctcgaggagaactacaggagaggagtagctagcacccccccgcgaaggcagcccacatctctgccgagggagcgagtctgctcatcagaagatggccacagtcaggactctgacagcgaagagcagagagcagcatcctacgttgcccgaacaaccataagccctccaagatcacaagaggagggcggcaagctccagcctgcctaccagagcgccgccgccgccgcagactcctgcgccaagagctatctgaagggtgccgctagtatcagtagtgcttccaggcgtaccatcaagggggataatggccgaaaggagaagggatctccgaggctgtga

SEQ ID NO: 140519 - protein, 492 aa, Zea mays
MDFFTEYGEASQYQIQEVIGKGSYGVVAAAIDSHTGERVAIKKINDIFGNVSDAARILRENKLLRSASSPKHSPKLSTIMLPPTRREFKDIYVVFELMESDLHQVIKANDNLTPEHHRFFLYQLIRALKYMHSAHVFHRDLKPRNILANSDSKLKICDFGLARASFNDSLSAIYWTDYVATRWYRAPELCGSFFSSYTPAIDIWSIGCIFAEVLTGTPLFPGRNVVHQLDLITDLLGTPSFRSLSQIHSDKAREYLLGMPRKRPIPFSHKFRNADPLALRLLERLLAFDPKDRPTAEEALADPYFSGLSKLELEPSAQPILKVDFEFEGRKLTKAGVREMIYREILEYHPQMLQEYIEGGDQIHFLYPSGVDRFQRQFAHLEENYRRGVASTPPRRQPTSLPRERVCSSEDGHSQDSDSEEQRAASYVARTTISPPRSQEEGGKLQPAYQSAAAAADSCAKSYLKGAASISSASRRTIKGDNGRKEKGSPRL

SEQ ID NO: 140520 - DNA, 879 bp, Zea mays; identical to SEQ ID NO: 63133
  CDS (1)..(879)

SEQ ID NO: 140521 - protein, 292 aa, Zea mays; identical to SEQ ID NO: 63134

SEQ ID NO: 140522 - DNA, 1737 bp, Triticum aestivum
  CDS (1)..(1737)
atggggggagggaacggcatcgtcgacggcttccgccgcttgttccaccgccgcacgccctccggctccgtgctcggcagttccaaccagtcctccgccggcgaggactcctccgacgtcgaggccgccgagggcctggatctcgtgggcctccgctccatccgcgtccccaagcgcaagatgccgctccccgtcgagagccacaagaagaacataatggagaaagaattcttcacagagtatggagaggcaagccagtaccaaatccaagaagttgttggcaaggggagttatggagtagttgctgctgcaatagatacccgcaccggcgagcgggttgcgattaagaagatcaacgatgtgtttgagcacgtctcggatgccacacgcatcctccgcgaggtcaagctccttcggctgctacgtcatccagacgtggtagagatcaagcacataatgctccccccttctcggagggagttccaagatatatatgttgttttcgagctcatggagtcggatctccatcaggtcatcagagctaatgatgacctcacggcggagcattaccagtttttcctttaccagcttctccgcgctctcaagtacatccatggggctaatgtatttcatcgcgatctgaagcccaagaatatactggccaacgcagactgcaaactgaaaatttgtgactttggacttgcgcgtgtatcatttaatgatgctccttcagctatattttggacggattatgtagcaacaaggtggtacagggcccctgaattatgtggctcctttttctcgaaatacactcctgctattgatatttggagtattggatgcatatttgccgagcttctcactggacggccactctttcctgggaagaatgtcgtacaccagttagatataataacagatcttcttggaactccatcatcagaaaccttatctcggattcgaaatgagaaggccaggaggtacttaagttgcatgcgaaaaaaacaccctgtacccttgactcagaaatttcctaatgctgatccattggcggttcgcctactgggtcgtttacttgcatttgatcctaaagaccggccttcagctgaagaggctttagcagacccatattttgcatctcttgccaatgtggagcgtgagccatcaaggcatccaatttcgaaactcgagtttgagtttgagagacgaaaggttacaaaagatgatgttagggaattgatctatcgagagattttggagtaccatccacagatgctggaggaatacatgaaaggtggagaccagattagcttcctctatccaagtggtgttgaccgctttaaacggcagtttgcacacctggaggagcattacagcaaaggagaacgaggttctccgctgcaaagaaagcatgcctctttaccaaggcagagagtaggtgcatcgaacgacggtaataatgaacagcatattagtgatcaggagatgagtgcagagcctgatgcccatggtgcagtgagccctcaaaagtcacaggatgcacccggtgttggccagaatggtctgagccccaccagcttgagctcgcggacctacctcaagagcgcgagcattagcgcttccaagtgcgtcgttgtcaacccgaataaacagccagagtatgacgacgcgatctctgaggaaacagaaggagccgtcgatggactatccgagaaggtctcaaagatgcatgcctag

SEQ ID NO: 140523 - protein, 578 aa, Triticum aestivum
MGGGNGIVDGFRRLFHRRTPSGSVLGSSNQSSAGEDSSDVEAAEGLDLVGLRSIRVPKRKMPLPVESHKKNIMEKEFFTEYGEASQYQIQEVVGKGSYGVVAAAIDTRTGERVAIKKINDVFEHVSDATRILREVKLLRLLRHPDVVEIKHIMLPPSRREFQDIYVVFELMESDLHQVIRANDDLTAEHYQFFLYQLLRALKYIHGANVFHRDLKPKNILANADCKLKICDFGLARVSFNDAPSAIFWTDYVATRWYRAPELCGSFFSKYTPAIDIWSIGCIFAELLTGRPLFPGKNVVHQLDIITDLLGTPSSETLSRIRNEKARRYLSCMRKKHPVPLTQKFPNADPLAVRLLGRLLAFDPKDRPSAEEALADPYFASLANVEREPSRHPISKLEFEFERRKVTKDDVRELIYREILEYHPQMLEEYMKGGDQISFLYPSGVDRFKRQFAHLEEHYSKGERGSPLQRKHASLPRQRVGASNDGNNEQHISDQEMSAEPDAHGAVSPQKSQDAPGVGQNGLSPTSLSSRTYLKSASISASKCVVVNPNKQPEYDDAISEETEGAVDGLSEKVSKMHA

SEQ ID NO: 140524 - DNA, 1233 bp, Triticum aestivum
  CDS (1)..(1233)
atggcctcggttggtgcggtgcgtccttcctcgcgcttccagaatgacacgagtactagtggtgatgccgaccgacttccgaacgagatgggcagtatgagcataagggatgacagggacactgaagatatagtagtcaacggcaatgggacggaaccaggccatattatagtcacaagcattgagggaagaaatgggcaagcaaaacagaccattagctacatggctgagcgcgtggttggtaatgggtcatttggaactgttttccaggctaagtgtcttgaaactggcgagacggtggctataaagaaggttcttcaagacaagagatataagaaccgtgagctgcaaacgatgcgagttcttgaccacccaaatgttgtggctttaaagcattgttttttctcaaagactgagaaggaggagctttacctcaacctggtgcttgagtatgtgccggagactgctcatcgtgtcattaagcattacaacaagatgaaccaacgcatgcccttgatatatgcaaaactgtacatgtatcagatatgtagatctttggcatacattcacaacagcattggagtatgccacagagacatcaagcctcaaaatcttctggtgaatccacatacgcaccaattgaaattatgtgacttcggaagtgcgaaagtgttggtaaaaggagaaccaaatatttcctatatctgttcaaggtactatagagccccagagctcatatttggtgctactgaatacacaacggcaattgacgtttggtctgctggctgtgttcttgctgaactccttctaggacagcctatattccctggcgacagtggtgttgatcagcttgttgaaatcatcaaggttttaggtacccctacaagagaagaaattaagtgcatgaatccaaattatacagagtttaaattcccacaaatcaaagctcacccatggcacaagatcttccataaaagaatgcctgctgaagcagtagatcttgtctccagactcttgcaatattcaccaagcctgcgttcaactgctttggaagcattaattcatccattcttcgatgaactccgggacccaaacacccgcttaccgaacggccgttttcttcctccactctttaactttaagccccatgagttgaagggcgtgccgatggacatcctggtgaagctcatccctgaacatgctcggaagaactgtgcctttgtaggatggtga

SEQ ID NO: 140525 - protein, 410 aa, Triticum aestivum
MASVGAVRPSSRFQNDTSTSGDADRLPNEMGSMSIRDDRDTEDIVVNGNGTEPGHIIVTSIEGRNGQAKQTISYMAERVVGNGSFGTVFQAKCLETGETVAIKKVLQDKRYKNRELQTMRVLDHPNVVALKHCFFSKTEKEELYLNLVLEYVPETAHRVIKHYNKMNQRMPLIYAKLYMYQICRSLAYIHNSIGVCHRDIKPQNLLVNPHTHQLKLCDFGSAKVLVKGEPNISYICSRYYRAPELIFGATEYTTAIDVWSAGCVLAELLLGQPIFPGDSGVDQLVEIIKVLGTPTREEIKCMNPNYTEFKFPQIKAHPWHKIFHKRMPAEAVDLVSRLLQYSPSLRSTALEALIHPFFDELRDPNTRLPNGRFLPPLFNFKPHELKGVPMDILVKLIPEHARKNCAFVGW

SEQ ID NO: 140526 - DNA, 1209 bp, Triticum aestivum
  CDS (1)..(1209)
atggagcatccggcgccggcgccggagccgatgctgctcgacgagcagccccccaccgcagtcgcctgcgagaagaagcagcaggatggcgaggcgccgtatgcggaggggaacgacgccatgaccggtcacatcatctccaccaccatcggcggcaagaacggcgagcccaagcagacgattagctacatggcggagcgcgttgtgggcactggttcgtttggcatcgtctttcaggctaaatgcctggaaaccggggagacagtggccattaagaaggtactgcaggacagacggtacaagaaccgtgagctgcagcttatgcgttcgatgatccattccaatgttgtctccctcaagcactgcttcttctcaaccacaagtagagatgagctgtttctgaaccttgtcatggagtatgtcccggagacgctctaccgcgtgcttaagcactacagtaatgccaaacaggggatgccacttatctacgtcaagctttacacctatcagctattcagggggctggcgtacattcatactgttccaggagtctgtcacagggatgtgaagccacaaaatgttttggttgatcctttaacacatcaagttaagatctgcgactttggaagcgcgaaagttctggtggcgggtgagcccaatatatcatacatatgctcacgctactaccgtgctccggagcttatatttggtgcgactgaatatacaacatcgatagatatatggtcagctggttgtgttcttgcagaactgctccttggtcagccattatttccaggagagagtgcagtcgatcaactcgtagagataatcaaggttcttggaacgccaactcgggaggaaatacgttgtatgaacccgaattatacggagtttaggtttccgcagataaaagctcatccttggcacaaggttttccacaagaaaatgcctcctgaagccatagatcttgcttcacgtcttcttcaatattcaccaagcctccgttgcactgctcttgacgcatgtgcgcatcctttctttgatgagctacgggagcctaatgcgcgcctgccaaacggacgcccgttcccacctctgttcaacttcaagcatgaactggccaatgcttcacaagacctcatcaacaggcttgtgcctgaacatgttcgccgacaagctggtcttgctttcgtgcatgcggggagctaa

SEQ ID NO: 140527 - protein, 402 aa, Triticum aestivum
MEHPAPAPEPMLLDEQPPTAVACEKKQQDGEAPYAEGNDAMTGHIISTTIGGKNGEPKQTISYMAERVVGTGSFGIVFQAKCLETGETVAIKKVLQDRRYKNRELQLMRSMIHSNVVSLKHCFFSTTSRDELFLNLVMEYVPETLYRVLKHYSNAKQGMPLIYVKLYTYQLFRGLAYIHTVPGVCHRDVKPQNVLVDPLTHQVKICDFGSAKVLVAGEPNISYICSRYYRAPELIFGATEYTTSIDIWSAGCVLAELLLGQPLFPGESAVDQLVEIIKVLGTPTREEIRCMNPNYTEFRFPQIKAHPWHKVFHKKMPPEAIDLASRLLQYSPSLRCTALDACAHPFFDELREPNARLPNGRPFPPLFNFKHELANASQDLINRLVPEHVRRQAGLAFVHAGS

SEQ ID NO: 140528 - DNA, 1110 bp, Triticum aestivum; identical to SEQ ID NO: 63135
  CDS (1)..(1110)

SEQ ID NO: 140529 - protein, 369 aa, Triticum aestivum; identical to SEQ ID NO: 63136

SEQ ID NO: 140530 - DNA, 1206 bp, Triticum aestivum
  CDS (1)..(1206)
atggaggcgccgccggggccggagcccatggtgctggacgcgccgcccccgctcgccgccgccgtcgtcccggcccacgcggccaccgagaagacgaggacggaggggggcgaccctgtcaccggccacatcatctccacaaccatcggcgggaagaacggcgagccgaagaggacaattagctacatggctgagcgggtggtaggaactggttcatttgggattgtcttccaggctaagtgcttggagactggagagactgttgccatcaagaaggtgctgcaggatcgccgttacaagaaccgtgagctgcagcttatgcgctccatggaccatcccaatgtcgtctctctgaagcactgcttcttctcgaccacaagtagggatgagctgttcctgaaccttgtcatggagtatgtccctgagactctatatcgtgtgctcaagcactatagcaatgccaaccagcggatgccgcttatctatgtcaagctttacatgtatcagctttttagagggctagcttatgttcatactgttccaggagtttgccacagggatgtgaaaccacaaaatgttttggttgatcctctaacccatcaagtcaagatctgtgactttggaagcgcaaaagttctggtacctggtgaacccaacatagcatacatatgctctcgctactatcgtgctcctgagctcatatttggcgcaacggagtatactacttcaatagacatatggtcagctggttgtgttctagctgagttgcttcttggtcagccactgtttccgggagagagcgcagttgatcagctggtagagattatcaaggttcttggtactccaacccgggaggagataagatgcatgaatcccaactatactgagttcaggtttcctcagataaaggctcatccgtggcacaagattttccacaagagaatgcctcctgaagctatagaccttgcttcccgtctccttcagtattcaccaagtcttcgctgctctgctcttgatgcatgtgctcatcccttctttgatgagctgcgggcgccgaatgcgcgcctaccaaatggccgtccattccctctgctctttaacttcaaacatgaactagcaaatgcatctccggacctcatcaacaggcttgtaccggagcacattagacggcagaacggtgtcaacttcgggcatgttgggagctag

SEQ ID NO: 140531 - protein, 401 aa, Triticum aestivum
MEAPPGPEPMVLDAPPPLAAAVVPAHAATEKTRTEGGDPVTGHIISTTIGGKNGEPKRTISYMAERVVGTGSFGIVFQAKCLETGETVAIKKVLQDRRYKNRELQLMRSMDHPNVVSLKHCFFSTTSRDELFLNLVMEYVPETLYRVLKHYSNANQRMPLIYVKLYMYQLFRGLAYVHTVPGVCHRDVKPQNVLVDPLTHQVKICDFGSAKVLVPGEPNIAYICSRYYRAPELIFGATEYTTSIDIWSAGCVLAELLLGQPLFPGESAVDQLVEIIKVLGTPTREEIRCMNPNYTEFRFPQIKAHPWHKIFHKRMPPEAIDLASRLLQYSPSLRCSALDACAHPFFDELRAPNARLPNGRPFPLLFNFKHELANASPDLINRLVPEHIRRQNGVNFGHVGS

SEQ ID NO: 140532 - DNA, 1650 bp, Triticum aestivum
  CDS (1)..(1650)
atggacttttttaccgagtatggtgagggaaacagatacaagatagaagaggttataggaaaagggagttacggcgtggtctgctctgctttggatactcacaccggtgagaaagttgctatcaagaagataaacgacatctttgaacatgtgtctgatgcgacacggatactccgcgagatcaagttgcttaggctcctaagacatcccgatatcgtggaaataaaacatattctacttcctccatcgaggagagagttcaaggacatatacgttgttttcgaactcatggagtctgatttgcaccaagttataaaggcgaatgatgacttgactccagaacattatcagtttttcttgtatcagttgctccgaggattgaaatacatacatacagcaaatgtatttcatcgagatctcaaaccaaagaatatcttggctaatgctgattgtaagctcaaaatatgtgatttcggtcttgcaagggtagctataagtgatactccaaccgcaatattttggacggattatatcgcaacaaggtggtaccgagcacctgaactatgtggatcttttttctccaagtacacaccagcaatagatatatggagtattggatgtatatttgcggaacttctaactggcaaacctctttttcctgggaaaaatgtggtgcatcaacttgatataatcacagatctactgggaacgcctgctccagaaacaattgctaggattcgaaatgagaaggccagacgctacttgagcagtatgaggcggaaaaagcctgtaccgtttacacagaagtttccgaatgcagatccacttgcattaaatttgttagagagaatgctagcatttgatccaaaataccggccaagtgctgaagaggctcttgctgatctttatttcaagaacatagctagtgtggatagggagccttctgcacagcccattactaagctcgagtttgagtttgagagacgaagaattacgaaggacgacataagggaactcatatacagagaaattctggaatatcatccaaacatgctgagggaattccttgagggggcagagccaactaatttcatgtacccaagtgcagtagatcatttcaaaaagcaattcacattccttgaagagcattatgcaaagggatcaacagcagcaccgcctgagaggcaacataattcattaccaaggccgagtgttatctattcggataaccggccacagggttcagatagccgaccacagggtgctgccaacattacggatgatctttccaggtgtataatcagagataatgcacaaaagccacgcagagatcctgcttcagttggtgcaaacagagttcctaaaggtgctgctgtcgcaaggcctggtaaagtggttggttcggcacttcgttatggtaactgttcaacatctggtactgagcaatatgaacagcgaagggtcatcacaagccaaggaattgttccaaacggcgttccttcaggcagctcataccctagaagaaataacacctgcaagagtgaaacaggtgaagctgaaaggatcgacgtgagccaagctgggccaccaaagccatataccggaaataaactacctgcaaccgtggatggccgcaacgggcactggtag

SEQ ID NO: 140533 - protein, 549 aa, Triticum aestivum
MDFFTEYGEGNRYKIEEVIGKGSYGVVCSALDTHTGEKVAIKKINDIFEHVSDATRILREIKLLRLLRHPDIVEIKHILLPPSRREFKDIYVVFELMESDLHQVIKANDDLTPEHYQFFLYQLLRGLKYIHTANVFHRDLKPKNILANADCKLKICDFGLARVAISDTPTAIFWTDYIATRWYRAPELCGSFFSKYTPAIDIWSIGCIFAELLTGKPLFPGKNVVHQLDIITDLLGTPAPETIARIRNEKARRYLSSMRRKKPVPFTQKFPNADPLALNLLERMLAFDPKYRPSAEEALADLYFKNIASVDREPSAQPITKLEFEFERRRITKDDIRELIYREILEYHPNMLREFLEGAEPTNFMYPSAVDHFKKQFTFLEEHYAKGSTAAPPERQHNSLPRPSVIYSDNRPQGSDSRPQGAANITDDLSRCIIRDNAQKPRRDPASVGANRVPKGAAVARPGKVVGSALRYGNCSTSGTEQYEQRRVITSQGIVPNGVPSGSSYPRRNNTCKSETGEAERIDVSQAGPPKPYTGNKLPATVDGRNGHW

SEQ ID NO: 140534 - DNA, 981 bp, Triticum aestivum; identical to SEQ ID NO: 63137
  CDS (1)..(981)

SEQ ID NO: 140535 - protein, 326 aa, Triticum aestivum; identical to SEQ ID NO: 63138

SEQ ID NO: 140536 - DNA, 1842 bp, Triticum aestivum
  CDS (1)..(1842)
atgcagcaggatcagcgcaagaagagttccgcagaggccgagttttttacggagtacggcgacgcaagtcgatacaagattcaggaaatcgttggaaagggcagctatggtgtcgtgtgctccgcaatagacgtccacaccggagagaaagtggcgataaaaaagatacatgatatctttgagcacatatctgatgctgcacggattctccgtgagatcaagcttctgaggctcttaagacatcctgacattgttgagatcaagcatattatgttacctccatcgagaagagacttcaaagatatttatgtcgtttttgagctcatggagtctgatctccaccaggttataaaggctaatgatgacttgacaaaggagcattaccaattctttctttaccaattactccgggctctgaaatacattcacactgctaatgtttatcaccgggacctaaagccaaagaatatattggcaaattccaactgcaaactgaagatttgtgattttggattggcacgagttgcattcaacgatacccccacaacaatcttttggacggattatgttgcgacaagatggtatagagctccagagctctgtggttccttcttttcaaagtatacacccgccattgatgtctggagcatcggatgcatctttgctgaggtcttgacaggaaaacctttgtttcctggtaaaaatgttgtacatcagttagatctgatgactgatcttctgggcacaccatctatggatacaatctctcgggtccggaatgagaaagcaaggaggtatctgagcagcatgagaaagaaagagctgatttcattttcgcataaatttcccaatgcagatcctttggccttagacctgttgcaaaggcttttagcgtttgatccaaaggaccgcccaactgctgaagaggcattgtctcatccgtactttaaagggcttgccaaggttgagagagaaccatcctgccaaccaatcacaaaaatggagtttgagtttgagcgtagaagagtgacaaaagaagacataagggagcttatatttcgtgagatattggaataccatccacaattgctcaaagactacaccaatggaactgaaaggacaacctttctatacccaagtgctgttgatcaatttaggaagcagtttgctcatcttgaagaaaatagtgagaacggccctgtagttccaatggatagaaagcacacctctcttcctaggtctactattgttcactcagctccaattcatggcaaggaacaaccccgtattggcccatcaagggataagccttcgcctgacgagtcttataaaaatcatcgagattcagaaaaatattctggcaatgtccagagaacctcacaggctccacaaagagtgccaacagcaagaccaggaagggttgttggtccagttctgccttacgaaaatggtggcatgaaggatacatatgacccacgaagagtggcagcaatgaactccggttatcctccccaacaacaaatcccgcaaatatacggttattatcagacaccggcaaagtcagcttgctccgagccatcgcaggccgaaatgtatacgctgcaccagcaggcctatgcttgcgcaaacagttcaactgtgcctgatgttgctctggacatgagagcacctcccttccatcagtcagcagggccgaaaaggggttcttctgataggctatcagcggaatcaaacctatactcgagatcccttaatggcatagctccaactacaacaggagtggcggcaagtgctcacaggaaggtcggcgttgttccctacggtatgtcgcagatgtattag

SEQ ID NO: 140537 - protein, 613 aa, Triticum aestivum
MQQDQRKKSSAEAEFFTEYGDASRYKIQEIVGKGSYGVVCSAIDVHTGEKVAIKKIHDIFEHISDAARILREIKLLRLLRHPDIVEIKHIMLPPSRRDFKDIYVVFELMESDLHQVIKANDDLTKEHYQFFLYQLLRALKYIHTANVYHRDLKPKNILANSNCKLKICDFGLARVAFNDTPTTIFWTDYVATRWYRAPELCGSFFSKYTPAIDVWSIGCIFAEVLTGKPLFPGKNVVHQLDLMTDLLGTPSMDTISRVRNEKARRYLSSMRKKELISFSHKFPNADPLALDLLQRLLAFDPKDRPTAEEALSHPYFKGLAKVEREPSCQPITKMEFEFERRRVTKEDIRELIFREILEYHPQLLKDYTNGTERTTFLYPSAVDQFRKQFAHLEENSENGPVVPMDRKHTSLPRSTIVHSAPIHGKEQPRIGPSRDKPSPDESYKNHRDSEKYSGNVQRTSQAPQRVPTARPGRVVGPVLPYENGGMKDTYDPRRVAAMNSGYPPQQQIPQIYGYYQTPAKSACSEPSQAEMYTLHQQAYACANSSTVPDVALDMRAPPFHQSAGPKRGSSDRLSAESNLYSRSLNGIAPTTTGVAASAHRKVGVVPYGMSQMY

SEQ ID NO: 140538 - DNA, 1209 bp, Triticum aestivum
  CDS (1)..(1209)
atggagcatccggcgccggcgccggagccgatgctgctcgacgagcagccccccaccgcagtcgcctgcgagaagaagcagcaggatggcgaggcgccgtatgcggaggggaacgacgccatgaccggtcacatcatctccaccaccatcggcggcaagaacggcgagcccaagcagacgattagctacatggcggagcgcgttgtgggcactggttcgtttggcatcgtctttcaggctaaatgcctggaaaccggggagacggtggccattaagaaggtactgcaggacagacggtacaagaaccgtgagctgcagcttatgcgttcgatgatccattccaatgttgtctccctcaagcactgcttcttctcaaccacaagtagagatgagctgtttctgaaccttgtcatggagtatgtcccggagacgctctaccgcgtgcttaagcactacagtaatgccaaacaggggatgccacttatctacgtcaagctttacacctatcagctattcagggggctggcgtacattcatactgttccaggagtttgccacagggatgtgaaaccacaaaatgttttggttgatcctctaacccatcaagtcaagatctgtgactttggaagtgcaaaagttctggtacctggtgaacccaacatagcatacatatgctctcgctactatcgtgctcctgagctcatatttggtgcaactgaatatacaacttcaatagacatatggtcagctggatgtgttcttgcagagctacttcttggtcagcctctgtttccaggagagactgcggttgatcagctagtggagattatcaaggttcttggtactccaacccgtgaggaaattcggtgcatgaaccccaactataccgagttcaggtttcctcagattaaggctcatccttggcacaagattttccacaagagaatgcccgctgaagctatagatcttgcctcccgccttctccagtattcaccaaatctacgttgcactgctcttgatgcatgtgcacattccttctttgatgagctacgtgagccgaatgcacgcttgccgaatggccgcccattccctcctctgttcaacttcaaacctgaactagcgaacgcctctccagagctcatcaacaggcttgttccggaacatgttcgacggcaaaatggcctcaacttcgcccatgctgggagctag

SEQ ID NO: 140539 - protein, 402 aa, Triticum aestivum
MEHPAPAPEPMLLDEQPPTAVACEKKQQDGEAPYAEGNDAMTGHIISTTIGGKNGEPKQTISYMAERVVGTGSFGIVFQAKCLETGETVAIKKVLQDRRYKNRELQLMRSMIHSNVVSLKHCFFSTTSRDELFLNLVMEYVPETLYRVLKHYSNAKQGMPLIYVKLYTYQLFRGLAYIHTVPGVCHRDVKPQNVLVDPLTHQVKICDFGSAKVLVPGEPNIAYICSRYYRAPELIFGATEYTTSIDIWSAGCVLAELLLGQPLFPGETAVDQLVEIIKVLGTPTREEIRCMNPNYTEFRFPQIKAHPWHKIFHKRMPAEAIDLASRLLQYSPNLRCTALDACAHSFFDELREPNARLPNGRPFPPLFNFKPELANASPELINRLVPEHVRRQNGLNFAHAGS

SEQ ID NO: 140540 - DNA, 1110 bp, Triticum aestivum; identical to SEQ ID NO: 63139
  CDS (1)..(1110)

SEQ ID NO: 140541 - protein, 369 aa, Triticum aestivum; identical to SEQ ID NO: 63140

SEQ ID NO: 140542 - DNA, 1131 bp, Triticum aestivum
  CDS (1)..(1131)
atggatacctccggcggcggcgccgccgcgggcggggccgcgcagatccaggggatggcgacacacggcggccgctacgtgctctacaacgtctacggcaacctcttcgaggtcgcctccaagtacgcccctcccatccgccccatcggccgaggcgcctacggcattgtctgcgcggcggttagttcggatacaggagaggaggttgcgatcaagaagattggaaatgcgtttgacaaccacatcgacgccaagcggacgctgagagaaataaagcttcttcgccacatggaccatgagaatattcttgccataaaggatttaatacgccccccaagaagagatgattttaaggatgtgtacattgttactgagttgatggacacggatctccaccagatcattcgctcaaatcaatcattgactgacgaccattgccagtacttcttgtatcagttgcttcgagggctaaaatatgtgcactcagcaaatgtcttgcaccgtgatctgaagccaagcaatttgttcctaaacgcaaattgcgacctcaagattgcagactttgggcttgcaaggaccacttcagaaactgatctcatgacagagtatgtggtcactcgttggtaccgagcaccagagttgctgttgaactgttcacaatatactgctgcaattgatgtctggtcagttgggtgcatacttggtgaaattattactcgtcaacccctgtttcctggaagagattacatccaacaattaaaattgatcactgagctgataggatcaccagatgattcgagcctaggatttcttcggagtgataatgcacgaagatacatgaagcaattaccacagtacccaaggcaggacttccgcctgcgcttccgcaacatgtctgatggtgcagttgatctattagagagaatgctggtgtttgacccaagcagacgcatcactgttgatgaggctctgcatcacccatacttggcttctcttcatgacatcaacgaagaacccacttgcccggcacctttcagctttgattttgagcaaccatcttttacagaagaacatatgaaagagctcatctggagggaaactttagcatttaaccctgatcctccctactaa

SEQ ID NO: 140543 - protein, 376 aa, Triticum aestivum
MDTSGGGAAAGGAAQIQGMATHGGRYVLYNVYGNLFEVASKYAPPIRPIGRGAYGIVCAAVSSDTGEEVAIKKIGNAFDNHIDAKRTLREIKLLRHMDHENILAIKDLIRPPRRDDFKDVYIVTELMDTDLHQIIRSNQSLTDDHCQYFLYQLLRGLKYVHSANVLHRDLKPSNLFLNANCDLKIADFGLARTTSETDLMTEYVVTRWYRAPELLLNCSQYTAAIDVWSVGCILGEIITRQPLFPGRDYIQQLKLITELIGSPDDSSLGFLRSDNARRYMKQLPQYPRQDFRLRFRNMSDGAVDLLERMLVFDPSRRITVDEALHHPYLASLHDINEEPTCPAPFSFDFEQPSFTEEHMKELIWRETLAFNPDPPY

SEQ ID NO: 140544 - DNA, 1797 bp, Triticum aestivum
  CDS (1)..(1797)
atgcagcaggcgcagcggagcaagagttcggcggaggtggacttcttcacggagtacggcgacgccaaccggtacaagatccaggaggtcattggcaaggggagctatggggttgtgtgctctgcccttgatctgcagaccaggcagaaagtggccatcaagaagatacacaatatcttcgagcatacctccgacgccgcgcggatcctccgtgagatcaagcttctgaggctcctacggcatcccgacgtcgtcgagatcaagcacattatgctgcctccctccagaaaggacttcaaagacatctacgttgtttttgagctcatggagtctgatctccaccaagttattaaggccaacgatgacttgacaaaagagcattaccagttctttctctaccagctactccgagccctcaaatacattcatactgctagtgtttaccatcgtgacctgaagcccaagaatattttggcgaattctaactgcaaattgaagatatgtgattttggactagcacgagttgcattcaacgataccccaacaactgtcttctggacggattatgtcgcgacaagatggtatagagctccagagctctgcggatccttcttcacaaagtatacacctgccattgacatttggagcattgggtgcatttttgccgaggtgctgacaggaaagcctttgtttcctggtaaaaatgttgtccatcagttagacttgatgactgatcttctaggcacaccttcaatggatacaatttctcgggtccgaaacgagaaagcaagaaggtacttgagcagtatgagaaagaaagacccggtcccattttctcagaagtttcctaatgcagatcctttgggagtaaaactcttggagaagctattagcctttgatccaaaggaccgtccaactgcggaagaggcattgactgatccgtactttagaggcctttccaagccagagagggaaccatcctgtcagccaatcagaaaaatggagtttgactttgagcacagcagagtgtcaaaggatgatataagggagctgatattccaggagatattggaatatcatccgcaattgctgaagagctacactgatggcacagagaggacaacctttctctacccaagtgctgtcgatcatttcaagaagcagttctctcatcttgaagaaagcgatggcagcggccctgtagtcccagcagatagaaaacatgcatctcttcctaggtccactattgttcactcgactccaattcccgcgaaggacactcggccgctctttggcaagccttgcaacaaaacttcctcggagacagggaggtatgctgggaatggtcacggtgcttctcaggcttcacatgcggcacaagcagtggtttcacggagagctgctggttcagcgttaccttatgacgcggcaagcaggccgacgattagcccaggatgccctcctcagcagcagatcccacaaatgtatgggcaatatcagcatcaagcacctgctggtgctgggataccacaggccatggggggctatgcctgtggtgggtacaccaaaggcacagcgccgaatgctgctgctgctccagccatgagagcacccccctaccgccaccttccggcggggcagaagaacggtccgctggacagactggcggtggagaccaccgacatatacacgcggtcgctcaacggcatcgttgccgccgccgcagcatcggctggcactgccagcgcccacaggaaggttggcgccgtcccgtttggcatgccgacgacttactag

SEQ ID NO: 140545 - protein, 598 aa, Triticum aestivum
MQQAQRSKSSAEVDFFTEYGDANRYKIQEVIGKGSYGVVCSALDLQTRQKVAIKKIHNIFEHTSDAARILREIKLLRLLRHPDVVEIKHIMLPPSRKDFKDIYVVFELMESDLHQVIKANDDLTKEHYQFFLYQLLRALKYIHTASVYHRDLKPKNILANSNCKLKICDFGLARVAFNDTPTTVFWTDYVATRWYRAPELCGSFFTKYTPAIDIWSIGCIFAEVLTGKPLFPGKNVVHQLDLMTDLLGTPSMDTISRVRNEKARRYLSSMRKKDPVPFSQKFPNADPLGVKLLEKLLAFDPKDRPTAEEALTDPYFRGLSKPEREPSCQPIRKMEFDFEHSRVSKDDIRELIFQEILEYHPQLLKSYTDGTERTTFLYPSAVDHFKKQFSHLEESDGSGPVVPADRKHASLPRSTIVHSTPIPAKDTRPLFGKPCNKTSSETGRYAGNGHGASQASHAAQAVVSRRAAGSALPYDAASRPTISPGCPPQQQIPQMYGQYQHQAPAGAGIPQAMGGYACGGYTKGTAPNAAAAPAMRAPPYRHLPAGQKNGPLDRLAVETTDIYTRSLNGIVAAAAASAGTASAHRKVGAVPFGMPTTY

SEQ ID NO: 140546 - DNA, 1650 bp, Triticum aestivum
  CDS (1)..(1650)
atggacttttttaccgagtatggtgagggaaacagatacaagattgaagaggttatagggaaagggagttatggcgtggtctgctctgctttggatactcacacgggtgagaaagttgctatcaagaagataaacgacatctttgaacatgtgtctgatgccacacggatactccgcgagatcaagttgcttaggctcctaagacatcccgatatcgtggaaattaaacatattcttcttcctccgtcgaggagagagttcaaggatatatacgttgttttcgaactcatggagtctgatttgcaccaagttataaaggcgaatgatgacttgactccagagcattatcagtttttcttgtatcagttgctccgaggattgaaatacatacatacagcaaatgtatttcatcgagatctcaaaccaaagaatatcttggctaatgctgattgtaagctcaaaatatgtgatttcggtcttgcaagggtagctataagtgatactccaaccgcaatattttggacggattatatcgcaacaaggtggtaccgagcacctgaactatgtggatcttttttctccaagtacacaccagcaatagatatatggagtattggatgtatatttgcggaacttctaactggcaaacctctttttcctgggaaaaatgtggtgcatcaacttgatataatcacagatctcctgggaacgcctgctccagaaacaattgctaggattcgaaatgagaaggccaggcgctacttgagcagtatgaggcggaaaaagcctgtaccgttcacgcataagtttccaaatgcagatccacttgcattaaatttgttagagagaatgctagcatttgatccaaaagacaggccaagtgctgaagaggctcttgctgatctttatttcaagaacattgcgagtgtggatagggagccttctgcacagcccattactaagcttgagttcgagtttgagagacgaagaattacgaaggacgacataagggaactcatatacagagaaattctggaatatcatccaaacatgctgagggaattccttgagggggctgagccaactaatttcatgtacccaagtgcagtagatcatttcaaaaagcaattcacattccttgaagagcattatgcaaagggatcaacagcagcaccgcctgagaggcaacataattcattaccaaggccgagtgttatctattcggataaccggccacagtgttcagatagccgaccacagggtgctgccaacattacggatgatctttccaggtgtataatcagagataatgcacaaaagccacgcagagatcctgcttcagttggtgcaaacagagttcctcaaggtgctgccgttgcaaggcctggtaaagtggttggttcggcacttcgttatggtaactgttcaacatctggtactgagcaatatgaacagcgaagggtcgtcacaagccaaggaattgttccaaacggtgttccttcgggcagctcataccctagaagaaataacacctgcaagagcgaaacaggtgaagctgaaaggattgacgtgagccaagctgggccaccaaagccatataccggaaataaactagctgcaaccgtggatggccgcaacgggcactggtag

SEQ ID NO: 140547 - protein, 549 aa, Triticum aestivum
MDFFTEYGEGNRYKIEEVIGKGSYGVVCSALDTHTGEKVAIKKINDIFEHVSDATRILREIKLLRLLRHPDIVEIKHILLPPSRREFKDIYVVFELMESDLHQVIKANDDLTPEHYQFFLYQLLRGLKYIHTANVFHRDLKPKNILANADCKLKICDFGLARVAISDTPTAIFWTDYIATRWYRAPELCGSFFSKYTPAIDIWSIGCIFAELLTGKPLFPGKNVVHQLDIITDLLGTPAPETIARIRNEKARRYLSSMRRKKPVPFTHKFPNADPLALNLLERMLAFDPKDRPSAEEALADLYFKNIASVDREPSAQPITKLEFEFERRRITKDDIRELIYREILEYHPNMLREFLEGAEPTNFMYPSAVDHFKKQFTFLEEHYAKGSTAAPPERQHNSLPRPSVIYSDNRPQCSDSRPQGAANITDDLSRCIIRDNAQKPRRDPASVGANRVPQGAAVARPGKVVGSALRYGNCSTSGTEQYEQRRVVTSQGIVPNGVPSGSSYPRRNNTCKSETGEAERIDVSQAGPPKPYTGNKLAATVDGRNGHW

SEQ ID NO: 140548 - DNA, 1233 bp, Triticum aestivum
  CDS (1)..(1233)
atggcctcggttggtgcggtgcgtccttcctcacgctttcagaatgacacaagtactagtggtgatgccgaccgacttccgaacgagatgggcaatatgagcataagggatgacagggaccctgaagatattgtagtcaacggcaatgggacggaaccaggccatattatagtcacaagcattgagggaagaaatgggcaagcaaaacagaccattagctacatggctgagcgtgtggttggtcatgggtcatttggaactgttttccaggctaagtgtcttgaaactggcgagacggtggctataaagaaggttcttcaagacaagagatataagaaccgtgagctgcaaacgatgagagttcttgaccacccaaatgttgtggttttaaaacattgctttttctcgaagactgagaaggaggagctttacctcaacctggtgcttgagtatgtgccagagactgctcatcgtgtcattaagcattacaacaagatgaaccaacgcatgcccttgatatatgcaaaactgtacatgtatcagatatgtagatctttggcatacattcacaacagcattggagtatgtcacagagacatcaagcctcaaaatcttctggtgaatccacatactcatcagttgaaattatgtgacttcggaagcgcgaaagtgttggtaaaaggagaaccaaatatttcctatatctgttcaaggtactatagagccccagagctcatatttggtgctactgaatacacaacggcaattgacgtttggtctgctggctgtgttcttgctgaactccttctaggacagcctatattccctggcgatagtggtgtcgatcagcttgttgaaatcatcaaggttttaggtacccctacacgagaagaaattaagtgcatgaatccaaattatactgagtttaaattcccgcaaatcaaagctcacccatggcacaagatcttccataaaagaatgcctgctgaagcagtagatcttgtctccagactcttgcaatattcaccaagcctgcgttcaactgctttggaagcattaattcatccattcttcgatgaactccgggacccaaacacccgcttaccgaacggccgttttcttcctcccctctttaactttaagccccacgagttgaagggcgtgccgatggatatcctggtgaagctcatccctgaacatgctcggaagaactgtgcctttgtaggatggtga

SEQ ID NO: 140549 - protein, 410 aa, Triticum aestivum
MASVGAVRPSSRFQNDTSTSGDADRLPNEMGNMSIRDDRDPEDIVVNGNGTEPGHIIVTSIEGRNGQAKQTISYMAERVVGHGSFGTVFQAKCLETGETVAIKKVLQDKRYKNRELQTMRVLDHPNVVVLKHCFFSKTEKEELYLNLVLEYVPETAHRVIKHYNKMNQRMPLIYAKLYMYQICRSLAYIHNSIGVCHRDIKPQNLLVNPHTHQLKLCDFGSAKVLVKGEPNISYICSRYYRAPELIFGATEYTTAIDVWSAGCVLAELLLGQPIFPGDSGVDQLVEIIKVLGTPTREEIKCMNPNYTEFKFPQIKAHPWHKIFHKRMPAEAVDLVSRLLQYSPSLRSTALEALIHPFFDELRDPNTRLPNGRFLPPLFNFKPHELKGVPMDILVKLIPEHARKNCAFVGW

SEQ ID NO: 140550 - DNA, 1227 bp, Triticum aestivum
  CDS (1)..(1227)
atgacctcatttggtgtcgcaccggcatctgggctgagagatgctggtggtagtagtgaagtggataaattgccggatgaaattagtaatatgagaataagtgacgaaaaggaagtagaggcaacaatcatcaatgggaatggaacagaagctggtcatattatagtcacgactatcggaggcagagatggccaaaggaagcagacaataagttacatggctgaacgtgtcattggtcaaggatcatttggtgttgtgttccaggcaaaatgtttggagacaagtgagacagtagctatcaagaaggttcttcaggataagagatacaagaaccgtgagttgcaaatgatgcgtctacttgaccatccaaatgtcgtctctctcaaacactgcttcttctcaaccactgaaaaggatgaactctttctgaatcttgtgcttgagtatgttcctgagacagtccaccgtgtcatcagacactacaacaagatgaaccaacgcatgccactgatatatgtgaagctatatacttatcagatttgtagggcactggcttacatccatcgcaccgttggtgtttgccacagggacataaaaccacagaatcttctggttaacccacacactcatcagctgaagatctgtgatttcggaagtgcaaaagttctggtgaaaggcgaacccaatatatcatacatctgctctaggtactatagggcaccggagcttatttttggtgctactgagtacacgacagcaatcgacatctggtctgctggatgtgttcttgctgaacttctgacaggacagcctctgtttcccggtgaaagtggagttgatcaacttgttgagattatcaagattctgggcacacctacaagggaagaaatcaaatgtatgaacccgaactacacagaattcaagtttccccaaatcaaggcccatccatggcataaggtgttccacaagcgaatgccacctgaagcagtggacctggtttccaggcttcttcagtactcaccgcaccttcggtcctcagctctggatgctctgatccatccgttcttcgatgagctccgtgacccaaacacccgcctccccaacggccggttccttcctcccctcttcaacttcaagccccacgagctgaagggacttccgatggagatcgcggcgaagctggtcccggagcacgcgaggagccaatgcccgttcctagggctgtag

SEQ ID NO: 140551 - protein, 408 aa, Triticum aestivum
MTSFGVAPASGLRDAGGSSEVDKLPDEISNMRISDEKEVEATIINGNGTEAGHIIVTTIGGRDGQRKQTISYMAERVIGQGSFGVVFQAKCLETSETVAIKKVLQDKRYKNRELQMMRLLDHPNVVSLKHCFFSTTEKDELFLNLVLEYVPETVHRVIRHYNKMNQRMPLIYVKLYTYQICRALAYIHRTVGVCHRDIKPQNLLVNPHTHQLKICDFGSAKVLVKGEPNISYICSRYYRAPELIFGATEYTTAIDIWSAGCVLAELLTGQPLFPGESGVDQLVEIIKILGTPTREEIKCMNPNYTEFKFPQIKAHPWHKVFHKRMPPEAVDLVSRLLQYSPHLRSSALDALIHPFFDELRDPNTRLPNGRFLPPLFNFKPHELKGLPMEIAAKLVPEHARSQCPFLGL

SEQ ID NO: 140552 - DNA, 1755 bp, Triticum aestivum
  CDS (1)..(1755)
atgcagccggaccagcaccagcagcagcagcggaggaagggttcatcggagatggacttcttcagtgaatatggcgatgctaatagatacaaaattcaggaagtcatcggtaaagggagttacggtgtcgtttgttcagctattgaccaacatactggcgacaaggtggcaatcaagaaaatacacaatatctttgagcatttatctgatgctgctcggatcctccgtgagatcaaattactccgcctattgagacatcctgatatagttgagatcaggcatataatgttgcctccgtcaaggagggatttcaaggatatttatgtcgtctttgagctgatggatacagacctccaccaagtcatcaaggccaatgatgacttaaccaaagaacaccatcagttctttctctatcagatgcttcgtgcactgaaatatattcataccgctaatgtttatcatcgtgatttgaagccaaagaatatattggcaaatgctaactgtaaactcaaaatatgtgattttgggctagcacgagtggcattcaatgacactcccacgactgtattttggacggattatgttgctactagatggtatagggctcctgagctttgtggatctttctttactaagtattcaccagctattgacatatggagtattggttgcatttttgcggagattttaactgggaaacctttgtttcctggtaaaaatgtagttcaccagttggatttaatgactgatctcttgggtacgccgtcactggatactgtttccaggatccggaatgagaaggcaaggaggtacttgagtagtatgaggaaaaaacaaccggtatgtttttctgagaggttccccaaagcagatcctgctgcactcaaacttatgcagcggcttttagcatttgaccccaaggatagaccaacggcagaagaggcgttagctgatccatattttaaaggccttgggaaggtagagagagaaccatcctgccagccaatatcgaaatttgagtttgagtttgaacggaaaaaggtgacaaaagaggacgtaaaggaacttatattccgtgagatattggagtatcatcctcaacttctcaaggattacatgaatggaactgaaaaaacgaacttcctatatcctagtgctgtagacaatttccgaaggcaatttgctaacttggaggaaaatggagggaagggaggggcaatcgttccatcggacaggaagcatgtttcactccccaggactactacagttcattctacaccaattcctccaaaagatcagaagtcttcccaagttccccaaaggattccaacaggtagaccaggaagagtggttggcccggtaataccatttgagaattcatgtgctatggatccttacagtcaacgaagggtggcgaggaatccagtacttcctgcagctgctaccaatgtatcagcatacgcataccaccgaaagtcagacagttcagagagagagttacagcaggagcttgaaaaagaccgcatgcagtaccagccgatgcagcgtttcatggatgccaagatggtctcccctgacttgaggtctacctcctattacatgccaaagggtgtcccaaaagccgatgtagcagaaaggactggtttgcagccaaacatgatgcagggaattgccccgtttaatggcattgctgcagttggaggtagctacaataaggccagtgctgttcagtatggagtttcaaggatgtactaa

SEQ ID NO: 140553 - protein, 584 aa, Triticum aestivum
MQPDQHQQQQRRKGSSEMDFFSEYGDANRYKIQEVIGKGSYGVVCSAIDQHTGDKVAIKKIHNIFEHLSDAARILREIKLLRLLRHPDIVEIRHIMLPPSRRDFKDIYVVFELMDTDLHQVIKANDDLTKEHHQFFLYQMLRALKYIHTANVYHRDLKPKNILANANCKLKICDFGLARVAFNDTPTTVFWTDYVATRWYRAPELCGSFFTKYSPAIDIWSIGCIFAEILTGKPLFPGKNVVHQLDLMTDLLGTPSLDTVSRIRNEKARRYLSSMRKKQPVCFSERFPKADPAALKLMQRLLAFDPKDRPTAEEALADPYFKGLGKVEREPSCQPISKFEFEFERKKVTKEDVKELIFREILEYHPQLLKDYMNGTEKTNFLYPSAVDNFRRQFANLEENGGKGGAIVPSDRKHVSLPRTTTVHSTPIPPKDQKSSQVPQRIPTGRPGRVVGPVIPFENSCAMDPYSQRRVARNPVLPAAATNVSAYAYHRKSDSSERELQQELEKDRMQYQPMQRFMDAKMVSPDLRSTSYYMPKGVPKADVAERTGLQPNMMQGIAPFNGIAAVGGSYNKASAVQYGVSRMY

SEQ ID NO: 140554 - DNA, 1221 bp, Triticum aestivum
  CDS (1)..(1221)
atggcttcagtaggggttgctccgtctgggcacaagaacagcagaggcaccagcatgggtgctgagaagctaccagatcagatgaacgatttgaagataagagatgataaggaagtggaagccactattattaatggcaagggaacagagactggacacataattgtcacaactactggtggcaaaaatggtcagcccaaacagaccgtgagctacatggctgagcggattgttggtcaaggttcatttggtattgtattccaggctaaatgtttggagacaggggaaactgttgccattaagaaggtccttcaggataagcgctacaagaaccgtgagctacagaccatgcgcctgcttgaccacccaaatgttgtagctctgaagcattgtttcttttctacaactgagaaggatgaactgtatctaaacttggttctcgagtatgtgcctgagactgtccatcgtgttgtcaagcattacaacaagatgaaccagcgcatgccactaatctatgtgaagctgtatacataccagatatgtagggctctggcttacattcatggcagcattggagtttgccacagggatatcaagccacagaatcttttggtaaacccacatactcaccagctgaaactgtgtgacttcgggagcgcaaaagttcttgttaagggagaaccaaacatatcatacatttgttcccgatactatagggctccagagctcatatttggtgctactgagtacactacagccattgacatttggtctgctggatgtgttcttgctgagcttatgctagggcagcctctgtttcctggtgaaagtggtgtggaccagcttgttgaaatcatcaaggtccttggtacccctacaagggaagaaattaaatgcatgaacccaaattatacagagttcaaattcccacagattaaagcacacccatggcacaaggtattccataaaaggatgccacctgaagctgttgatctagtctctcggctcctccagtactcgcccaacctaagatgcactgctgttgaggcacttgttcaccccttctttgatgagcttcgggacccgggtacccgccttccgaatagccgctttctgcctcctctttttaacttcaagcctaacgaactgaaaggaatcccagcggatgttgcggcaaaattgatcccagatcatgcgagaaagcagagctcccatgcgtga

SEQ ID NO: 140555 - protein, 406 aa, Triticum aestivum
MASVGVAPSGHKNSRGTSMGAEKLPDQMNDLKIRDDKEVEATIINGKGTETGHIIVTTTGGKNGQPKQTVSYMAERIVGQGSFGIVFQAKCLETGETVAIKKVLQDKRYKNRELQTMRLLDHPNVVALKHCFFSTTEKDELYLNLVLEYVPETVHRVVKHYNKMNQRMPLIYVKLYTYQICRALAYIHGSIGVCHRDIKPQNLLVNPHTHQLKLCDFGSAKVLVKGEPNISYICSRYYRAPELIFGATEYTTAIDIWSAGCVLAELMLGQPLFPGESGVDQLVEIIKVLGTPTREEIKCMNPNYTEFKFPQIKAHPWHKVFHKRMPPEAVDLVSRLLQYSPNLRCTAVEALVHPFFDELRDPGTRLPNSRFLPPLFNFKPNELKGIPADVAAKLIPDHARKQSSHA

SEQ ID NO: 140556 - DNA, 1413 bp, Zea mays
  CDS (1)..(1413)
atggagagatatacaattatcaacgaagttggtgatggaacatttgggagtgtttggcgtgcaaccaataaggaaagcggcgaagtggttgcgatcaagaagatgaagaaaaagtattattcttgggaagagtgcataaacctccgtgaagtgaagtccctgcgaaggatgaaccatccaaacattgtaaagctcaaagaagtcataagagagagtgatacgctgttctttgtttttgagtacatggaatgcagtctttatcagctgatgaagagcagagggaagcccttttcagagactgaaatccgaaactggtgctttcaaatatttcaagctctgagtcacatgcaccagcgtggatattttcaccgtgaccttaagcctgaaaatttgcttgttacaaaggaactcatcaagatagcggattttgggcttgctcgtgaaattttttctgagccaccttatacggaatatgtgtccactcgttggtatcgtgcccctgaagttcttcttcaagctactgtttataatgctgcagttgacatgtgggcaatgggtgccattatcgcggagctattttcactgcgacctctttttcctggatcaagtgagccagatgaactttacaaaatctgtagcattattggcactccaaatcagcgtacttggcctgaaggactgcagctagcagcatctatgggttttcagttccctcagtgtgaaagtgtacatctttcggaagtggttcctttagcaagcaaagatgcaatcaatcttatctcgtggctttgctcatgggacccacgaagaaggccaacagcagtggaggttttgcagcatcccttctttcagccatgcttctatgtcccaccttcacttcgcttcaaatctactggatatgcatcaacgccaccatcagctggggctaaaggagctgttgatcagaagaacattaggagatactacatgggtactgtacccaatgcgaggccaacagttaattactcgtacttgagaaacaatgctcctgcaagagcagttggtgcacaaaggaaattggagttggattatcagctcccagagactaataaccataataaggtgacaaaggcagaagcgatgaaccagtcttggtccagaccagcagcagtaaggagcaatgcaggaaatcatcttgccaacgacctgaacccccgtgtacctgaccttgccgagaagctgtctcagttgtcaatgggccccaacagggtgtcgggtttgggttccgagaggtttgttagaacccatgagaacgctgccaagcgccccttgcccgtgggatccagggcgtggcatggtccagctgaccccttccggcgcccatacgagatgccaggtgatagaactctccttccaaggaatctcgttcgctga

SEQ ID NO: 140557 - protein, 470 aa, Zea mays
MERYTIINEVGDGTFGSVWRATNKESGEVVAIKKMKKKYYSWEECINLREVKSLRRMNHPNIVKLKEVIRESDTLFFVFEYMECSLYQLMKSRGKPFSETEIRNWCFQIFQALSHMHQRGYFHRDLKPENLLVTKELIKIADFGLAREIFSEPPYTEYVSTRWYRAPEVLLQATVYNAAVDMWAMGAIIAELFSLRPLFPGSSEPDELYKICSIIGTPNQRTWPEGLQLAASMGFQFPQCESVHLSEVVPLASKDAINLISWLCSWDPRRRPTAVEVLQHPFFQPCFYVPPSLRFKSTGYASTPPSAGAKGAVDQKNIRRYYMGTVPNARPTVNYSYLRNNAPARAVGAQRKLELDYQLPETNNHNKVTKAEAMNQSWSRPAAVRSNAGNHLANDLNPRVPDLAEKLSQLSMGPNRVSGLGSERFVRTHENAAKRPLPVGSRAWHGPADPFRRPYEMPGDRTLLPRNLVR

SEQ ID NO: 140558 - DNA, 1119 bp, Zea mays
  CDS (1)..(1119)
atggattcctccggcggcggcggtggagcgcagatcaagggtatggcgacgcacgggggccgctacgtgctgtacaacgtgtacggaaacctcttcgaggtctcctccaagtacgccccacccatccgccccatcggtcgcggcgcctacggcattgtctgcgcggctgtcaactcgcagtcaggggaggaggttgcgatcaagaaggttggcaatgcgttcgacaaccacatcgacgccaagcggacgctcagggaaatcaagctgctgcgccacatggaccatgagaacatccttgccttaaaggatgtaattcggcccccaactagagagaactttaatgacgtgtacattgttactgagttaatggatacagatctccatcagatcgtacgctcaaatcagccattgactgatgatcattgccagtacttcttgtatcagttgttacgagggctaaaatatgtgcactcagcaaatatattgcaccgcgatctgaagccgagcaatttgttcctaaatgcaaattgtgacctcaagattgcagactttgggcttgcaaggaccacttcagagacagatctcatgacagagtatgtggtcactcgttggtaccgggcaccagagctgctgttgaactgttcacagtatactgctgccattgatgtctggtcagttggatgcatactaggtgaaatcgttactcgtcaacccctgtttcctggacgggattacatccagcaattaaaattgatcactgagctcataggctctccagatgatgcaagcctgggatttcttcgaagtgataatgcaaaaagatacatgaaacaactaccacagtttccaagacaggacttccgcctgcgtttccgcaacatgtctcctggcgcagtcgatttgttggaaaggatgcttgtgtttgatccaagcagacggattacagttgatgaggctctgcatcatccatacttggcttcacttcatgagatcaatgatgaacctacctgccctgcacctttcagctttgattttgagcaaccatcctttacagaagcgcatataaaagaactcatctggagggaatctttagcatttaacccagagcctccctactaa

SEQ ID NO: 140559 - protein, 372 aa, Zea mays
MDSSGGGGGAQIKGMATHGGRYVLYNVYGNLFEVSSKYAPPIRPIGRGAYGIVCAAVNSQSGEEVAIKKVGNAFDNHIDAKRTLREIKLLRHMDHENILALKDVIRPPTRENFNDVYIVTELMDTDLHQIVRSNQPLTDDHCQYFLYQLLRGLKYVHSANILHRDLKPSNLFLNANCDLKIADFGLARTTSETDLMTEYVVTRWYRAPELLLNCSQYTAAIDVWSVGCILGEIVTRQPLFPGRDYIQQLKLITELIGSPDDASLGFLRSDNAKRYMKQLPQFPRQDFRLRFRNMSPGAVDLLERMLVFDPSRRITVDEALHHPYLASLHEINDEPTCPAPFSFDFEQPSFTEAHIKELIWRESLAFNPEPPY

SEQ ID NO: 140560 - DNA, 1227 bp, Zea mays
  CDS (1)..(1227)
atggcttcagctggtgtagccccatctgggtacaaaaacagcagcagcactagcattggtgccgagaagttgcaagatcagatgaacgagctaaagattagagatgataaggaagttgaagcaaccataattaatgggaaagggactgaaactgggcacataattgtcaccactactggtggcaagaatggtcaaccaaaacagacagtgagctacatggctgagcgcattgtaggtcaaggttcttttgggatcgtcttccaggctaagtgtttggagacgggtgagactgttgccataaagaaggttcttcaggataagcgttacaagaaccgtgagttgcagaccatgcgccttcttgaccaccctaatgttgttgctttgaagcattgcttcttttcaactactgagaaggatgagctttatctgaacttggtccttgagtatgtgccggagacagttcatcgagttgtgaagcatcacaacaagatgaaccaacgcatgccacttatttatgtgaagctgtatatgtaccagatatgtagggcattggcttacattcatggcactattggtgtctgccacagagatattaagccacaaaaccttctggtgaacccacacacccaccagcttaaactatgtgactttggcagtgcaaaagttctggtcaagggggaaccaaacatatcgtacatctgctcccgatactatagggctccagagctcatatttggtgccactgagtataccacagcgattgacatttggtctgctggatgtgttcttgctgagcttatgctagggcagcctttgtttccgggtgaaagtggtgtggaccaacttgttgaaatcatcaaggtcctcggtacgccaacaagggaagaaattaaatgcatgaacccaaattacacagagtttaagttcccacaaatcaaagcacacccatggcacaaggtattccacaaaaggatgccgccagaagctgttgatctggtctctcggctactccagtactccccaaatctgagatgcactgctatggaggcacttgttcacccattctttgatgagcttcgagatcctaatactcgccttccaaatggtcgctttttgccaccactattcaatttcaagcctcacgaacttaaaggagtcccatcagacattgtcgcgaaattgattccagaacatgcaaagaagcaatgctcctatgttggattgtga

SEQ ID NO: 140561 - protein, 408 aa, Zea mays
MASAGVAPSGYKNSSSTSIGAEKLQDQMNELKIRDDKEVEATIINGKGTETGHIIVTTTGGKNGQPKQTVSYMAERIVGQGSFGIVFQAKCLETGETVAIKKVLQDKRYKNRELQTMRLLDHPNVVALKHCFFSTTEKDELYLNLVLEYVPETVHRVVKHHNKMNQRMPLIYVKLYMYQICRALAYIHGTIGVCHRDIKPQNLLVNPHTHQLKLCDFGSAKVLVKGEPNISYICSRYYRAPELIFGATEYTTAIDIWSAGCVLAELMLGQPLFPGESGVDQLVEIIKVLGTPTREEIKCMNPNYTEFKFPQIKAHPWHKVFHKRMPPEAVDLVSRLLQYSPNLRCTAMEALVHPFFDELRDPNTRLPNGRFLPPLFNFKPHELKGVPSDIVAKLIPEHAKKQCSYVGL

SEQ ID NO: 140562 - DNA, 1197 bp, Zea mays
  CDS (1)..(1197)
atggacggcggggggcagcccccggacaccgagatgtcggaggccggcgcgggcggcggagggcagccgccgcagcagccactgccgccggtgggcgggggcgtgatgttggacaacatccaggcgacgctcagccacggcggccgcttcatccagtacaacatcttcggcaacgtgttcgaggtcaccgccaagtacaagccccccgtcctccccatcggcaagggcgcctacggcatcgtctgctcggcgctcaactccgagacggcggagcaggtggccatcaagaagatcgccaacgccttcgacaacaagatcgatgccaagcgcacgctccgcgagatcaagctgctccgccacatggaccacgagaatattgttgcaataagggatatcatacctcctgcgcagagggctgcattcaatgatgtgtatattgcatatgaattgatggatactgatctgcatcaaattattcgttcaaatcaagctttgtcagaggagcactgtcagtattttctttatcaaattcttcgtggcttgaagtatatacattcagcaaatgttcttcaccgtgacttgaagcctagcaatcttcttttgaatgcaaactgtgacctcaagatatgtgattttgggcttgctcgcaccacctcagaaactgattttatgactgaatatgttgtcacaagatggtatagagcaccagagcttttgttgaactcctcagaatatactgctgccatcgatgtgtggtctgtgggctgtatatttatggaactgatggaccgcaaacccttgtttcctggaagagaccatgtccatcagctacgtcttctaatggagctcattggcacgccaaatgagggtgatcttgattttgtaaatgaaaatgcaagaagatatatccgccaacttcctcgtcaccctagacagtccttacctgaaaaatttccacatgtacaacccttagcaattgacctggtggaaaagatgctgacttttgatcctagacagagaataactgttgaaggcgcacttgcacacccttacttggcatcacttcatgacataagtgatgagccaggctgctcaatgcccttcagctttgacttcgagcagcatgcattgtctgaagaacaaatgaaggatcttatctaccaagaggctcttgcattcaaccctgattatcagtag

SEQ ID NO: 140563 - protein, 398 aa, Zea mays
MDGGGQPPDTEMSEAGAGGGGQPPQQPLPPVGGGVMLDNIQATLSHGGRFIQYNIFGNVFEVTAKYKPPVLPIGKGAYGIVCSALNSETAEQVAIKKIANAFDNKIDAKRTLREIKLLRHMDHENIVAIRDIIPPAQRAAFNDVYIAYELMDTDLHQIIRSNQALSEEHCQYFLYQILRGLKYIHSANVLHRDLKPSNLLLNANCDLKICDFGLARTTSETDFMTEYVVTRWYRAPELLLNSSEYTAAIDVWSVGCIFMELMDRKPLFPGRDHVHQLRLLMELIGTPNEGDLDFVNENARRYIRQLPRHPRQSLPEKFPHVQPLAIDLVEKMLTFDPRQRITVEGALAHPYLASLHDISDEPGCSMPFSFDFEQHALSEEQMKDLIYQEALAFNPDYQ

SEQ ID NO: 140564 - DNA, 993 bp, Zea mays; identical to SEQ ID NO: 62727
  CDS (1)..(993)

SEQ ID NO: 140565 - protein, 330 aa, Zea mays; identical to SEQ ID NO: 62728

SEQ ID NO: 140566 - DNA, 1635 bp, Zea mays
  CDS (1)..(1635)
atggacttttttacagagtatggcgaggggagcaggtacaagatagaagaggtcatagggaaaggcagttacggtgtggtttgctctgccttggacactcatactggtgaaaaggtcgccataaagaagataaatgacatctttgagcatgtgtctgatgcgacaaggatacttagggaaatcaagttgcttagactcctgcggcatccggatatcgtggaaataaagcatattctacttcctccatcaaggagggaattcagggatatttacgtcgtgtttgaacttatggagtctgatttgcaccaagttataaaggctaatgatgacttaaccccagagcattatcagttcttcttgtatcagttgcttcgaggtttgaaatacatacacacagcaaatgtattccatcgagatctcaaaccaaaaaatattctggcaaatgctgattgtaagctcaaaatatgtgattttggcctagcaagagtagctttcagtgatactccaaccgcgatcttttggacagattatgttgcaactaggtggtaccgagcaccggagctgtgtggatcatttttctcaaagtatacaccagcgatagatatatggagtattggttgtatatttgcagaactattaactggaaaaccgcttttcccgggaaaaaatgtggtacatcaacttgatataattacagatctcatgggaacaccttctccagaagcaatatcgaggattcgtaatgagaaggccaggcgctacttgagtaatatgaggcggaaaaagcccataccttttacacagaagttcccaaatgcagatccacttgcattaggtttgttagagcgaatgctagcttttgagccaaaagacaggccaagtgctgaagaggctcttgctcatccttattttaagaatatagccaatgtggatagagagccttctgcacaagctgtcacaaagctcgaatttgagttcgagagacggagagtcactaaagatgacataagggaacttatatatagagaaattcttgagtatcatccaaagatgttgaaagaatttattgagggaactgagtcaagtggtttcatgtacccaagtgcagtagataattttaaaaagcagtttgcataccttgaggaacattatgccaagggatctacgggaactccacctgagaggcaacataactcattgccacggccttctgttgtctattcagacaaccaatcacaaagcacggccaatataacagaggatctttccaagtgtataatcagagaaaatgcacagaagtcacagcaatataatgcttcagttgcaaataaatttccatcccatgttcctcaaggtgctgctgcaaggcctggtaaagcagttggttcggtgctgcagtacaacctctctcaagcatccgctgctgagcaatatgagcagcgaagggctgctaggcacccagcagttgccccaaacaacatcccttctggaagctcataccccagaagaaatcagacctgcaagagcgagacaggcgacactgagaggatggacgtgaaccaagctgggcagccgaagtcctatgcagcaaacaaactacctgcaactgttgatggtcgcggcggccattggtag

SEQ ID NO: 140567 - protein, 544 aa, Zea mays
MDFFTEYGEGSRYKIEEVIGKGSYGVVCSALDTHTGEKVAIKKINDIFEHVSDATRILREIKLLRLLRHPDIVEIKHILLPPSRREFRDIYVVFELMESDLHQVIKANDDLTPEHYQFFLYQLLRGLKYIHTANVFHRDLKPKNILANADCKLKICDFGLARVAFSDTPTAIFWTDYVATRWYRAPELCGSFFSKYTPAIDIWSIGCIFAELLTGKPLFPGKNVVHQLDIITDLMGTPSPEAISRIRNEKARRYLSNMRRKKPIPFTQKFPNADPLALGLLERMLAFEPKDRPSAEEALAHPYFKNIANVDREPSAQAVTKLEFEFERRRVTKDDIRELIYREILEYHPKMLKEFIEGTESSGFMYPSAVDNFKKQFAYLEEHYAKGSTGTPPERQHNSLPRPSVVYSDNQSQSTANITEDLSKCIIRENAQKSQQYNASVANKFPSHVPQGAAARPGKAVGSVLQYNLSQASAAEQYEQRRAARHPAVAPNNIPSGSSYPRRNQTCKSETGDTERMDVNQAGQPKSYAANKLPATVDGRGGHW

SEQ ID NO: 140568 - DNA, 1866 bp, Zea mays
  CDS (1)..(1866)
atgacgttgccggaggcgaatgccggtgcgacggcgcagaggaagaagaactcaccagagatggagttcttcagcgagtacggcgatgccaacaggtacaagatccaggagatcattggcaaagggagctacggggtcgtctgttcggctattgaccaacatacgggcgagaaggtagccatcaagaagatacagaacatcttcgagcacctgtcggacgctgccaggatcctccgcgagatcaagcttctccggctgctgaggcaccccgatatcgtcgagatcaaacacgttatgctgcctccgtcgaggagggactacagagatatttacgttgtgtttgagctgatggataccgatcttcaccaagttattaaggctaacgatgacttgacgaaggaacaccaccagttctttctctatcagatgctgcgtgcattgaaatatattcatactgctaatgtttatcatcgtgatttaaagccaaaaaatatattagcaaatgctaactgcaaactcaagatatgtgattttgggctagcaagggttgcatttaatgactctcataccacagttttctggacggactatgttgctactagatggtacagggctcctgagctgtgtggatctttctttagtaagtattcaccggctattgatatgtggagcatcggttgcatttttgcggagattttgactgggaagcctttattccctggtaaaaatgtggttcaccagctggatttgatgactgatctcctgggtacaccatcagcagatactatttcacagattcggaatgagaaagcaaggaggtatctaagcagcatgaggaggaaacagccaatacccttctcagagaagttccccaatgcagatcattcggcgctcaagctcttacaaaggcttcttgcatttgatcctaaggatcgaccaacggccgaagaggcattggctgatccctactttaaaggcattgcaaaagtggagagggaaccatcctgtcagccaatttcgaaaatggaatttgagtttgaacagaagtttaccaaagaggatgtcaaggaacttatattccaggagatactgcagtaccatcctcaacttctgaaggattacaagaacggctctgaaaagacgagttttctatatcccagcgccgttgacaggttccgtaggcaatttgctagcttagaagaaaatggagagaggaatgccgcgcttgacaggaaacatgtttctctcccaaggacaacaaccgttcactccactccaattcctgcaaaggaaggtccagcagcaacctcccaggttgctcaaaggattccagcagctagaccaggaagagtggtaggcccagtattgccattcgagagcgcaagcgtcaccgatcaacacatcgcccgacgggtggcaaggaacccagctgttcctccagcaacgaacacctcgtcagtctactgctaccacctcaagtcggacagctccgacaggcaggagcatcatctagagcgtgagaaagaccgaaggcagtataggccagggcagcatttcatggatgccaaggtagcccctgagatgggccgggatatacgcccgtcacagtactatgtctcaaggggcttgcccaaagctgatctaacagacagggccaccctccataggagcgctcttcatggcgttgctcccttcaatggcatcgcagcggtcgctggtgttcttcaccgaaagagcgaaggatgcccgatgactggtatgttggatgagctgcagcagatctgcaacgggatggtgaaaaaagttcagttaacgctaggcctcgagctcatgtttctgaactcgaaggaatttttggaagcttaa

SEQ ID NO: 140569 - protein, 621 aa, Zea mays
MTLPEANAGATAQRKKNSPEMEFFSEYGDANRYKIQEIIGKGSYGVVCSAIDQHTGEKVAIKKIQNIFEHLSDAARILREIKLLRLLRHPDIVEIKHVMLPPSRRDYRDIYVVFELMDTDLHQVIKANDDLTKEHHQFFLYQMLRALKYIHTANVYHRDLKPKNILANANCKLKICDFGLARVAFNDSHTTVFWTDYVATRWYRAPELCGSFFSKYSPAIDMWSIGCIFAEILTGKPLFPGKNVVHQLDLMTDLLGTPSADTISQIRNEKARRYLSSMRRKQPIPFSEKFPNADHSALKLLQRLLAFDPKDRPTAEEALADPYFKGIAKVEREPSCQPISKMEFEFEQKFTKEDVKELIFQEILQYHPQLLKDYKNGSEKTSFLYPSAVDRFRRQFASLEENGERNAALDRKHVSLPRTTTVHSTPIPAKEGPAATSQVAQRIPAARPGRVVGPVLPFESASVTDQHIARRVARNPAVPPATNTSSVYCYHLKSDSSDRQEHHLEREKDRRQYRPGQHFMDAKVAPEMGRDIRPSQYYVSRGLPKADLTDRATLHRSALHGVAPFNGIAAVAGVLHRKSEGCPMTGMLDELQQICNGMVKKVQLTLGLELMFLNSKEFLEA

SEQ ID NO: 140570 - DNA, 972 bp, Zea mays; identical to SEQ ID NO: 63141
  CDS (1)..(972)

SEQ ID NO: 140571 - protein, 323 aa, Zea mays; identical to SEQ ID NO: 63142

SEQ ID NO: 140572 - DNA, 1413 bp, Zea mays
  CDS (1)..(1413)
atggagagatatacaattatcaacgaagttggtgatggaacatttgggagtgtttggcgtgcaaccaataaggaaagcggtgaagtggttgcgatcaagaagatgaagaaaaagtattattcttgggaagagtgcataaacctccgtgaagtgaagtccctgcgaaggatgaaccatccaaacattgtaaagctcaaagaagtcataagagagagtgatacgctgttctttgtttttgagtacatggaatgcagtctttatcagctgatgaagagcagagggaagcccttttcagagactgaaatccgaaactggtgctttcaaatatttcaagctctgagtcacatgcaccagcgtggatattttcaccgtgaccttaagcctgaaaatttgcttgttacaaaggaactcatcaagatagcggattttgggcttgctcgtgaaatttcttctgagccaccttatacggaatatgtgtccactcgttggtatcgtgcccctgaagttcttcttcaagctactgtttataatgctgcagttgacatgtgggcaatgggtgccattatcgcggagctattttcactgcgacctctttttcctggatcaagtgagccagatgaactttacaaaatctgtagcattattggcactccaaatcagcgtacttggcctgaaggactgcagctagcagcatctatgggttttcagttccctcagtgtgaaagtgtacatctttcggaagtggttcctttagcaagcaaagatgcaatcaatcttatctcgtggctttgctcatgggacccacgaagaaggccaacagcagtggaggttttgcagcatcccttctttcagccatgcttctatgtcccaccttcacttcgcttcaaatctactggatatgcatcaacgccaccatcagctggggctaaaggagctgttgatcagaagaacattaagagatactacatgggtactgtacccaatgcgaggccaacagttaattactcgtacttgagaaacaatgctcctgcaagagcagttggtgcacaaaggaaattggagttggattatcagctcccagagactaataaccataataaggtgacaaaggcagaagcgatgaaccagtcttggtccagaccagcagcagtaaggagcaatgcaggaaatcatcttgccaacgacctgaacccccgtgtacctgaccttgccgagaagctgtctcagttgtcaatgggccccaacagggtgtcgggtttgggttccgagaggtttgttagaacccatgagaacgctgccaagcgccccttgcccgtgggatccagggcgtggcatggtccagctgaccccttccggcgcccatacgagatgccaggtgatagaactctccttccaaggaatctcgttcgctga

SEQ ID NO: 140573 - protein, 470 aa, Zea mays
MERYTIINEVGDGTFGSVWRATNKESGEVVAIKKMKKKYYSWEECINLREVKSLRRMNHPNIVKLKEVIRESDTLFFVFEYMECSLYQLMKSRGKPFSETEIRNWCFQIFQALSHMHQRGYFHRDLKPENLLVTKELIKIADFGLAREISSEPPYTEYVSTRWYRAPEVLLQATVYNAAVDMWAMGAIIAELFSLRPLFPGSSEPDELYKICSIIGTPNQRTWPEGLQLAASMGFQFPQCESVHLSEVVPLASKDAINLISWLCSWDPRRRPTAVEVLQHPFFQPCFYVPPSLRFKSTGYASTPPSAGAKGAVDQKNIKRYYMGTVPNARPTVNYSYLRNNAPARAVGAQRKLELDYQLPETNNHNKVTKAEAMNQSWSRPAAVRSNAGNHLANDLNPRVPDLAEKLSQLSMGPNRVSGLGSERFVRTHENAAKRPLPVGSRAWHGPADPFRRPYEMPGDRTLLPRNLVR

SEQ ID NO: 140574 - DNA, 1533 bp, Zea mays
  CDS (1)..(1533)
atggcggtggcggcccctggccagctcaacctcgacgaggccccgtcatggggctcccgcagcgtagactgcttcgagaagctcgagcagatcggcgagggcacctacgggcaagtgtacatggcgaaggagacgggcaccaacgagatcgtcgcgctcaagaagatccgcatggacaacgagcgcgaagggttcccgatcaccgccatacgcgagatcaaaatcctgaagaagcttcaccaccagaacgttatcaagctcaaggagatcgtcacctccccaggcccagagcgggacgagcaagggaagccaattgacggtaacaagtacaaggggagcatttacatggttttcgagtatatggaccatgatctcaccgggcttgctgatcggccaggaatgcggttcactgtgccgcagattaagtgttacatgaggcagctgcttacaggcctgcactattgtcatgtcaaccaagttctgcatcgagatatcaaaggatctaaccttttgatagacaatgagggtaacttgaagcttgctgattttggccttgcaagatcattctcgagtgatcacaatggcaaccttactaaccgtgtgatcactttgtggtatagacctccagagttgctacttggaagcacaaagtatggcccagccgttgacatgtggtcagtgggctgtatttttgcagaacttctcaatgggaagccaatattgcctggaaagaatgagccagagcagctgactaagatcttcgagctttgtggtacccctgatgacacaatctggcctggtgtcacaaaaatgccttggtacaacaacttcaagcctccccggccattaaagagacgagttaaagatttctttaagcattttgatcgacatgcactggatctgttagagaagatgttgactttagatccatcacagaggatatcagcaaaagatgcacttgatgcggaatatttctggactgatcccttaccatgcgatccaaaaagcttgcccaagtatgaggcatcgcatgaattccagactaagaaaaagcgtcagcaacagaggcaagcagaggaagctgcaaagcgtcaaaaacttaaccatcctccaccacattctcgtttgcctccactccagcagcctggccaagcacatcctcaaatgaggcctggccagggtatgcacaatgtgcctcctgtggcagccggcccaggccatcactatgcaaaaccccgaggaccaggaggccctaaccggtatcctcagggtgggaatcaagggggaggctacaatccgaaccgtggagggcagggtggtggctatggcagtggcccttatccccagcaagggcgagggcctccttaccctggagcagctggcccacggggcagcggtggcagtggctatggggctggagggccaaactaccaacagggtggcccatatggtacgtccggtccaggccgaggaccaaactactctcaaggtagtggttcccgcaaccaacagcagtatgggaactggcaataa

SEQ ID NO: 140575 - protein, 510 aa, Zea mays
MAVAAPGQLNLDEAPSWGSRSVDCFEKLEQIGEGTYGQVYMAKETGTNEIVALKKIRMDNEREGFPITAIREIKILKKLHHQNVIKLKEIVTSPGPERDEQGKPIDGNKYKGSIYMVFEYMDHDLTGLADRPGMRFTVPQIKCYMRQLLTGLHYCHVNQVLHRDIKGSNLLIDNEGNLKLADFGLARSFSSDHNGNLTNRVITLWYRPPELLLGSTKYGPAVDMWSVGCIFAELLNGKPILPGKNEPEQLTKIFELCGTPDDTIWPGVTKMPWYNNFKPPRPLKRRVKDFFKHFDRHALDLLEKMLTLDPSQRISAKDALDAEYFWTDPLPCDPKSLPKYEASHEFQTKKKRQQQRQAEEAAKRQKLNHPPPHSRLPPLQQPGQAHPQMRPGQGMHNVPPVAAGPGHHYAKPRGPGGPNRYPQGGNQGGGYNPNRGGQGGGYGSGPYPQQGRGPPYPGAAGPRGSGGSGYGAGGPNYQQGGPYGTSGPGRGPNYSQGSGSRNQQQYGNWQ

SEQ ID NO: 140576 - DNA, 1227 bp, Zea mays
  CDS (1)..(1227)
atggcttcagctggtgttgccccttctgggtacaagaacagcagcagcaccagcattggtgccgaaaagttgcaagatcacatgaacgagctaaagattagagatgataaggaagttgaagcaaccataattaatgggaaagggaccgaaactgggcacataattgtcaccactactggtggcaagaatggtcaaccaaaacagacagtgagctacatggctgagcgcattgtaggtcaaggttcttttgggattgtcttccaggccaagtgtttggaaacgggtgagactgttgccataaagaaggttcttcaagacaagcgttacaagaaccgcgaactgcagaccatgcgcctccttgaccaccctaatgttgttgctttgaagcattgcttcttttcaacaactgagaaggatgagctttatctaaatttggtccttgagtatgttccggagacagttcatcgagttgtgaaacatcacaacaagatgcaccaacgcatgccacttatttatgtgaagctttatatgtaccagatatgtagagcattggcttacattcatggtactatcggtgtctgccacagagatattaagccacaaaatcttctggtgaacccacacacccaccagcttaaaatatgtgactttggtagtgcaaaagttctggtcaagggggaaccaaacatatcatacatctgctcgcgatactatagggctccagagctcatatttggtgccactgagtataccacagcgattgacatttggtctgctggttgtgttcttgctgagcttatgctagggcagcctttgtttccaggtgaaagtggtgtggaccaactcgtcgaaatcatcaaggtccttggtactccaacaagggaagaaattaaatgcatgaacccgaattacacagagtttaagttcccacaaatcaaagctcacccatggcacaaggtattcaacaaaaggatgccgccagaagctgttgatctggtctctcggctactccagtactccccaaatctgagatgcactgctgtggaggcgcttgtccacccattctttgacgagcttcgagatcctaatactcgtcttccaaatggccgcttcctgccaccccttttcaacttcaagcctcacgaattgaaaggagtcccagcagacattgttgcgaaattggttccagaacatgcgaagaagcaatgctcttatgttggatcgtga

SEQ ID NO: 140577 - protein, 408 aa, Zea mays
MASAGVAPSGYKNSSSTSIGAEKLQDHMNELKIRDDKEVEATIINGKGTETGHIIVTTTGGKNGQPKQTVSYMAERIVGQGSFGIVFQAKCLETGETVAIKKVLQDKRYKNRELQTMRLLDHPNVVALKHCFFSTTEKDELYLNLVLEYVPETVHRVVKHHNKMHQRMPLIYVKLYMYQICRALAYIHGTIGVCHRDIKPQNLLVNPHTHQLKICDFGSAKVLVKGEPNISYICSRYYRAPELIFGATEYTTAIDIWSAGCVLAELMLGQPLFPGESGVDQLVEIIKVLGTPTREEIKCMNPNYTEFKFPQIKAHPWHKVFNKRMPPEAVDLVSRLLQYSPNLRCTAVEALVHPFFDELRDPNTRLPNGRFLPPLFNFKPHELKGVPADIVAKLVPEHAKKQCSYVGS

SEQ ID NO: 140578 - DNA, 1221 bp, Zea mays
  CDS (1)..(1221)
atggaggcgccgccggtaccggagctcatggatctggacgcgccccctcccgccgcagccgacgccgcagccgcggcgccggttccccccgccgtcagcgacaagaagaaggaaggggaagggggagacactgttacgggccacatcatctccaccaccatcggtgggaagaacggcgagccgaagcggaccatcagttacatggcagaacgtgtcgtgggtacgggctcatttgggatcgtcttccaggctaagtgtttggagactggagagaccttcgccattaagaaggtgctgcaggatcggcgttacaagaaccgggagctgcaacttatgcgtgccatggagcaccccaacgtcatctgcctgaagcactgcttcttctcaacaacgagcagggacgagttgtttctaaaccttgtcatggaatttgtccccgagaccctgtaccgtgtcctgaagcactacagcaacgcgaaccagaggatgcctcttatctacgtcaagctctacatgtatcagcttttcagaggcctagcctatattcataatgtaccaggagtctgccatagggatgtaaagccacaaaacgttttggttgatcctctcacccaccaggtcaagctctgtgactttggtagcgcaaaagtcctgattcctggtgaaccgaacatatcttacatatgctctcgttattatcgtgctccagagctcatatttggagcgacagagtatacaacttcaatagacatatggtcagctggttgtgttctagctgagttgcttcttggtcagccactgtttccgggagagagtgctgttgatcagttggtagagattatcaaggttcttggtactccaacccgtgaggagatacgatgcatgaatcccaactatactgagttcaggtttcctcagataaaggctcatccgtggcacaagattttccacaagagaatgcctccggaagccattgaccttgcttcccgtctccttcagtattcgccaagtcttcgctgctctgctcttgatgcatgcgctcatcccttctttgatgagctgcgggcgccgaatgcacgtctaccaaacggccgtccattccctccgctctttaacttcaaacatgagctagcaaatgcctccccggacctcatcaacaggcttgtaccggagcacattagacggcagaacggtgtcaactttgggcatatcgggagctag

SEQ ID NO: 140579 - protein, 406 aa, Zea mays
MEAPPVPELMDLDAPPPAAADAAAAAPVPPAVSDKKKEGEGGDTVTGHIISTTIGGKNGEPKRTISYMAERVVGTGSFGIVFQAKCLETGETFAIKKVLQDRRYKNRELQLMRAMEHPNVICLKHCFFSTTSRDELFLNLVMEFVPETLYRVLKHYSNANQRMPLIYVKLYMYQLFRGLAYIHNVPGVCHRDVKPQNVLVDPLTHQVKLCDFGSAKVLIPGEPNISYICSRYYRAPELIFGATEYTTSIDIWSAGCVLAELLLGQPLFPGESAVDQLVEIIKVLGTPTREEIRCMNPNYTEFRFPQIKAHPWHKIFHKRMPPEAIDLASRLLQYSPSLRCSALDACAHPFFDELRAPNARLPNGRPFPPLFNFKHELANASPDLINRLVPEHIRRQNGVNFGHIGS

SEQ ID NO: 140580 - DNA, 981 bp, Zea mays; identical to SEQ ID NO: 63143
  CDS (1)..(981)

SEQ ID NO: 140581 - protein, 326 aa, Zea mays; identical to SEQ ID NO: 63144

SEQ ID NO: 140582 - DNA, 909 bp, Zea mays; identical to SEQ ID NO: 63145
  CDS (1)..(909)

SEQ ID NO: 140583 - protein, 302 aa, Zea mays; identical to SEQ ID NO: 63146

SEQ ID NO: 140584 - DNA, 1215 bp, Zea mays
  CDS (1)..(1215)
atggaggcgccgccggtaccggagctcatggatctggacgcgccccctcccgccgcagccgacgccgcagccgcggcgccggttccccccgccgtcagcgacaagaagaaggaaggggaagggggagacactgttacgggtcacatcatctccaccaccatcggtgggaagaacggcgagccgaagcggaccatcagttacatggcagaacgtgtcgtgggtacgggctcatttgggatcgtcttccaggctaagtgtttggagactggagagaccttcgccattaagaaggtgctgcaggatcggcgttacaagaaccgggagctgcaacttatgcgtgccatggagcaccccaacgtcatctgcctgaagcactgcttcttctcaacaacgagcagggacgagttgtttctaaaccttgtcatggaatttgtccccgagaccctgtaccgtgtcctgaagcactacagcaacgcgaaccagaggatgcctcttatctacgtcaagctctacatgtatcagcttttcagaggcctagcctatattcataatgtaccaggagtctgccatagggatgtaaagccacaaaacgttttggttgatcctctcacccaccaggtcaagctctgtgactttggtagcgcaaaagtcctgattcctggtgaaccgaacatatcttacatatgctctcgttattatcgtgctccagagctcatatttggagcgacggagtatacaacttcaatagacatatggtcagctggctgtgttctagctgagttgcttcttggtcagccactgtttccgggagagagtgctgttgatcagttggtagagattatcaaggttcttggtactccaacccgtgaggagatacgatgcatgaatcccaactatactgagttcaggtttcctcagataaaggctcatccatggcacaagattttccacaagagaatgcctcctgaagccatagaccttgcttctcgtctccttcagtattcaccaagtcttcgctgctctgctcttgacgcatgcgctcatcccttcttcgatgagctgcggacaccgaacgcacgcctaccaaacggccgcccgttccctccgctctttaacttcaagcacgaactagcaaatgcctctccggacctcgtcagcaggcttgtgccggagcacattagacggcagatcggtgtcaacttcgggagcagctag

SEQ ID NO: 140585 - protein, 404 aa, Zea mays
MEAPPVPELMDLDAPPPAAADAAAAAPVPPAVSDKKKEGEGGDTVTGHIISTTIGGKNGEPKRTISYMAERVVGTGSFGIVFQAKCLETGETFAIKKVLQDRRYKNRELQLMRAMEHPNVICLKHCFFSTTSRDELFLNLVMEFVPETLYRVLKHYSNANQRMPLIYVKLYMYQLFRGLAYIHNVPGVCHRDVKPQNVLVDPLTHQVKLCDFGSAKVLIPGEPNISYICSRYYRAPELIFGATEYTTSIDIWSAGCVLAELLLGQPLFPGESAVDQLVEIIKVLGTPTREEIRCMNPNYTEFRFPQIKAHPWHKIFHKRMPPEAIDLASRLLQYSPSLRCSALDACAHPFFDELRTPNARLPNGRPFPPLFNFKHELANASPDLVSRLVPEHIRRQIGVNFGSS

SEQ ID NO: 140586 - DNA, 885 bp, Zea mays
  CDS (1)..(885)
atggagcagtacgagaaggtggagaagatcggggagggcacgtacggggtggtgtacaaggcgctggacaaggccaccaacgagacgatcgcgctcaagaagatccgcctcgagcaggaggacgagggcgtcccgtccaccgccatccgcgagatctctctcctcaaggagatgaaccacggcaacatcgtcagattacatgatgttgtccacagcgagaagcgcatataccttgtcttcgagtacctggatctggacctcaagaagttcatggactcctgcccggagtttgctaagaatcccactttgatcaagtcatacctctaccagatactccacggtgttgcgtactgccattctcatagagttcttcatcgagacttgaaacctcaaaacttattgatagatcggcgcactaatgcactgaagcttgcagactttggtttagccagggcatttggaattcctgtccgtacatttactcatgaggtagtgacattatggtacagagctccagaaattctgcttggagcgcggcagtattccacaccagttgatgtgtggtctgtgggctgtatctttgcggaaatggtgaaccaaaagccactattccctggcgattctgagatcgacgaactttttaagatattcaggatactaggtacaccgaatgagcagagttggccaggagtcagttgtttgcctgacttcaagacagctttccccaggtggcaagctcaggacctggcaacagtagtcccaaatcttgaccctgctgggttggaccttctctctaaaatgcttcgatacgagccaagcaaaagaatcacagcgaggcaagcacttgagcatgagtacttcaaggaccttgaagtggtacagtga

SEQ ID NO: 140587 - protein, 294 aa, Zea mays; identical to SEQ ID NO: 63028

SEQ ID NO: 140588 - DNA, 1233 bp, Zea mays
  CDS (1)..(1233)
atggcctcggtgggcgtggcacgctcttctttgggatttcagaatggcacaagttctagcagtgacccagatcgtcttcccaacgagttgggcagtatgagcataagggacgacaaggacgttgaagatattgtagtcaatggcaatggggcggagcctggtcatatcatagtgaccagcattgatgggagaaatgggcaggcaaagcagaccattagttacatggctgagcgggtggtaggtcatgggtccttcggaaccgttttccaggccaagtgtcttgaaactggtgagaccgtagctataaaaaaggttcttcaagacaagagatacaagaatcgtgagctgcaaaccatgcgagtgcttgaccacccaaatgtggtggctctaaagcactgtttcttctcaaagactgagaaagaggagctttacctcaatttggtgcttgagtatgtaccggagactgctcatcgtgtcatcaaacattacaacaagatgaaccagcgcatgcctttgatttatgcaaaactgtatatgtatcagatttgtagagccttggcatacattcacaacagcattggagtgtgccacagggacattaagccgcaaaatctcctggttaatcctcatacccatcagctaaaattgtgtgactttggcagcgcgaaagttctggtaaaaggcgaaccaaacatttcttacatctgttctaggtactacagagctccagagctcatatttggtgctactgaatacacaacagccattgatgtttggtctgctggctgtgtgctcgctgagctgcttctaggacagcctctgttccctggagaaagcggtgttgatcagcttgttgaaatcatcaaggttctgggcacacccacacgtgaagaaattaagtgcatgaatccaaattataccgagtttaaattcccgcaaatcaaagctcacccatggcataagatattccataaaaggatgcctgctgaagcggtagatctcgtgtccaggcttctgcagtactcaccaaaacttcggtcgactgctttggaagcattggtccatccgttctttgatgaacttcgggatccaaacacccgcttaccgaatggtcgttttcttccgcctctcttcaattttaagccccatgagctgaagaacgtgccggcggatttcatggtgaaattggtccctgagcatgcacggaagcaatgtgccttcgtagggtggtga

SEQ ID NO: 140589 - protein, 410 aa, Zea mays
MASVGVARSSLGFQNGTSSSSDPDRLPNELGSMSIRDDKDVEDIVVNGNGAEPGHIIVTSIDGRNGQAKQTISYMAERVVGHGSFGTVFQAKCLETGETVAIKKVLQDKRYKNRELQTMRVLDHPNVVALKHCFFSKTEKEELYLNLVLEYVPETAHRVIKHYNKMNQRMPLIYAKLYMYQICRALAYIHNSIGVCHRDIKPQNLLVNPHTHQLKLCDFGSAKVLVKGEPNISYICSRYYRAPELIFGATEYTTAIDVWSAGCVLAELLLGQPLFPGESGVDQLVEIIKVLGTPTREEIKCMNPNYTEFKFPQIKAHPWHKIFHKRMPAEAVDLVSRLLQYSPKLRSTALEALVHPFFDELRDPNTRLPNGRFLPPLFNFKPHELKNVPADFMVKLVPEHARKQCAFVGW

SEQ ID NO: 140590 - DNA, 1767 bp, Zea mays
  CDS (1)..(1767)
atgcaggcgccggagcagcagccgcagcagcagcagcagcggaggaagggttcgtcagagatggacttcttcagtgaatacggcgatgcgaacagatacaaaatccaagaggtcattggcaaaggaagttatggcgttgtttgctcagctgttgaccaacatactggtgacaaggtggcaatcaagaaaatacacaatatctttgagcacttatctgatgctgcccggatcctacgtgagatcaaactgcttcggctattacgccatcctgatatagttgagatcaagcatataatgctgcctccatcaaggagggacttcaaagatatctatgttgtatttgagctgatggatacagacctccaccaagtcatcaaggcaaatgatgatttaacccgagagcatcatcaattctttctctatcagatgctccgtgcactgaaatacattcataccgctaatgtttatcatcgtgatttgaagccaaagaatatattggctaatgctaactgtaaacttaaaatatgtgattttggattagcaagagtggcattcaatgacactcctacaacagtattctggacggattatgttgctacaagatggtatagggcccctgaactgtgtgggtctttcttttccaagtattcgccagctattgacatatggagtatcggttgcatttttgcggaaatcttaactgggaagcctttatttcctggaaaaaatgtggtccaccagttagatttgatgactgatctcttgggtactccatcacttgatacagtttccaggattcggaatgagaaggcaaggaggtacttgagtagcatgaggaaaaaacagccagtaccatttactgaaaagtttcctaaagcagatcctgctgcactcaaacttttgcagaggcttttggcatttgatcccaaggataggccaactgctgaagaggcattggctgatccgtattttaaaggcctcgcaaaagtagagagagaaccatcatgccagccaataacaaaaatggagttcgagtttgagcgaaaaaaggcgaccaaagaggatgtcaaggaacttatattcagggagatattggagtatcatcctcaacttctcaaggattacatgaatgggactgagaaaacaaactttctatatcctagtgctgttgaccatttcaggaggcaatttgcaaacttggaggaaaatggaggaaagagtggggcacacgccgcttcatcagacaggaagcatgtttcgctcccaaggacaaccacagttcattctaatccaatccctccaaatggaacctcccaggttcctcaaaagattcccacaggtagaccaggaagagtggttggtccagtaataccatttgagaacgcagctgcagttgatccatacagccaacgtagggtctcaaggaatccagtacttcctccaaccacgtcgaacatgtcagcctatgcctaccaccggaagtcagacaactcagacagagagctccaacaggagctggaaaaggaccgcatgcagtaccagccagcacagcggttcatggacgccaaggtagtatcacagatgtcccctgacttgaggtcttcctactacataccaaaaggtgtcccaaaggctgatcccgcagatagaaccgctctgcattctagcatgattcatgggatcgcccctttcagtggcattgcagctgttggaggtggctacaacaaggtcaatgcagttcagtatggagtttctaggatgtactag

SEQ ID NO: 140591 - protein, 588 aa, Zea mays
MQAPEQQPQQQQQRRKGSSEMDFFSEYGDANRYKIQEVIGKGSYGVVCSAVDQHTGDKVAIKKIHNIFEHLSDAARILREIKLLRLLRHPDIVEIKHIMLPPSRRDFKDIYVVFELMDTDLHQVIKANDDLTREHHQFFLYQMLRALKYIHTANVYHRDLKPKNILANANCKLKICDFGLARVAFNDTPTTVFWTDYVATRWYRAPELCGSFFSKYSPAIDIWSIGCIFAEILTGKPLFPGKNVVHQLDLMTDLLGTPSLDTVSRIRNEKARRYLSSMRKKQPVPFTEKFPKADPAALKLLQRLLAFDPKDRPTAEEALADPYFKGLAKVEREPSCQPITKMEFEFERKKATKEDVKELIFREILEYHPQLLKDYMNGTEKTNFLYPSAVDHFRRQFANLEENGGKSGAHAASSDRKHVSLPRTTTVHSNPIPPNGTSQVPQKIPTGRPGRVVGPVIPFENAAAVDPYSQRRVSRNPVLPPTTSNMSAYAYHRKSDNSDRELQQELEKDRMQYQPAQRFMDAKVVSQMSPDLRSSYYIPKGVPKADPADRTALHSSMIHGIAPFSGIAAVGGGYNKVNAVQYGVSRMY

SEQ ID NO: 140592 - DNA, 1299 bp, Zea mays
  CDS (1)..(1299)
atgttttgccagcgcgtaatgaatgtaatgtcagtactgctaaaaaccaccacccaccacatggccgccatgccgggtggggcccacggcgccggcgccgcggacccgatgcaggtggaccagccgctcccccctgccgccgcaggcacagcacacgcccccgccgacgccaagcatgctggttctatgattgaagggagggagccggtcacaggccatataatctcgacaaccattggagggaagaatggagagcctaaaaggactatcagctacatggcagagagagttgtgggaactggatcatttggaatcgtcttccaggcaaaatgtctggagactggtgagactgttgcgattaagaaggttttgcaggacaagcgctacaagaacagggagctacaaatcatgcgatccatggatcactgcaatgctgtttccttgaagcattgcttcttctctaccacaagcagagatgaacttttccttaacttagtgatggagtttgttcccgagtcattatatcgggtgttgaaacactacagcaatatgaaccagaggatgccactcatttatgtcaaattatatacctaccagatatttcgaggcttagcctatattcacacagtacctggtgtttgccacagggatgtgaaaccacaaaatcttttggttgatccattgactcaccaagtgaagatatgtgatttcgggagtgccaaaatgttggtcaaaggtgaagcaaacatttcatatatatgctcacgttattaccgtgctccaaagctcatatttgggacaaccgagtacacaacatcaattaatatttggtcagctggatgtgttcctgctgagctgcttcttggccagcctctcttccctggcgaaagtgctgtggatcaacttgttgagataataaaggttcttggtactccaacacgtgaggaaatccgttgcatgaatccaaactacaccgagtttagatttcctcagatcaaagctcacccatggcacaagattttccacaagcggatgcctccagaagctatagatctcgcttcacgtttgctccagtactcaccaaatctaagatgcactgctcttgaagcgtgtgcacatccattctttgatgagttgcgagaaccacatgcgaggttgccaaatggacggccatttcctccactgttcaactttaaacaggaactagcaaatgcctccccagagctcatcaacaggctgatcccagaccatgctaggcggcatcttgggctcactttattgcccaccactggaccatag

SEQ ID NO: 140593 - protein, 432 aa, Zea mays
MFCQRVMNVMSVLLKTTTHHMAAMPGGAHGAGAADPMQVDQPLPPAAAGTAHAPADAKHAGSMIEGREPVTGHIISTTIGGKNGEPKRTISYMAERVVGTGSFGIVFQAKCLETGETVAIKKVLQDKRYKNRELQIMRSMDHCNAVSLKHCFFSTTSRDELFLNLVMEFVPESLYRVLKHYSNMNQRMPLIYVKLYTYQIFRGLAYIHTVPGVCHRDVKPQNLLVDPLTHQVKICDFGSAKMLVKGEANISYICSRYYRAPKLIFGTTEYTTSINIWSAGCVPAELLLGQPLFPGESAVDQLVEIIKVLGTPTREEIRCMNPNYTEFRFPQIKAHPWHKIFHKRMPPEAIDLASRLLQYSPNLRCTALEACAHPFFDELREPHARLPNGRPFPPLFNFKQELANASPELINRLIPDHARRHLGLTLLPTTGP

SEQ ID NO: 140594 - DNA, 1476 bp, Zea mays
  CDS (1)..(1476)
atggacttcttcacggaatatggggaggcgagtcagtatcaaatccaagaggtcattggtaagggaagttatggagtagttgctgctgcaattgatagtcacactggggagcgggttgcgatcaagaagataaatgatatttttggtaatgtctcggatgctgctcgcattttgcgggaaatcaagcttcttcgtctgcttcgtcacccaaacatagtccagattaagcacattatgttgccccctacccgaagggagttcaaagatatctatgttgtttttgagctcatggagtctgacctgcatcaagtgatcaaagcaaatgataacctgactccagagcatcaccgctttttcctgtatcaacttattcgtgctctcaagtacatgcattcagcccatgtatttcatcgtgatttaaagcccaggaacatactggccaattcagacagcaaactaaagatctgcgactttggacttgcacgtgcatcatttaacgactctctttcagctatctattggacagattatgtcgcaacaaggtggtaccgggctcctgaattatgtggctcctttttctccagttacacccctgcaattgatatttggagtatagggtgcatttttgctgaagttctcaccggaacgccattgtttcctgggaggaatgttgtgcaccaattagacttaataacagatctccttggaacaccatcgtttagatccttatcccagattcacagtgataaggccagggaaaatttgcttgccatgccgagaaagcgccctattccattttctcataagttccataatgccgatcctctgcctctacggttgctagagcgtttacttgcatttgacccgaaagatcgacctactgctgaagaggctttagctgatccatacttcagtggcctttctaaattggaactgaacccttcagcacaaccaatttcgaaggttgactttgaattcgagggaaggaaactaacaaaggctggtgtgagagaaatgatatatcgggagattttggagtaccacccccagatgcttcaggagtacatcgaaggtggagatcagattcacttcctatacccaagtggggtcgatcgcttccagcgacagtttgctcatctcgaggagaactacaggagaggagtagcaagcaccccgccgcgaaggcagcccacatctctgccgagagagcgagtctgctcatcagaagatggccacagtcaggactctgacagcgaagagcaaagagcagcatcctacgttgcccgaacaaccataagccctccaagatcacaagaggagggcggcaagctccagcctgcctaccagagcgccgccgccgccgcagactcctgcgccaagagctatctgaagggtgccgctagtatcagtagtgcttccaggcgtaccatcaagggggataatggccgaaaggagaaggaatctccgaggctgtga

SEQ ID NO: 140595 - protein, 491 aa, Zea mays
MDFFTEYGEASQYQIQEVIGKGSYGVVAAAIDSHTGERVAIKKINDIFGNVSDAARILREIKLLRLLRHPNIVQIKHIMLPPTRREFKDIYVVFELMESDLHQVIKANDNLTPEHHRFFLYQLIRALKYMHSAHVFHRDLKPRNILANSDSKLKICDFGLARASFNDSLSAIYWTDYVATRWYRAPELCGSFFSSYTPAIDIWSIGCIFAEVLTGTPLFPGRNVVHQLDLITDLLGTPSFRSLSQIHSDKARENLLAMPRKRPIPFSHKFHNADPLPLRLLERLLAFDPKDRPTAEEALADPYFSGLSKLELNPSAQPISKVDFEFEGRKLTKAGVREMIYREILEYHPQMLQEYIEGGDQIHFLYPSGVDRFQRQFAHLEENYRRGVASTPPRRQPTSLPRERVCSSEDGHSQDSDSEEQRAASYVARTTISPPRSQEEGGKLQPAYQSAAAAADSCAKSYLKGAASISSASRRTIKGDNGRKEKESPRL

SEQ ID NO: 140596 - DNA, 879 bp, Zea mays; identical to SEQ ID NO: 63147
  CDS (1)..(879)

SEQ ID NO: 140597 - protein, 292 aa, Zea mays; identical to SEQ ID NO: 63148

SEQ ID NO: 140598 - DNA, 1413 bp, Zea mays
  CDS (1)..(1413)
atgaagagatatacaattatcaacgaagttggtgatggaacatttgggagtgtttggcgtgcaacaaagaaggaaagcggtgaagaggttgcaatcaaaaagatgaagaaaaagtattattcctgggaagagtgcataaacctccgtgaagtgaagtccctgcgaaggatgaaccaaccaaacattgtaaagctcaaagaagtcataagagagagtgatacgctgttctttgtttttgagtacatggaatgcagtctttatcagctgatgaagagcagagggaagcccttttcagagactgaaatccgaaactggtgctttcaaatatttcaagctctgagtcacatgcaccagcgtggatattttcaccgtgaccttaagcctgaaaatttgcttgttacaaaggaactcatcaagatagcggattttgggcttgctcgtgaaatttcttctgagccaccttatacggaatatgtgtccactcgttggtatcgtgcccctgaagttcttcttcaagctactgtttataatgctgcagttgacatgtgggcaatgggtgccattatcgcggagctattttcactgcgacctctttttcctggatcaagtgagccagatgaactttacaaaatctgtagcattattggcactccaaatcagcgtacttggcctgaaggactgcagctagcagcatctatgggttttcagttccctcagtgtgaaagtgtacatctttcggaagtggttcctttagcaagcaaagatgcaatcaatcttatctcgtggctttgctcatgggacccacgaagaaggccaacagcagtggaggttttgcagcatcccttctttcagccatgcttctatgtcccaccttcacttcgcttcaaatctactggatatgcatcaacgccaccatcagctggggctaaaggagctgttgatcagaagaacattaggagatactacatgggtactgtacccaatgcgaggccaacagttaattactcgtacttgagaaacaatgctcctgcaagagcagttggtgcacaaaggaaattggagttggattatcagctcccagagactaataaccataataaggtgacaaaggcagaagcgatgaaccagtcttggtccagaccagcagcagtaaggagcaatgcaggaaatcatcttgccaacgacctgaacccccgtgtacctgaccttgccgagaagctgtctcagttgtcaatgggccccaacagggtgtcgggtttgggttccgagaggtttgttagaacccatgagaacgctgccaagcgccccttgcccgtgggatccagggcgtggcatggtccagctgaccccttccggcgcccatacgagatgccaggtgatagaactctccttccaaggaatctcgttcgctga

SEQ ID NO: 140599 - protein, 470 aa, Zea mays
MKRYTIINEVGDGTFGSVWRATKKESGEEVAIKKMKKKYYSWEECINLREVKSLRRMNQPNIVKLKEVIRESDTLFFVFEYMECSLYQLMKSRGKPFSETEIRNWCFQIFQALSHMHQRGYFHRDLKPENLLVTKELIKIADFGLAREISSEPPYTEYVSTRWYRAPEVLLQATVYNAAVDMWAMGAIIAELFSLRPLFPGSSEPDELYKICSIIGTPNQRTWPEGLQLAASMGFQFPQCESVHLSEVVPLASKDAINLISWLCSWDPRRRPTAVEVLQHPFFQPCFYVPPSLRFKSTGYASTPPSAGAKGAVDQKNIRRYYMGTVPNARPTVNYSYLRNNAPARAVGAQRKLELDYQLPETNNHNKVTKAEAMNQSWSRPAAVRSNAGNHLANDLNPRVPDLAEKLSQLSMGPNRVSGLGSERFVRTHENAAKRPLPVGSRAWHGPADPFRRPYEMPGDRTLLPRNLVR

SEQ ID NO: 140600 - DNA, 1740 bp, Zea mays
  CDS (1)..(1740)
atgggcggagggggcgcgatcgtgcacggcttccgccgctggttccaccgccggagcgaaggctccacctccaactccaaccagtcgtccctcgccggcgagggggaagcggacgacggctcatccgatctcgaggtcatcgaggacccggatctcctcggcctccgcgccatccgcgtgcccaagcgcaagatgccgctgcccgtcgagagccacaggaagaactcagtagaaatggagttcttcacagagtacggagaggcaagccagtaccagatccaagaagtcattggtaaagggagctacggagtagttgctgcagctgtggacacccgcaccggtgagcgggttgctatcaagaagatcaatgatgtgtttgagcacgtctcggatgccacacgcatactgcgggagatcaagctcctccggttgcttcgtcacccagacatagtcgagattaagcacatcatgctccctccttctcggagggagttccaagacatctatgttgtttttgagctcatggagtcggatctccatcaagtgatcagggcgaatgatgacctcacccctgaacatcaccagtttttcctgtaccaacttcttcgagctctcaagtacatacatgccgctaatgtattccatcgtgatctaaagcccaagaatatactggctaactcggactgcaaactgaaaatatgtgactttggacttgcccgtgcatcattcaatgatgccccttcagctatattttggacagactatgtggcaacaaggtggtaccgggcacctgaactatgtggttcctttttctccaaatacactcctgcaattgatatttggagcattgggtgcatatttgctgaacttctcactggaaggccactatttcctgggaagaatgttgtacaccaattagatattataacagatcttcttgggactccatcatctgagaccttatcccggattcgaaatgagaaggccaggagatatttgagctgcatgcggaaaaaatatcccgtgccctttactcataaatttcgacatgctgatcctttggctcttcgtcttctagagcgtttgcttgcatttgatcctaaagaccggcctagtgcagaagaggctctagctgatccatactttgcatcccttgctaatgtggaacgtgagccatcaagacacccgatttctaaacttgagtttgaatttgaaagaaagaagctggccaaagatgatgttagagaactgatctatcgagagattttggagtatcatccacagatgctggaggagtacatgaaaggcggagaacagattagcttcctctatccaagcggagtcgaccgcttcaaacggcagttcgctcatcttgaggagcattacagcaaaggagaaagaggttccccactgcaaagaaagcatgcttccttaccaagggaaagagtggttgtatccaaggatggcaatactgaacaacaaattaatgaccaggagagaagcgcagattctgttgcccgcactaccgtgagccctccaaggtcagaggatgctgacatggatgatgtgaaacccacaagcttaagctctcggagctacctgaagagtgcaagcataagcgcttccaagtgcgtcgttgtcagaaataaacacccagagccagaggatgatggaatacctgaggagatggaaggcaccgtcgatggattgtctgaaaaggtctccaggatgcactcctaa

SEQ ID NO: 140601 - protein, 579 aa, Zea mays
MGGGGAIVHGFRRWFHRRSEGSTSNSNQSSLAGEGEADDGSSDLEVIEDPDLLGLRAIRVPKRKMPLPVESHRKNSVEMEFFTEYGEASQYQIQEVIGKGSYGVVAAAVDTRTGERVAIKKINDVFEHVSDATRILREIKLLRLLRHPDIVEIKHIMLPPSRREFQDIYVVFELMESDLHQVIRANDDLTPEHHQFFLYQLLRALKYIHAANVFHRDLKPKNILANSDCKLKICDFGLARASFNDAPSAIFWTDYVATRWYRAPELCGSFFSKYTPAIDIWSIGCIFAELLTGRPLFPGKNVVHQLDIITDLLGTPSSETLSRIRNEKARRYLSCMRKKYPVPFTHKFRHADPLALRLLERLLAFDPKDRPSAEEALADPYFASLANVEREPSRHPISKLEFEFERKKLAKDDVRELIYREILEYHPQMLEEYMKGGEQISFLYPSGVDRFKRQFAHLEEHYSKGERGSPLQRKHASLPRERVVVSKDGNTEQQINDQERSADSVARTTVSPPRSEDADMDDVKPTSLSSRSYLKSASISASKCVVVRNKHPEPEDDGIPEEMEGTVDGLSEKVSRMHS

SEQ ID NO: 140602 - DNA, 1110 bp, Zea mays; identical to SEQ ID NO: 63149
  CDS (1)..(1110)

SEQ ID NO: 140603 - protein, 369 aa, Zea mays; identical to SEQ ID NO: 63150

SEQ ID NO: 140604 - DNA, 1674 bp, Zea mays
  CDS (1)..(1674)
atgcagcacgaccagaagaagaaggcaccttcagaaatggacttttttacagagtatggcgaggggagcaggtacaagatagaagaggtcatagggaaaggcagctacggcgtggtttgctctgccgtggacactcatactggcgaaaaggccgccataaagaagataaacgacatcttcgagcatgtgtctgatgcgacaaggatactccgggaaatcaagctgcttagactcctgcggcatccggatatcgtggaaataaagcatatcctactccctccatcaaggagggaattcagggatatatacgttgtctttgaactcatggagtctgatctgcaccaagttataaaggctaacgatgacttgaccccagagcattaccagttcttcttgtatcaattgcttcgaggattgaaatacatacacacagcaaatgtattccatcgagatctcaaaccaaaaaatattctggcaaatgctgattgtaagctcaaaatatgtgattttggcctagcaagagtagctttcagtgatactccaaccgcgatcttttggacagattatgttgcaactaggtggtaccgagcaccagagctgtgtggatctttcttctccaagtatacaccggcgatagatatatggagtattggctgtatatttgcagaattgttaactggaaaacctcttttcccggggaaaaatgtggtacatcaacttgatataattacagatctccttggaacaccttctcccgaagcaatatcaaggattcgtaatgaaaaggccaggcgctacttgagcagtatgaggcgaaaaaagcctataccgtttacacaaaagttcccaaatgcagatccacttgcactatgtttgttagagcgaatgctcgcttttgagccaaaagacaggccaagtgctgaagaggctcttgctgatccttatttcaagaatatagccagtgtggatagagagccttctgcacaggctgtcacaaagcttgaatttgaattcgagaggcggagagttacaaaggaagacataagggagcttatatatagggaaattcttgagtatcatccaaagatgctgagggagtttcttgagggaactgagtcaagtggtttcatgtacccaagtgcagtagatcattttaaaaagcagtttgcataccttgaagaacattatgccaagggatctacaggaactccacctgagaggcaacataattcattgccgcggccgtctgttgtctattccgacaaccgatcacaaaccgcagccaacatcaccgaggatctttccaagtgtatgctcagagaaaatacacagaagacacatccatattctgcttctgttgcaagtaaatttccaccacatgttcctcaaggtgatgttgcaaggcctggtaaagcagttggttcggtgatgcagtacagcccatgtccagcgcctgctgccgagcgatatgagcaacgaagaatcgctaggcacccagcagttgccccaaacaatatcccttctggaagctcataccccagaagaagccagacctgcaagagtgagacaggtgatgccgaaagccatatggatgcgaaccaagctcggcagccaaagccatatgcagcgaacaaactacctgctaccgttgatagtcgtggtggtcactggtag

SEQ ID NO: 140605 - protein, 557 aa, Zea mays
MQHDQKKKAPSEMDFFTEYGEGSRYKIEEVIGKGSYGVVCSAVDTHTGEKAAIKKINDIFEHVSDATRILREIKLLRLLRHPDIVEIKHILLPPSRREFRDIYVVFELMESDLHQVIKANDDLTPEHYQFFLYQLLRGLKYIHTANVFHRDLKPKNILANADCKLKICDFGLARVAFSDTPTAIFWTDYVATRWYRAPELCGSFFSKYTPAIDIWSIGCIFAELLTGKPLFPGKNVVHQLDIITDLLGTPSPEAISRIRNEKARRYLSSMRRKKPIPFTQKFPNADPLALCLLERMLAFEPKDRPSAEEALADPYFKNIASVDREPSAQAVTKLEFEFERRRVTKEDIRELIYREILEYHPKMLREFLEGTESSGFMYPSAVDHFKKQFAYLEEHYAKGSTGTPPERQHNSLPRPSVVYSDNRSQTAANITEDLSKCMLRENTQKTHPYSASVASKFPPHVPQGDVARPGKAVGSVMQYSPCPAPAAERYEQRRIARHPAVAPNNIPSGSSYPRRSQTCKSETGDAESHMDANQARQPKPYAANKLPATVDSRGGHW

SEQ ID NO: 140606 - DNA, 1113 bp, Zea mays; identical to SEQ ID NO: 63151
  CDS (1)..(1113)

SEQ ID NO: 140607 - protein, 370 aa, Zea mays; identical to SEQ ID NO: 63152

SEQ ID NO: 140608 - DNA, 1476 bp, Zea mays; identical to SEQ ID NO: 63153
  CDS (1)..(1476)

SEQ ID NO: 140609 - protein, 491 aa, Zea mays; identical to SEQ ID NO: 63154

SEQ ID NO: 140610 - DNA, 1197 bp, Zea mays
  CDS (1)..(1197)
atggacggcggggggcagcccccggacacggagatgacagacgccggcttgggcggcggggggcagccgccgccgccgccgcagcagccggcgggcggggccgggatgatggagaacatccacgcgacgctcagccacggtggccgcttcatccagtacaacatcttcggcaacgtgttcgaggtcacctccaagtacaagccccccatcctccccatcggcaagggcgcctacggcatcgtctgctcggcgctcaactccgagacggcagagcaggtggccatcaagaagatcgccaacgccttcgacaacaagatcgatgccaagcgcacgctccgcgagatcaagctgctccgccacatggaccacgagaatattgttgcaataagagatatcatacctcctccattgagggaggcattcaatgatgtgtatattgcctatgaattgatggatactgatctgcatcaaattattcgttcaaatcaagctttgtcagaggagcactgtcagtattttctttatcaaattcttcgtggcttgaagtatatacattcagcaaatgtccttcaccgtgacttgaagcctagcaatcttcttttgaatgcaaactgtgacctcaagatatgtgattttgggcttgctcgcaccacctcagaaactgattttatgactgaatatgttgtcacaagatggtatagagcaccagagcttttattgaactcctctgaatatactgctgccattgatgtgtggtctgtgggctgtatatttatggaactgatggaccgaaaacccttgtttcctggaagagatcatgtccatcagctacgtctactaatggagctcattggaacaccgaatgaggctgatcttgattttgtaaatgaaaatgcaagaagatatatccgccaacttccctgtcatgctagacagtccttccctgaaaaatttccacatgtacaacctttagcaattgacctagtggaaaagatgctaacttttgatcctagacagagaataactgttgaaggcgcacttgcacacccttacttggcatcacttcatgacataagtgatgagccagtctgctcaatgcccttcagcttcgacttcgagcagcatgcattatctgaagaacagatgaaggatctgatctaccaagaggctcttgcattcaacccagattaccagtag

SEQ ID NO: 140611 - protein, 398 aa, Zea mays
MDGGGQPPDTEMTDAGLGGGGQPPPPPQQPAGGAGMMENIHATLSHGGRFIQYNIFGNVFEVTSKYKPPILPIGKGAYGIVCSALNSETAEQVAIKKIANAFDNKIDAKRTLREIKLLRHMDHENIVAIRDIIPPPLREAFNDVYIAYELMDTDLHQIIRSNQALSEEHCQYFLYQILRGLKYIHSANVLHRDLKPSNLLLNANCDLKICDFGLARTTSETDFMTEYVVTRWYRAPELLLNSSEYTAAIDVWSVGCIFMELMDRKPLFPGRDHVHQLRLLMELIGTPNEADLDFVNENARRYIRQLPCHARQSFPEKFPHVQPLAIDLVEKMLTFDPRQRITVEGALAHPYLASLHDISDEPVCSMPFSFDFEQHALSEEQMKDLIYQEALAFNPDYQ

SEQ ID NO: 140612 - DNA, 1635 bp, Zea mays
  CDS (1)..(1635)
atggacttttttacagagtatggcgaggggagcaggtacaagatagaagaggtcatagggaaaggcagttacggtgtggtttgctctgccttggacactcatactggtgaaaaggtcgccataaagaagataaatgacatctttgagcatgtgtctgatgcgacaaggatacttagggaaatcaagttgcttagactcctgcggcatccggatatcgtggaaataaagcatattctacttcctccatcaaggagggaattcagggatatttacgtcgtgtttgaacttatggagtctgatttgcaccaagttataaaggctaatgatgacttaaccccagagcattatcagttcttcttgtatcagttgcttcgaggtttgaaatacatacacacagcaaatgtattccatcgagatctcaaaccaaaaaatattctggcaaatgctgattgtaagctcaaaatatgtgattttggcctagcaagagtagctttcagtgatactccaaccgcgatcttttggacagattatgttgcaactaggtggtaccgagcaccggagctgtgtggatcctttttctcaaagtatacaccagcgatagatatatggagtattggttgtatatttgcagaactattaactggaaaaccgcttttcccgggaaaaaatgtggtacatcaacttgatataattacagatctcatgggaacaccttctccagaagcaatatcgaggattcgtaatgagaaggccaggcgctatttgagtaatatgaggcggaaaaagcccataccttttacacagaagttcccaaatgcagatccacttgcattaggtttgttagagcgaatgctagcttttgagccaaaagacaggccaagtgctgaagaggctcttgctcatccttattttaagaatatagccaatgtggatagagagccttctgcacaagctgtcacaaagctcgaatttgagttcgagagacggagagtcactaaagatgacataagggaacttatatatagagaaattcttgagtatcatccaaagatgttgaaagaatttattgagggaactgagtcaagtggtttcatgtacccaagtgcagtagataattttaaaaagcagtttgcataccttgaggaacattatgccaagggatctacgggaactccacctgagaggcaacataactcgttaccacggccttctgttgtctattcagacaaccaatcacaaagcacggccaatataacagaggatctttccaagtgtataatcagagaaaatgcacagaagacacagcaatataatgcttcagttgcaaataaatttccaccccatgttcctcaaggtgctgctgcaaggcctggtaaagcagttggttcggtgctgcagtacaacctctctcaagcatctgctgctgagcaatatgagcagcgaagggctgctaggcacccagcagttgccccaaacaacatcccttctggaagctcataccccagaagaaatcagacctgcaagagcgagacaggcgacactgagaggatggacgtgaaccaagctgggcagccgaagccctatgcagcaaacaaactacctgcaactgttgatggtcgcggcggccattggtag

SEQ ID NO: 140613 - protein, 544 aa, Zea mays
MDFFTEYGEGSRYKIEEVIGKGSYGVVCSALDTHTGEKVAIKKINDIFEHVSDATRILREIKLLRLLRHPDIVEIKHILLPPSRREFRDIYVVFELMESDLHQVIKANDDLTPEHYQFFLYQLLRGLKYIHTANVFHRDLKPKNILANADCKLKICDFGLARVAFSDTPTAIFWTDYVATRWYRAPELCGSFFSKYTPAIDIWSIGCIFAELLTGKPLFPGKNVVHQLDIITDLMGTPSPEAISRIRNEKARRYLSNMRRKKPIPFTQKFPNADPLALGLLERMLAFEPKDRPSAEEALAHPYFKNIANVDREPSAQAVTKLEFEFERRRVTKDDIRELIYREILEYHPKMLKEFIEGTESSGFMYPSAVDNFKKQFAYLEEHYAKGSTGTPPERQHNSLPRPSVVYSDNQSQSTANITEDLSKCIIRENAQKTQQYNASVANKFPPHVPQGAAARPGKAVGSVLQYNLSQASAAEQYEQRRAARHPAVAPNNIPSGSSYPRRNQTCKSETGDTERMDVNQAGQPKPYAANKLPATVDGRGGHW

SEQ ID NO: 140614 - DNA, 1287 bp, Zea mays; identical to SEQ ID NO: 63155
  CDS (1)..(1287)

SEQ ID NO: 140615 - protein, 428 aa, Zea mays; identical to SEQ ID NO: 63156

SEQ ID NO: 140616 - DNA, 1806 bp, Zea mays
  CDS (1)..(1806)
atgcagcaggaccagcggaacaagacttctgcagaggtcgacttcttcacagagtacggggatgcgaaccggtacaagatccaagaggtcatcggcaagggaagctacggggtcgtctgctctgccatcgatctccacactcggcagagggtggcgatcaagaagatacatggcatcttcgagcacgtctccgatgccgcgaggatcctccgcgagatcaagcttctgaggctcctgaggcaccctgacattgtcgagatcaagcacattatgctgcctccctcgagaaaggacttcaaggacattttcgttgtttttgagctcatggagtccgacctccaccaagttataaaggccaacgatgacttgaccaaggagcattaccagttctttctctatcagttacttcgggccctcaaatacattcatactgctaatgtttaccaccgtgacctcaagcccaagaatattttagcaaaccctaactgcaaattgaaaatatgtgactttggactagcccgagtcgcattcaatgataccccaacaacagtcttctggacggattatgttgcaacaaggtggtacagagctccggagctctgtggatccttcttcaccaagtatacaccagctattgacatttggagcattggatgcatatttgctgaggtgttgacagggaagcctttatttcctggtaaaaatgttgttcaccagctagatttgatgactgatcttctaggtacaccatcaacggacacaatttctcgggttcggaatgagaaagcaagaaggtacttgagcagcatgagaaagaaggaccctgttccattttcccagaagtttcccagtgcagatcctttggcacttaaactgttagaaaaactattagcgtttgatccaaaggaccgtctgacagcagaagaggcattgcgtgatccatacttcaaaggtcttgccagggctgaaagagaaccatcctgtcagccaatcagaaaagtggaatttgactttgagcacaaaagaatgtcaaaggaagagataagagagttgatattccgcgagatactggaatatcacccacaactgctgagtagctacattaatggcacagagaggacaacctttctctacccaagtgctgttgatcaatttaagaagcaattttctcatcttgaagagagtggtggtaacggtccatcagttccaacggacaggaaacatgcatcccttcccaggaccactgtggttcactcgaatccaattcctgccaaagaacaacctcttggtgcctcatcaagggttagaccagtctctgatgattcatgtaagaacccttgggagaaaggaagtggtcctggaaatgttcccaggacatctctgactccacaagggctgcaagcacaagcaggatcagtaagagttaatggcccagtgacggattcaaggtatcctcctcaccaacagatcccacaagcatacggttaccgccaaatgcctgcaaggttggacagtaccaacccatcgcaggccatgggaggttacacgctgcagtcgcagaaggcctatgcttgtgcaaacggcaaaggctcgcctgatgtggccgtgaacatgagagctccccccttccatctcccagctggaccaaagaagaacccattagataggatagcacctgacaccaccgacatatacacaagatccctgaacggcatcgtcgccgccgccgctgcatcagtgggcgctggcgctggtactcaccgaaacatcggcgttgtgccatctggcatgtcaaggatgtattag

SEQ ID NO: 140617 - protein, 601 aa, Zea mays
MQQDQRNKTSAEVDFFTEYGDANRYKIQEVIGKGSYGVVCSAIDLHTRQRVAIKKIHGIFEHVSDAARILREIKLLRLLRHPDIVEIKHIMLPPSRKDFKDIFVVFELMESDLHQVIKANDDLTKEHYQFFLYQLLRALKYIHTANVYHRDLKPKNILANPNCKLKICDFGLARVAFNDTPTTVFWTDYVATRWYRAPELCGSFFTKYTPAIDIWSIGCIFAEVLTGKPLFPGKNVVHQLDLMTDLLGTPSTDTISRVRNEKARRYLSSMRKKDPVPFSQKFPSADPLALKLLEKLLAFDPKDRLTAEEALRDPYFKGLARAEREPSCQPIRKVEFDFEHKRMSKEEIRELIFREILEYHPQLLSSYINGTERTTFLYPSAVDQFKKQFSHLEESGGNGPSVPTDRKHASLPRTTVVHSNPIPAKEQPLGASSRVRPVSDDSCKNPWEKGSGPGNVPRTSLTPQGLQAQAGSVRVNGPVTDSRYPPHQQIPQAYGYRQMPARLDSTNPSQAMGGYTLQSQKAYACANGKGSPDVAVNMRAPPFHLPAGPKKNPLDRIAPDTTDIYTRSLNGIVAAAAASVGAGAGTHRNIGVVPSGMSRMY

SEQ ID NO: 140618 - DNA, 1131 bp, Zea mays
  CDS (1)..(1131)
atgagctccgccggaggcatggacgggtctccgccggtcgccgagttccagccgacggtgacgcacggcggccggttcctccggtacaacatcttcggcaacctgttcgagatcacgcgcaagtaccagcctcccgtcatgcccatcggccgcggcgcctacgggatcgtctgctcggtgatgaacttcgagacgagggagatggtggccatcaagaagatcgccaacgccttcgacaaccacatggacgccaagcgcacgctccgggagatcaagctgatgcggcacctcgaccacgagaacatcatcggcatcagggacgtgatcccgccgccgatcccgcgggcgttcaacgacgtgtacatcggcatggagttcatggagacggacctccaccagatcatccgctccgggcaggagctgtcggaggagcactgccagtacttcctgtaccagatcctgcgcgggctcaagtacatccactccgccggcgtgatccaccgcgacctcaagcccagcaacctgctgctcagcgccaactgcgacctcaagatctgcgacttcgggctggcgcgcccgtcctccgacagcgacatgatgacggagtacgtggtgacgcggtggtaccgcgcgcccgagctgctgctcaactccaccgactactcggcggccatcgacgtctggtccgtcggctgcatcttcatggagctcatcgaccgccgcccgctcttccccggccgcgaccacatgcaccagatgcgcctcataaccgaggtgatcggaacgccgacggacgacgagctcgggttcacccggaacgaggacgcgcggaagtacatgcgccacctcccgcagttcccgcgccggccgttcgcgagcctgttcccccgggtgcagcccctcgcgctggacctcatcgagcgcatgctcaccttcaacccgctgcagaggatcacagttgcggaggcgctggcgcacccgtacctggagcggctacacgacgtcgacgacgagcccgtctgcacggagccgttctcgttcgacttcgagcggcaggctctgacagaagaccagatgaagcagctgatattcaacgaggccatcgagctgaaccccagtttccgatattag

SEQ ID NO: 140619 - protein, 376 aa, Zea mays
MSSAGGMDGSPPVAEFQPTVTHGGRFLRYNIFGNLFEITRKYQPPVMPIGRGAYGIVCSVMNFETREMVAIKKIANAFDNHMDAKRTLREIKLMRHLDHENIIGIRDVIPPPIPRAFNDVYIGMEFMETDLHQIIRSGQELSEEHCQYFLYQILRGLKYIHSAGVIHRDLKPSNLLLSANCDLKICDFGLARPSSDSDMMTEYVVTRWYRAPELLLNSTDYSAAIDVWSVGCIFMELIDRRPLFPGRDHMHQMRLITEVIGTPTDDELGFTRNEDARKYMRHLPQFPRRPFASLFPRVQPLALDLIERMLTFNPLQRITVAEALAHPYLERLHDVDDEPVCTEPFSFDFERQALTEDQMKQLIFNEAIELNPSFRY

SEQ ID NO: 140620 - DNA, 26 bp, Artificial sequence
  primer
atgaattgcacacttacagataatac

SEQ ID NO: 140621 - DNA, 24 bp, Artificial sequence
  primer
ctataaagacgaggaggacaaatc

SEQ ID NO: 140622 - protein, 378 aa, Artificial sequence
  consensus sequence
  Variant (2)..(2): Xaa in position 2 is any amino acid
  Variant (4)..(5): Xaa in position 4 to 5 is any amino acid
  Variant (7)..(7): Xaa in position 7 is any amino acid
  Variant (9)..(10): Xaa in position 9 to 10 is any amino acid
  Variant (12)..(19): Xaa in position 12 to 19 is any amino acid
  Variant (20)..(24): Xaa in position 20 to 24 is any or no amino acid
  Variant (27)..(27): Xaa in position 27 is any amino acid
  Variant (30)..(39): Xaa in position 30 to 39 is any amino acid
  Variant (40)..(45): Xaa in position 40 to 45 is any or no amino acid
  Variant (48)..(50): Xaa in position 48 to 50 is any amino acid
  Variant (52)..(57): Xaa in position 52 to 57 is any amino acid
  Variant (58)..(61): Xaa in position 58 to 61 is any or no amino acid
  Variant (63)..(76): Xaa in position 63 to 76 is any amino acid
  Variant (77)..(93): Xaa in position 77 to 93 is any or no amino acid
  Variant (95)..(97): Xaa in position 95 to 97 is any amino acid
  Variant (99)..(102): Xaa in position 99 to 102 is any amino acid
  Variant (105)..(117): Xaa in position 105 to 117 is any amino acid
  Variant (118)..(129): Xaa in position 118 to 129 is any or no amino acid
  Variant (132)..(135): Xaa in position 132 to 135 is any amino acid
  Variant (137)..(137): Xaa in position 137 is any amino acid
  Variant (139)..(139): Xaa in position 139 is any amino acid
  Variant (141)..(143): Xaa in position 141 to 143 is any amino acid
  Variant (144)..(144): Xaa in position 144 is any or no amino acid
  Variant (146)..(146): Xaa in position 146 is any amino acid
  Variant (153)..(153): Xaa in position 153 is any amino acid
  Variant (155)..(155): Xaa in position 155 is any amino acid
  Variant (157)..(161): Xaa in position 157 to 161 is any amino acid
  Variant (162)..(166): Xaa in position 162 to 166 is any or no amino acid
  Variant (169)..(170): Xaa in position 169 to 170 is any amino acid
  Variant (177)..(184): Xaa in position 177 to 184 is any amino acid
  Variant (185)..(195): Xaa in position 185 to 195 is any or no amino acid
  Variant (198)..(198): Xaa in position 198 is any amino acid
  Variant (207)..(212): Xaa in position 207 to 212 is any amino acid
  Variant (213)..(214): Xaa in position 213 to 214 is any or no amino acid
  Variant (216)..(219): Xaa in position 216 to 219 is any amino acid
  Variant (221)..(221): Xaa in position 221 is any amino acid
  Variant (224)..(224): Xaa in position 224 is any amino acid
  Variant (228)..(229): Xaa in position 228 to 229 is any amino acid
  Variant (231)..(235): Xaa in position 231 to 235 is any amino acid
  Variant (236)..(236): Xaa in position 236 is any or no amino acid
  Variant (238)..(238): Xaa in position 238 is any amino acid
  Variant (242)..(246): Xaa in position 242 to 246 is any amino acid
  Variant (247)..(254): Xaa in position 247 to 254 is any or no amino acid
  Variant (257)..(258): Xaa in position 257 to 258 is any amino acid
  Variant (260)..(261): Xaa in position 260 to 261 is any amino acid
  Variant (262)..(293): Xaa in position 262 to 293 is any or no amino acid
  Variant (295)..(295): Xaa in position 295 is any amino acid
  Variant (297)..(314): Xaa in position 297 to 314 is any amino acid
  Variant (315)..(353): Xaa in position 315 to 353 is any or no amino acid
  Variant (356)..(359): Xaa in position 356 to 359 is any amino acid
  Variant (361)..(363): Xaa in position 361 to 363 is any amino acid
  Variant (365)..(366): Xaa in position 365 to 366 is any amino acid
  Variant (368)..(372): Xaa in position 368 to 372 is any amino acid
  Variant (375)..(375): Xaa in position 375 is any amino acid
GXGXXGXVXXAXXXXXXXXXXXXXVAXKKXXXXXXXXXXXXXXXXREXXXLXXXXXXXXXXNXXXXXXXXXXXXXXXXXXXXXXXXXXXXXXXYXXXEXXXXDLXXXXXXXXXXXXXXXXXXXXXXXXXYQXXXXLXYXHXXXXVXHRDLKPXNXLXXXXXXXXXXLKXXDFGLARXXXXXXXXXXXXXXXXXXXYVXTRWYRAPEXXXXXXXXYXXXXDXWSXGCIXXEXXXXXXPXFPGXXXXXXXXXXXXXQLXXIXXXXXXXXXXXXXXXXXXXXXXXXXXXXXXXXXXGXPXXXXXXXXXXXXXXXXXXXXXXXXXXXXXXXXXXXXXXXXXXXXXXXXXXXXXXXXXDLXXXXLXXXPXXRXXXXXALXHPY

SEQ ID NO: 140623 - protein, 15 aa, Artificial sequence
  protein pattern
  Variant (2)..(6): Xaa in position 2 to 6 is any amino acid
  Variant (13)..(13): Xaa in position 13 is any amino acid
  Variant (15)..(15): Xaa in position 15 is Ile or Leu
HXXXXXHRDLKPXNX

SEQ ID NO: 140624 - protein, 12 aa, Artificial sequence
  protein pattern
  Variant (2)..(2): Xaa in position 2 is Ile or Val
  Variant (3)..(3): Xaa in position 3 is Ala, Cys, Ser or Val
  Variant (4)..(4): Xaa in position 4 is Ser or Thr
  Variant (6)..(6): Xaa in position 6 is Trp or Tyr
  Variant (12)..(12): Xaa in position 12 is Ile, Leu or Val
YXXXRXYRAPEX

SEQ ID NO: 140625 - protein, 9 aa, Artificial sequence
  protein pattern
  Variant (2)..(2): Xaa in position 2 is Ile, Leu or Val
  Variant (3)..(3): Xaa in position 3 is any amino acid
  Variant (4)..(4): Xaa in position 4 is Asp or Glu
  Variant (5)..(5): Xaa in position 5 is Phe or Leu
KXXXXGLAR

SEQ ID NO: 140626 - DNA, 1773 bp, Brassica napus
  CDS (1)..(1773)
atgatggagcagggagctttgttgcgttctgcgtcttttcaattacgccgaacgaggaacgatctttcgtctttcaagccggaaaataagttaaaccctggtcaaatccggtttaggtttaaaccggttggttccgtggcggcgaaatgcaatacgtacaacagctacgcggcgagtggaggcggcgacgcgggggctgagcatccagtggacgacaaagagttcgtgcgctggttccgtgaagcttggccttatctgtgggcccacggtggctgcactttcgtcgttgtcatctccggcgatatactcgccggcccttactgtgatcccattttaaaggacatagcgtttctccatcatcttgggataagattcgttctagttccaggaacacaagtgcaaatcgaccagcttctgtctgaaagaggacgcgaggctacatatgtgggacgttacagagtaacagacgcagcatcgttgcaagccgccacggaagctgcgggagctatctcagtgatgcttgaggctaaactatctcctggaccttccatttgcaatatccgtaggcatggtgatagtagtcgtttgcatgatataggtgtcagggttgataccggcaacttctttgcagcgaaaaggagaggcgttgttgatggtgttgattttggagcgactggtgaagtgaagaagatagatgttgaccggatttgtgagaggcttgacggtggttctgtagtcttgttgaggaacttgggtcactctagctccggagaagtcttaaattgcaatacctatgaggttgctacagcttgtgcattagctataggagcagataagcttatttgcataatggacggtccaattcttgatgagagtggacatcttattcgtttcttgacactccaagaagcagatacgttagtgagaaaacgtgtacagcaaagcgacattgctgctaactatgtaaaggctgttggtgatggaagcatggcttatcaagaacctcctggtaacgggagagcagcgttttggggaaacgggaaccacactccgatctttcaaaacggtgttggatttgacattgggagtgggttagggtctggtgagcaaggctttgctattggtggtgaggagagactaagccgccaaaacggttatctttccgaactggctgctgctgcttttgtctgcaggggtggagttaaaagagttcatttgttggatggtactataactggagttctattgttggagcttttcaaaagagatggaatggggactatggtcgctagtgatgtatacgaaggaacacgagacgccaaagtaaatgatcttgcaggaatcagacgtatcatcaaacctttggaggaagctgggatcttggtccgcagaaccgacgaggagttactccaagctttggactccttcgtggtagtcgaaagggaaggtcaaatcatcgcttgtgcagctctgttcccattcttccaagacaaatgcggagaagtcgcagccatcgcggttgcatcagactgccgcggtcaaggccaaggcgataaactactagattacatggagaagaaagcatcctctctcgggttagacacgctgtttctcctcacaacgcgagcagcagactggttcgtgagacgcgggttccaagaatgctcaatcgaggtcataccagagaccagaaggcaaagaatcaacctctcaagaaaatcaaagtactacatgaagaagctactacctgataagagtggcatctcaatataa

SEQ ID NO: 140627 - protein, 590 aa, Brassica napus; identical to SEQ ID NO: 16158

SEQ ID NO: 140628 - DNA, 2250 bp, Arabidopsis thaliana; identical to SEQ ID NO: 17360
  CDS (316)..(2250)

SEQ ID NO: 140629 - protein, 644 aa, Arabidopsis thaliana; identical to SEQ ID NO: 17361

SEQ ID NO: 140630 - DNA, 2057 bp, Arabidopsis thaliana
  CDS (138)..(1949)
tccttcgtccgaatacttttcttcttcctccaccgatcatccgccattgttacccaattttgctctgaattctattaaatctcatcggaattattcaaattccttccataaatttcgaaatgacagagcgtggagctatggtggtatcgtcttctacctgttacgttccttttcgatgtcctcaagcaagaaaagattttgctttcgtcgagccgagtaagaagctaaaccctaatcgtgtattgataaagcctccggtttacacgtattctccggcactgacggcggcgaaatgtaacatttttgattacgcggaaactggtgagaatttggtcggcgataagcaatttgtgcggtggtttcgtgaagcttggccttatttgtgggctcatcgtagctgtaccttcgtcgttactatctccggcgatgtcttagacggcccttattgtgatctcgttttaaaggacatagcatttcttcatcatctgggcattaagtttgttctagttcctggaactcaagtgcaaatcgaccagcttctagctgagagaggacgcgagcctacatatgtaggtcgttacagagtcacagactcagcatctcttcaggctgctaaggaagctgcgggagcaatatctgtaatgattgaggccaaactatctcccggaccttctatttacaatatacgccgacatggtgatagtagtcgtttgcatgaaacaggcgttagggtcgatactggtaacttctttgcagcaaagagaagaggtgttgttgatggtgttgattttggagcaactggtttagtgaagaagatagatgtagatcgaatccgtgagaggcttgatagtggttctgtagttttattgaggaacttgggccattccagcaccggagaagtcttaaattgcaatacctatgaggttgctacagcatgtgctttagctataggagcagataagcttatttgcataatggatggtccagttcttgatgagaatggacatcttgttcggttcttgactcttcaggaagcagatacattagtcagaaaacgggcacagcaaagcgagatcgctgccaattacgtgaaggctgttggggatggaggcataagtagttttcctgaacctcttggttacaatggtatggtgacgactcccaacaatcatattgggagaccgatttgggaaaaactcagtccgacctttcagaatggtgttggatttgacaacggaaatgggttgtggtctggggagcaaggttttgctattggcggtgaggagagaattagccgtttgaatggatatctctctgaactggctgcagcagcgttcgtttgcagaggtggtgtcaaaagagttcacttattggatggtactataagtggagtgctattgttggagcttttcaaaagagatggaatggggactatggtggcaagtgatgtatatgaaggaaaccgggaggcgaaagtggaagatcttgctggaataagacaaataatcaaacccctggaagaatctggggctttagttcgtagaactgatgaggagcttctgcgagctttggattcgtttgtggttgtggaaagggaaggacatattatcgcttgcgcggctttgttccctttctttgaagaaaaatgtggagaagttgcagctatcgcagttgcatcagattgccgtggacaaggccagggagataaattgctcgattacattgagaagaaagcgtcagctcttggacttgagatgctatttctgctgacaacgagaaccgcggactggtttgtgagacgcgggtttcaggaatgtccaatcgagatgataccagaggcaagacgggaaagaatcaatctttcgaggagatcaaagtattacatgaagaagctgttgccagacaggagtggaatttctgttgttcgaacatttcagtatgattcttgagagtgtccagaagcagaaaattcaaacatagagcaaataaaatgtaattgacacagaaacatttagctgaatctctaagattctgctgagttttgaatcaatattttc

SEQ ID NO: 140631 - protein, 603 aa, Arabidopsis thaliana
MVVSSSTCYVPFRCPQARKDFAFVEPSKKLNPNRVLIKPPVYTYSPALTAAKCNIFDYAETGENLVGDKQFVRWFREAWPYLWAHRSCTFVVTISGDVLDGPYCDLVLKDIAFLHHLGIKFVLVPGTQVQIDQLLAERGREPTYVGRYRVTDSASLQAAKEAAGAISVMIEAKLSPGPSIYNIRRHGDSSRLHETGVRVDTGNFFAAKRRGVVDGVDFGATGLVKKIDVDRIRERLDSGSVVLLRNLGHSSTGEVLNCNTYEVATACALAIGADKLICIMDGPVLDENGHLVRFLTLQEADTLVRKRAQQSEIAANYVKAVGDGGISSFPEPLGYNGMVTTPNNHIGRPIWEKLSPTFQNGVGFDNGNGLWSGEQGFAIGGEERISRLNGYLSELAAAAFVCRGGVKRVHLLDGTISGVLLLELFKRDGMGTMVASDVYEGNREAKVEDLAGIRQIIKPLEESGALVRRTDEELLRALDSFVVVEREGHIIACAALFPFFEEKCGEVAAIAVASDCRGQGQGDKLLDYIEKKASALGLEMLFLLTTRTADWFVRRGFQECPIEMIPEARRERINLSRRSKYYMKKLLPDRSGISVVRTFQYDS

SEQ ID NO: 140632 - DNA, 2096 bp, Triticum aestivum; identical to SEQ ID NO: 16159
  CDS (110)..(1852)

SEQ ID NO: 140633 - protein, 580 aa, Triticum aestivum; identical to SEQ ID NO: 16160

SEQ ID NO: 140634 - DNA, 1332 bp, Klebsiella pneumoniae subsp. pneumoniae MGH 78578; identical to SEQ ID NO: 16161
  CDS (1)..(1332): transl_table=11

SEQ ID NO: 140635 - protein, 443 aa, Klebsiella pneumoniae subsp. pneumoniae MGH 78578; identical to SEQ ID NO: 16162

SEQ ID NO: 140636 - DNA, 1851 bp, Oryza sativa (japonica cultivar-group); identical to SEQ ID NO: 16163
  CDS (1)..(1851)

SEQ ID NO: 140637 - protein, 616 aa, Oryza sativa (japonica cultivar-group); identical to SEQ ID NO: 16164

SEQ ID NO: 140638 - DNA, 1794 bp, Oryza sativa (japonica cultivar-group); identical to SEQ ID NO: 16165
  CDS (1)..(1794)

SEQ ID NO: 140639 - protein, 597 aa, Oryza sativa (japonica cultivar-group); identical to SEQ ID NO: 16166

SEQ ID NO: 140640 - DNA, 1830 bp, Arabidopsis thaliana; identical to SEQ ID NO: 16167
  CDS (1)..(1830)

SEQ ID NO: 140641 - protein, 609 aa, Arabidopsis thaliana; identical to SEQ ID NO: 16168

SEQ ID NO: 140642 - DNA, 1398 bp, Escherichia coli CFT073; identical to SEQ ID NO: 16169
  CDS (1)..(1398): transl_table=11

SEQ ID NO: 140643 - protein, 465 aa, Escherichia coli CFT073; identical to SEQ ID NO: 16170

SEQ ID NO: 140644 - DNA, 1347 bp, Pseudomonas syringae pv. tomato str. DC3000; identical to SEQ ID NO: 16171
  CDS (1)..(1347): transl_table=11

SEQ ID NO: 140645 - protein, 448 aa, Pseudomonas syringae pv. tomato str. DC3000; identical to SEQ ID NO: 16172

SEQ ID NO: 140646 - DNA, 1335 bp, Nitrosomonas europaea ATCC 19718; identical to SEQ ID NO: 81592
  CDS (1)..(1335): transl_table=11

SEQ ID NO: 140647 - protein, 444 aa, Nitrosomonas europaea ATCC 19718; identical to SEQ ID NO: 81593

SEQ ID NO: 140648 - DNA, 1404 bp, Bordetella parapertussis 12822; identical to SEQ ID NO: 81594
  CDS (1)..(1404): transl_table=11

SEQ ID NO: 140649 - protein, 467 aa, Bordetella parapertussis 12822; identical to SEQ ID NO: 81595

SEQ ID NO: 140650 - DNA, 1308 bp, Chromobacterium violaceum ATCC 12472; identical to SEQ ID NO: 81596
  CDS (1)..(1308): transl_table=11

SEQ ID NO: 140651 - protein, 435 aa, Chromobacterium violaceum ATCC 12472; identical to SEQ ID NO: 81597

SEQ ID NO: 140652 - DNA, 1842 bp, Arabidopsis thaliana; identical to SEQ ID NO: 16175
  CDS (1)..(1842)

SEQ ID NO: 140653 - protein, 613 aa, Arabidopsis thaliana; identical to SEQ ID NO: 16176

SEQ ID NO: 140654 - DNA, 1311 bp, Herminiimonas arsenicoxydans; identical to SEQ ID NO: 16177
  CDS (1)..(1311): transl_table=11

SEQ ID NO: 140655 - protein, 436 aa, Herminiimonas arsenicoxydans; identical to SEQ ID NO: 16178

SEQ ID NO: 140656 - DNA, 1380 bp, Burkholderia vietnamiensis G4
  CDS (1)..(1380): transl_table=11
atgaattcccaaaccgacctccctcccgcccagaccgacgccacgacgccgccggctcccgacgattcggccgtcagccacgcgcagttcgtcgactggatgcgctccgtcgcgccctatatccacaagttccgcaacagcacgttcgtcgtggggttcggtggcgaggtggtgcagcaagggctgctgaacgcgctcgtgtcggacatcgcgctgttgcaggcgatgggcatccagatcgtgctggtgcacggctcgcggccgcaggtcgaggagcagctgagcctgcacggcgtcgagtcggagttctcgcacgggctgcgcatcaccgatgcgcgcgcactcgaatcggcgaaggaggcggccggcgaggtgcggctggacatcgaggctgcgatcagccaggggctgccgaactcgccgatggcgcatgcgcacatcagcgtcgtgtccggcaacttcgtgaccgcacggccggtggggattctcgacggcgtggacttcgcgcacaccggcatcgtgcgcaagatcgacgccgagtcgatccgtcattcgctcgcgagccgcaagctcgtgctgctgtcgccgctcggtttctcgccgaccggcgaggcgttcaacctgtcgatggaagacgtcgcgtcggccgccgcgatcgcgctgcgcgccgacaagatcatcttcctgaccgaagcgcccggcatcgtcgacgacgaaggcgagctggtccgcgaaatgtcgctcgatgcggccgccgagctgctcgattcgggcaacattcagggcgacgatgcgttcttcctgaagcattcgattcgcgcatgccgcggcggcgtgacgcgtgcgcatctgattccgcaatcgctcgacggcagcatgctgctcgaactgttcctgcacgacggcgtcggcacgatgatctcgtacgagaatctggagagcctgcgcgaggcgacgccggacgacgtcggcggcatcctgtcgctgatcgagccgctcgagtccgacggcacgctggtgcggcgcgggcgtcaccagatcgaacgcgacatcgaccatttctcggtgatcgagcacgatggcgtgctgttcggctgtgcggcgctgtatccgtaccagcaggaaaagatcggcgagatggcgtgcctgacggtggcgccggaagcgcagggctcgggcgacggcgagcgcctgctcaagcgcatcgagcagcgtgcgcgcgcacgcgggctcacgcatatcttcgtgctgacgacgcgcacggagcactggttcctcaagcgcggcttcgtcaaggtcagcgtcgacgacctgccggaagaccgccgcaagctctacaactggcagcgcaagtcgctcgtgctgatgaagcagctctga

SEQ ID NO: 140657 - protein, 459 aa, Burkholderia vietnamiensis G4
MNSQTDLPPAQTDATTPPAPDDSAVSHAQFVDWMRSVAPYIHKFRNSTFVVGFGGEVVQQGLLNALVSDIALLQAMGIQIVLVHGSRPQVEEQLSLHGVESEFSHGLRITDARALESAKEAAGEVRLDIEAAISQGLPNSPMAHAHISVVSGNFVTARPVGILDGVDFAHTGIVRKIDAESIRHSLASRKLVLLSPLGFSPTGEAFNLSMEDVASAAAIALRADKIIFLTEAPGIVDDEGELVREMSLDAAAELLDSGNIQGDDAFFLKHSIRACRGGVTRAHLIPQSLDGSMLLELFLHDGVGTMISYENLESLREATPDDVGGILSLIEPLESDGTLVRRGRHQIERDIDHFSVIEHDGVLFGCAALYPYQQEKIGEMACLTVAPEAQGSGDGERLLKRIEQRARARGLTHIFVLTTRTEHWFLKRGFVKVSVDDLPEDRRKLYNWQRKSLVLMKQL

SEQ ID NO: 140658 - DNA, 1356 bp, Acinetobacter sp. ADP1; identical to SEQ ID NO: 16179
  CDS (1)..(1356): transl_table=11

SEQ ID NO: 140659 - protein, 451 aa, Acinetobacter sp. ADP1; identical to SEQ ID NO: 16180

SEQ ID NO: 140660 - DNA, 1326 bp, Erwinia carotovora subsp. atroseptica SCRI1043; identical to SEQ ID NO: 16181
  CDS (1)..(1326): transl_table=11

SEQ ID NO: 140661 - protein, 441 aa, Erwinia carotovora subsp. atroseptica SCRI1043; identical to SEQ ID NO: 16182

SEQ ID NO: 140662 - DNA, 1320 bp, Mannheimia succiniciproducens MBEL55E; identical to SEQ ID NO: 16183
  CDS (1)..(1320): transl_table=11

SEQ ID NO: 140663 - protein, 439 aa, Mannheimia succiniciproducens MBEL55E; identical to SEQ ID NO: 16184

SEQ ID NO: 140664 - DNA, 1347 bp, Methylococcus capsulatus str. Bath; identical to SEQ ID NO: 16185
  CDS (1)..(1347): transl_table=11

SEQ ID NO: 140665 - protein, 448 aa, Methylococcus capsulatus str. Bath; identical to SEQ ID NO: 16186

SEQ ID NO: 140666 - DNA, 1407 bp, Azoarcus sp. EbN1; identical to SEQ ID NO: 16187
  CDS (1)..(1407): transl_table=11

SEQ ID NO: 140667 - protein, 468 aa, Azoarcus sp. EbN1; identical to SEQ ID NO: 16188

SEQ ID NO: 140668 - DNA, 1299 bp, Pseudomonas fluorescens Pf-5; identical to SEQ ID NO: 16189
  CDS (1)..(1299): transl_table=11

SEQ ID NO: 140669 - protein, 432 aa, Pseudomonas fluorescens Pf-5; identical to SEQ ID NO: 16190

SEQ ID NO: 140670 - DNA, 1323 bp, Psychrobacter arcticus 273-4; identical to SEQ ID NO: 16191
  CDS (1)..(1323): transl_table=11

SEQ ID NO: 140671 - protein, 440 aa, Psychrobacter arcticus 273-4; identical to SEQ ID NO: 16192

SEQ ID NO: 140672 - DNA, 1311 bp, Colwellia psychrerythraea 34H; identical to SEQ ID NO: 16193
  CDS (1)..(1311): transl_table=11

SEQ ID NO: 140673 - protein, 436 aa, Colwellia psychrerythraea 34H; identical to SEQ ID NO: 16194

SEQ ID NO: 140674 - DNA, 1347 bp, Pseudomonas syringae pv. phaseolicola 1448A; identical to SEQ ID NO: 16195
  CDS (1)..(1347): transl_table=11

SEQ ID NO: 140675 - protein, 448 aa, Pseudomonas syringae pv. phaseolicola 1448A; identical to SEQ ID NO: 16196

SEQ ID NO: 140676 - DNA, 1320 bp, Dechloromonas aromatica RCB; identical to SEQ ID NO: 16197
  CDS (1)..(1320): transl_table=11

SEQ ID NO: 140677 - protein, 439 aa, Dechloromonas aromatica RCB; identical to SEQ ID NO: 16198

SEQ ID NO: 140678 - DNA, 1329 bp, Thiobacillus denitrificans ATCC 25259; identical to SEQ ID NO: 16199
  CDS (1)..(1329): transl_table=11

SEQ ID NO: 140679 - protein, 442 aa, Thiobacillus denitrificans ATCC 25259; identical to SEQ ID NO: 16200

SEQ ID NO: 140680 - DNA, 1299 bp, Pseudomonas fluorescens PfO-1; identical to SEQ ID NO: 16201
  CDS (1)..(1299): transl_table=11

SEQ ID NO: 140681 - protein, 432 aa, Pseudomonas fluorescens PfO-1; identical to SEQ ID NO: 16202

SEQ ID NO: 140682 - DNA, 1380 bp, Burkholderia sp. 383; identical to SEQ ID NO: 16203
  CDS (1)..(1380): transl_table=11

SEQ ID NO: 140683 - protein, 459 aa, Burkholderia sp. 383; identical to SEQ ID NO: 16204

SEQ ID NO: 140684 - DNA, 1377 bp, Burkholderia thailandensis E264
  CDS (1)..(1377): transl_table=11
atgaattcccaaaccgacctccccgccgcccaatcgggtgccgcgccccagccgtccgtcgacgaagccgtccatcacgcgcagttcgtcgactggatgcgctccgtcgcgccctatatccacaagttccgcaacagcacgttcgtggtcggcttcggcggcgaggtcgtgcagcacgggctgctgagcgcgctcgtgtccgacatcgcgctcttgcaggcgatgggcatccagatcgtgctcgtgcacggctcgcggccgcaggtcgaggagcaactgcacctgcacggcgtcgaatcggcgttctcgcacggcctgcggatcaccgatgcgcgcgcgctcgaatcggcgaaggaagcggcgggcgaagtgcggctcgacatcgaggcggcgatcagccagggcttgccgaacacgccgatggcgcacgcgcacatcagcgtcgtgtcgggcaacttcgtcaccgcgcggccggtcggaattctcgacggcgtcgatttcgctcatacgggcgtcgtgcgcaagatcgacgccgaatcgatccgccactcgctcgcgagccgcaagctcgtgctgctgtcgccgctcggcttctcgccgacgggcgaggcgttcaacctgtcgatggaggatgtcgcgtcggcggccgcgatcgcgctgcgcgccgacaagatcattttcctgaccgagtcgcccggcatcgtcgacgaagcgggcgagctcgtgcgcgagatgtcgctcgacgcggcggccgagctgctcgactcgggcgatctgcagggcgacgacgggttcttcctgaagcacgcgatccgcgcatgccgcggcggcgtcgcgcgcgcacacctgattccgcaatcgctcgacggcagcgtgctgctcgagctgttcctgcacgacggcgtgggcacgatgatctcgtacgagaacctcgaaagcctgcgcgaggcgacgccggacgacgtcggcggcatcctgaccctcatcgagccgctcgagacggacggcacgctcgtgcggcgaggccgccaccagatcgagcgcgacatcgatcacttctcggtcatcgagcacgacggcgtgctgttcggctgcgcggcgctctacccgtacccgaccgagaagatcggcgagatggcgtgcctgacggtcgcgcccgaggcgcaaggctcgggcgacggcgagcggctcctgaagcggatcgagcagcgcgcccgcgcgcgcggcttgacgcggatcttcgtgctgacgacccgcaccgagcactggttcctcaagcgcggcttcgtgaaggtgacggtcgacgacctgcccgaagaccgtcgcaagctctacaactggcagcgcaagtcgctcgtgctgatgaagcagctctga

SEQ ID NO: 140685 - protein, 458 aa, Burkholderia thailandensis E264
MNSQTDLPAAQSGAAPQPSVDEAVHHAQFVDWMRSVAPYIHKFRNSTFVVGFGGEVVQHGLLSALVSDIALLQAMGIQIVLVHGSRPQVEEQLHLHGVESAFSHGLRITDARALESAKEAAGEVRLDIEAAISQGLPNTPMAHAHISVVSGNFVTARPVGILDGVDFAHTGVVRKIDAESIRHSLASRKLVLLSPLGFSPTGEAFNLSMEDVASAAAIALRADKIIFLTESPGIVDEAGELVREMSLDAAAELLDSGDLQGDDGFFLKHAIRACRGGVARAHLIPQSLDGSVLLELFLHDGVGTMISYENLESLREATPDDVGGILTLIEPLETDGTLVRRGRHQIERDIDHFSVIEHDGVLFGCAALYPYPTEKIGEMACLTVAPEAQGSGDGERLLKRIEQRARARGLTRIFVLTTRTEHWFLKRGFVKVTVDDLPEDRRKLYNWQRKSLVLMKQL

SEQ ID NO: 140686 - DNA, 1320 bp, Saccharophagus degradans 2-40; identical to SEQ ID NO: 16205
  CDS (1)..(1320): transl_table=11

SEQ ID NO: 140687 - protein, 439 aa, Saccharophagus degradans 2-40; identical to SEQ ID NO: 16206

SEQ ID NO: 140688 - DNA, 1566 bp, Methylobacillus flagellatus KT; identical to SEQ ID NO: 16207
  CDS (1)..(1566): transl_table=11

SEQ ID NO: 140689 - protein, 521 aa, Methylobacillus flagellatus KT; identical to SEQ ID NO: 16208

SEQ ID NO: 140690 - DNA, 1389 bp, Burkholderia xenovorans LB400; identical to SEQ ID NO: 81620
  CDS (1)..(1389): transl_table=11

SEQ ID NO: 140691 - protein, 462 aa, Burkholderia xenovorans LB400; identical to SEQ ID NO: 81621

SEQ ID NO: 140692 - DNA, 1437 bp, Ralstonia metallidurans CH34; identical to SEQ ID NO: 16209
  CDS (1)..(1437): transl_table=11

SEQ ID NO: 140693 - protein, 478 aa, Ralstonia metallidurans CH34; identical to SEQ ID NO: 16210

SEQ ID NO: 140694 - DNA, 1335 bp, Alkalilimnicola ehrlichei MLHE-1; identical to SEQ ID NO: 16213
  CDS (1)..(1335): transl_table=11

SEQ ID NO: 140695 - protein, 444 aa, Alkalilimnicola ehrlichei MLHE-1; identical to SEQ ID NO: 16214

SEQ ID NO: 140696 - DNA, 1338 bp, Shewanella sp. ANA-3; identical to SEQ ID NO: 81628
  CDS (1)..(1338): transl_table=11

SEQ ID NO: 140697 - protein, 445 aa, Shewanella sp. ANA-3; identical to SEQ ID NO: 81629

SEQ ID NO: 140698 - DNA, 1359 bp, Azoarcus sp. BH72; identical to SEQ ID NO: 81630
  CDS (1)..(1359): transl_table=11

SEQ ID NO: 140699 - protein, 452 aa, Azoarcus sp. BH72; identical to SEQ ID NO: 81631

SEQ ID NO: 140700 - DNA, 1338 bp, Pseudoalteromonas tunicata D2; identical to SEQ ID NO: 81634
  CDS (1)..(1338): transl_table=11

SEQ ID NO: 140701 - protein, 445 aa, Pseudoalteromonas tunicata D2; identical to SEQ ID NO: 81635

SEQ ID NO: 140702 - DNA, 1251 bp, Oceanospirillum sp. MED92; identical to SEQ ID NO: 81636
  CDS (1)..(1251): transl_table=11

SEQ ID NO: 140703 - protein, 416 aa, Oceanospirillum sp. MED92; identical to SEQ ID NO: 81637

SEQ ID NO: 140704 - DNA, 1215 bp, Oceanobacter sp. RED65; identical to SEQ ID NO: 81640
  CDS (1)..(1215): transl_table=11

SEQ ID NO: 140705 - protein, 404 aa, Oceanobacter sp. RED65; identical to SEQ ID NO: 81641

SEQ ID NO: 140706 - DNA, 1305 bp, marine gamma proteobacterium HTCC2080; identical to SEQ ID NO: 81646
  CDS (1)..(1305): transl_table=11

SEQ ID NO: 140707 - protein, 434 aa, marine gamma proteobacterium HTCC2080; identical to SEQ ID NO: 81647

SEQ ID NO: 140708 - DNA, 1299 bp, Pseudomonas putida GB-1; identical to SEQ ID NO: 16215
  CDS (1)..(1299): transl_table=11

SEQ ID NO: 140709 - protein, 432 aa, Pseudomonas putida GB-1; identical to SEQ ID NO: 16216

SEQ ID NO: 140710 - DNA, 1308 bp, Marinobacter sp. ELB17; identical to SEQ ID NO: 16217
  CDS (1)..(1308): transl_table=11

SEQ ID NO: 140711 - protein, 435 aa, Marinobacter sp. ELB17; identical to SEQ ID NO: 16218

SEQ ID NO: 140712 - DNA, 1329 bp, Moritella sp. PE36; identical to SEQ ID NO: 16219
  CDS (1)..(1329): transl_table=11

SEQ ID NO: 140713 - protein, 442 aa, Moritella sp. PE36; identical to SEQ ID NO: 16220

SEQ ID NO: 140714 - DNA, 1770 bp, Oryza sativa subsp; identical to SEQ ID NO: 16221
  CDS (1)..(1770)

SEQ ID NO: 140715 - protein, 589 aa, Oryza sativa subsp; identical to SEQ ID NO: 16222

SEQ ID NO: 140716 - DNA, 1863 bp, Arabidopsis thaliana; identical to SEQ ID NO: 16223
  CDS (1)..(1863)

SEQ ID NO: 140717 - protein, 620 aa, Arabidopsis thaliana; identical to SEQ ID NO: 16224

SEQ ID NO: 140718 - DNA, 1851 bp, Ostreococcus tauri; identical to SEQ ID NO: 16225
  CDS (1)..(1851)

SEQ ID NO: 140719 - protein, 616 aa, Ostreococcus tauri; identical to SEQ ID NO: 16226

SEQ ID NO: 140720 - DNA, 1329 bp, Buchnera aphidicola subsp; identical to SEQ ID NO: 81656
  CDS (1)..(1329): transl_table=11

SEQ ID NO: 140721 - protein, 442 aa, Buchnera aphidicola subsp; identical to SEQ ID NO: 81657

SEQ ID NO: 140722 - DNA, 1332 bp, Escherichia coli O157; identical to SEQ ID NO: 16229
  CDS (1)..(1332): transl_table=11

SEQ ID NO: 140723 - protein, 443 aa, Escherichia coli O157; identical to SEQ ID NO: 16230

SEQ ID NO: 140724 - DNA, 1314 bp, Haemophilus ducreyi; identical to SEQ ID NO: 81658
  CDS (1)..(1314): transl_table=11

SEQ ID NO: 140725 - protein, 437 aa, Haemophilus ducreyi; identical to SEQ ID NO: 81659

SEQ ID NO: 140726 - DNA, 1323 bp, Pasteurella multocida; identical to SEQ ID NO: 81662
  CDS (1)..(1323): transl_table=11

SEQ ID NO: 140727 - protein, 440 aa, Pasteurella multocida; identical to SEQ ID NO: 81663

SEQ ID NO: 140728 - DNA, 1347 bp, Photorhabdus luminescens subsp; identical to SEQ ID NO: 81664
  CDS (1)..(1347): transl_table=11

SEQ ID NO: 140729 - protein, 448 aa, Photorhabdus luminescens subsp; identical to SEQ ID NO: 81665

SEQ ID NO: 140730 - DNA, 1299 bp, Pseudomonas aeruginosa; identical to SEQ ID NO: 16231
  CDS (1)..(1299): transl_table=11

SEQ ID NO: 140731 - protein, 432 aa, Pseudomonas aeruginosa; identical to SEQ ID NO: 16232

SEQ ID NO: 140732 - DNA, 1299 bp, Pseudomonas putida; identical to SEQ ID NO: 16233
  CDS (1)..(1299): transl_table=11

SEQ ID NO: 140733 - protein, 432 aa, Pseudomonas putida; identical to SEQ ID NO: 16234

SEQ ID NO: 140734 - DNA, 1299 bp, Pseudomonas syringae pv; identical to SEQ ID NO: 16235
  CDS (1)..(1299): transl_table=11

SEQ ID NO: 140735 - protein, 432 aa, Pseudomonas syringae pv; identical to SEQ ID NO: 16236

SEQ ID NO: 140736 - DNA, 1356 bp, Ralstonia solanacearum; identical to SEQ ID NO: 16237
  CDS (1)..(1356): transl_table=11

SEQ ID NO: 140737 - protein, 451 aa, Ralstonia solanacearum; identical to SEQ ID NO: 16238

SEQ ID NO: 140738 - DNA, 1332 bp, Salmonella typhi
  CDS (1)..(1332): transl_table=11
atgataaaggaacgtaaaaccgaactggtagaagggtttcgccattcagttccctatatcaatacccatcgcggaaaaacctttgtcattatgctcggcggcgaagccattgagcatgacaatttttccagcatcgttagcgatatcgggctactgcatagcctcggtattcgccttgtcgtggtgtatggcgcgcgaccgcaaatcgacgccaatctggccgcgcatcatcatgaaccgatttaccacaaaaacacacgggtgacggacgccaaaacactggagctggtgaaacaggccgccggtttactccagcttgatattaccgcccgtctgtcgatgagtctgaacaatacgccgttgcagggcgcgcacattaatgtcgtcagcggcaatttcaccattgcgcagccgctgggcgttgatgatggcgtggactactgtcatagcggccgtatccggcgcattgatgaagatgcgatcaaccgccagttggataacggcgcgatcgttctgatggggccggtcgccgtctcagtgaccggcgaaagttttaatctgacctcagaagagattgccactcaactcgccgttaaactgaaagcggaaaaaatgatcggtttctgttcttctcagggcgttaccaatagcgagggcggcatcatttctgaactcttcccgaatgaagcgcaggcgcgggtggaagagttggaagcgcagggcgattacaactccggaaccgtacgttttttgcgcggcgcggtaaaagcctgtcgtagcggcgttcgtcgttgccatctgatcagctatcaggaagatggctcgctattacaggaattgttctcgcgtgatggtatcggtacgcagatcgtcatggagagcgccgagcagatccgccgcgctaccatcaacgatattggcggtattctggagcttatccgcccactggaacagcagggcattctggtacgccgttcccgtgaacaactggagatggagatcgataaatttaccattattcagcgcgataatatgactatcgcttgcgcggcgctgtatccttttgtggaagagaaaataggcgaaatggcctgcgtagcggtacatccggattatcgcagctcatcgcgtggagaagtgcttctggagcgggttgccgcccaggcacggcaaatggggctgcgtaaattgtttgtgttgacgacgcgcagtattcactggttccaggagcgcggttttacgcctgtcgatattgagttactgcctgagagcaagaaaaaaatgtataactatcagcgacgttcaaaggtgctgatggcagatttaggataa

SEQ ID NO: 140739 - protein, 443 aa, Salmonella typhi
MIKERKTELVEGFRHSVPYINTHRGKTFVIMLGGEAIEHDNFSSIVSDIGLLHSLGIRLVVVYGARPQIDANLAAHHHEPIYHKNTRVTDAKTLELVKQAAGLLQLDITARLSMSLNNTPLQGAHINVVSGNFTIAQPLGVDDGVDYCHSGRIRRIDEDAINRQLDNGAIVLMGPVAVSVTGESFNLTSEEIATQLAVKLKAEKMIGFCSSQGVTNSEGGIISELFPNEAQARVEELEAQGDYNSGTVRFLRGAVKACRSGVRRCHLISYQEDGSLLQELFSRDGIGTQIVMESAEQIRRATINDIGGILELIRPLEQQGILVRRSREQLEMEIDKFTIIQRDNMTIACAALYPFVEEKIGEMACVAVHPDYRSSSRGEVLLERVAAQARQMGLRKLFVLTTRSIHWFQERGFTPVDIELLPESKKKMYNYQRRSKVLMADLG

SEQ ID NO: 140740 - DNA, 1332 bp, Salmonella typhimurium; identical to SEQ ID NO: 17422
  CDS (1)..(1332): transl_table=11

SEQ ID NO: 140741 - protein, 443 aa, Salmonella typhimurium; identical to SEQ ID NO: 17423

SEQ ID NO: 140742 - DNA, 1332 bp, Shigella flexneri; identical to SEQ ID NO: 16239
  CDS (1)..(1332): transl_table=11

SEQ ID NO: 140743 - protein, 443 aa, Shigella flexneri; identical to SEQ ID NO: 16240

SEQ ID NO: 140744 - DNA, 1338 bp, Vibrio parahaemolyticus; identical to SEQ ID NO: 17424
  CDS (1)..(1338): transl_table=11

SEQ ID NO: 140745 - protein, 445 aa, Vibrio parahaemolyticus; identical to SEQ ID NO: 17425

SEQ ID NO: 140746 - DNA, 1338 bp, Vibrio vulnificus; identical to SEQ ID NO: 81676
  CDS (1)..(1338): transl_table=11

SEQ ID NO: 140747 - protein, 445 aa, Vibrio vulnificus; identical to SEQ ID NO: 81677

SEQ ID NO: 140748 - DNA, 1326 bp, Yersinia pestis
  CDS (1)..(1326): transl_table=11
gtgaaggaacgtagtactgaactggttcaaggatttcgccactcagttccctatatcaatgcgcaccgcggcaagacatttgttgtcatgctaggtggcgaagcgattgaacatgaaaacttctctagtatcgtcaacgatataggcttattacatagccttgggatcagattagtcgtggtatacggtgcccgaccacagattgacagtaatctggcagatcataactacgaacctatttatcataaacatacccgagtgactgacgcccggactctggagatggtcaagcaagcggccggtttattacaactggatatcacggccaggctttcaatgagtttgaacaacaccccactgcaaggtgctcatatcaacgtagttagcggtaactttatcattgctcaaccgctaggtgtggatgatggtgttgattattgccatagcgggcgtatccggcgcattgatgaagaagctattcatcgccaattggataatggcgctatcgttttgctggggccagttgcggtatcggtcacaggtgaaagctttaacctcacatcagaggaagttgcaactcagttagccatcaaactgaaagcggagaaaatgattggattctgctcatcacaaggggtgactgatagcgaaggtaatattatttcagaattgttcccaaacgatgcgcaaaagcggattgaagacctggaacaggatggggattacaattcgggcacagtacgtttcttgcgtggtgccgttaaagcctgccgcagcggtgtgcgccgtagccatttactcagctatcaggaagatggcgctctgattcaagaactcttctcccgtgacggtatcggtacccagattgtcatggaaagtgcggagcaagtccgccgagccaccatcaacgatatcggcggtatcttggaactgattcgcccattggaacaacaagggatcttggtgcgccgttcacgtgaacaattagagatggagatcgataagtttactattattgaacgggataatttaactatcgcttgcgccgccctctatccgttccctgatgaacatattggtgaaatggcttgtgtcgcggtccatccagattatcgcagctcctcccggggagaaatgctgctgaataggataaccaatcaggcgcgacaaatgggccttaaaaagctgtttgtgctgaccacacgcagcattcactggttccaggaacgcggttttacacctgcagaggtagatgttttacctattcaaaaacaggaactgtataactatcagcgccgttcgaagatcttactggccgatctatag

SEQ ID NO: 140749 - protein, 441 aa, Yersinia pestis
MKERSTELVQGFRHSVPYINAHRGKTFVVMLGGEAIEHENFSSIVNDIGLLHSLGIRLVVVYGARPQIDSNLADHNYEPIYHKHTRVTDARTLEMVKQAAGLLQLDITARLSMSLNNTPLQGAHINVVSGNFIIAQPLGVDDGVDYCHSGRIRRIDEEAIHRQLDNGAIVLLGPVAVSVTGESFNLTSEEVATQLAIKLKAEKMIGFCSSQGVTDSEGNIISELFPNDAQKRIEDLEQDGDYNSGTVRFLRGAVKACRSGVRRSHLLSYQEDGALIQELFSRDGIGTQIVMESAEQVRRATINDIGGILELIRPLEQQGILVRRSREQLEMEIDKFTIIERDNLTIACAALYPFPDEHIGEMACVAVHPDYRSSSRGEMLLNRITNQARQMGLKKLFVLTTRSIHWFQERGFTPAEVDVLPIQKQELYNYQRRSKILLADL

SEQ ID NO: 140750 - DNA, 1731 bp, Oryza sativa; identical to SEQ ID NO: 16241
  CDS (1)..(1731)

SEQ ID NO: 140751 - protein, 576 aa, Oryza sativa; identical to SEQ ID NO: 16242

SEQ ID NO: 140752 - DNA, 1776 bp, Oryza sativa; identical to SEQ ID NO: 16243
  CDS (1)..(1776)

SEQ ID NO: 140753 - protein, 591 aa, Oryza sativa; identical to SEQ ID NO: 16244

SEQ ID NO: 140754 - DNA, 1809 bp, Glycine max; identical to SEQ ID NO: 16155
  CDS (1)..(1809)

SEQ ID NO: 140755 - protein, 602 aa, Glycine max; identical to SEQ ID NO: 16156

SEQ ID NO: 140756 - DNA, 1824 bp, Glycine max; identical to SEQ ID NO: 16245
  CDS (1)..(1824)

SEQ ID NO: 140757 - protein, 607 aa, Glycine max; identical to SEQ ID NO: 16246

SEQ ID NO: 140758 - DNA, 1773 bp, Brassica napus; identical to SEQ ID NO: 16247
  CDS (1)..(1773)

SEQ ID NO: 140759 - protein, 590 aa, Brassica napus; identical to SEQ ID NO: 16248

SEQ ID NO: 140760 - DNA, 1794 bp, Zea mays; identical to SEQ ID NO: 16249
  CDS (1)..(1794)

SEQ ID NO: 140761 - protein, 597 aa, Zea mays; identical to SEQ ID NO: 16250

SEQ ID NO: 140762 - DNA, 21 bp, Artificial sequence
  primer
atgatggagcagggagctttg

SEQ ID NO: 140763 - DNA, 24 bp, Artificial sequence
  primer
ttatattgagatgccactcttatc

SEQ ID NO: 140764 - protein, 566 aa, Artificial sequence
  consensus sequence
  Variant (2)..(4): Xaa in position 2 to 4 is any amino acid
  Variant (6)..(8): Xaa in position 6 to 8 is any amino acid
  Variant (11)..(14): Xaa in position 11 to 14 is any amino acid
  Variant (16)..(17): Xaa in position 16 to 17 is any amino acid
  Variant (21)..(23): Xaa in position 21 to 23 is any amino acid
  Variant (24)..(24): Xaa in position 24 is any or no amino acid
  Variant (26)..(38): Xaa in position 26 to 38 is any amino acid
  Variant (39)..(66): Xaa in position 39 to 66 is any or no amino acid
  Variant (68)..(69): Xaa in position 68 to 69 is any amino acid
  Variant (72)..(73): Xaa in position 72 to 73 is any amino acid
  Variant (76)..(78): Xaa in position 76 to 78 is any amino acid
  Variant (80)..(80): Xaa in position 80 is any amino acid
  Variant (82)..(82): Xaa in position 82 is any amino acid
  Variant (84)..(86): Xaa in position 84 to 86 is any amino acid
  Variant (89)..(91): Xaa in position 89 to 91 is any amino acid
  Variant (93)..(105): Xaa in position 93 to 105 is any amino acid
  Variant (107)..(107): Xaa in position 107 is any amino acid
  Variant (110)..(112): Xaa in position 110 to 112 is any amino acid
  Variant (114)..(118): Xaa in position 114 to 118 is any amino acid
  Variant (120)..(120): Xaa in position 120 is any amino acid
  Variant (122)..(126): Xaa in position 122 to 126 is any amino acid
  Variant (128)..(128): Xaa in position 128 is any amino acid
  Variant (130)..(130): Xaa in position 130 is any amino acid
  Variant (133)..(142): Xaa in position 133 to 142 is any amino acid
  Variant (143)..(162): Xaa in position 143 to 162 is any or no amino acid
  Variant (164)..(165): Xaa in position 164 to 165 is any amino acid
  Variant (169)..(170): Xaa in position 169 to 170 is any amino acid
  Variant (172)..(174): Xaa in position 172 to 174 is any amino acid
  Variant (177)..(178): Xaa in position 177 to 178 is any amino acid
  Variant (180)..(180): Xaa in position 180 is any amino acid
  Variant (182)..(185): Xaa in position 182 to 185 is any amino acid
  Variant (187)..(191): Xaa in position 187 to 191 is any amino acid
  Variant (193)..(195): Xaa in position 193 to 195 is any amino acid
  Variant (197)..(199): Xaa in position 197 to 199 is any amino acid
  Variant (201)..(205): Xaa in position 201 to 205 is any amino acid
  Variant (208)..(213): Xaa in position 208 to 213 is any amino acid
  Variant (215)..(216): Xaa in position 215 to 216 is any amino acid
  Variant (219)..(220): Xaa in position 219 to 220 is any amino acid
  Variant (222)..(227): Xaa in position 222 to 227 is any amino acid
  Variant (229)..(231): Xaa in position 229 to 231 is any amino acid
  Variant (233)..(236): Xaa in position 233 to 236 is any amino acid
  Variant (238)..(238): Xaa in position 238 is any amino acid
  Variant (240)..(240): Xaa in position 240 is any amino acid
  Variant (242)..(278): Xaa in position 242 to 278 is any amino acid
  Variant (279)..(360): Xaa in position 279 to 360 is any or no amino acid
  Variant (362)..(363): Xaa in position 362 to 363 is any amino acid
  Variant (365)..(367): Xaa in position 365 to 367 is any amino acid
  Variant (369)..(370): Xaa in position 369 to 370 is any amino acid
  Variant (373)..(373): Xaa in position 373 is any amino acid
  Variant (375)..(375): Xaa in position 375 is any amino acid
  Variant (377)..(383): Xaa in position 377 to 383 is any amino acid
  Variant (385)..(385): Xaa in position 385 is any amino acid
  Variant (388)..(388): Xaa in position 388 is any amino acid
  Variant (392)..(393): Xaa in position 392 to 393 is any amino acid
  Variant (396)..(396): Xaa in position 396 is any amino acid
  Variant (399)..(405): Xaa in position 399 to 405 is any amino acid
  Variant (407)..(408): Xaa in position 407 to 408 is any amino acid
  Variant (410)..(410): Xaa in position 410 is any amino acid
  Variant (412)..(414): Xaa in position 412 to 414 is any amino acid
  Variant (416)..(417): Xaa in position 416 to 417 is any amino acid
  Variant (419)..(422): Xaa in position 419 to 422 is any amino acid
  Variant (424)..(424): Xaa in position 424 is any amino acid
  Variant (428)..(429): Xaa in position 428 to 429 is any amino acid
  Variant (431)..(431): Xaa in position 431 is any amino acid
  Variant (434)..(434): Xaa in position 434 is any amino acid
  Variant (436)..(439): Xaa in position 436 to 439 is any amino acid
  Variant (441)..(446): Xaa in position 441 to 446 is any amino acid
  Variant (447)..(448): Xaa in position 447 to 448 is any or no amino acid
  Variant (450)..(452): Xaa in position 450 to 452 is any amino acid
  Variant (454)..(460): Xaa in position 454 to 460 is any amino acid
  Variant (465)..(465): Xaa in position 465 is any amino acid
  Variant (467)..(471): Xaa in position 467 to 471 is any amino acid
  Variant (472)..(477): Xaa in position 472 to 477 is any or no amino acid
  Variant (479)..(479): Xaa in position 479 is any amino acid
  Variant (481)..(482): Xaa in position 481 to 482 is any amino acid
  Variant (485)..(488): Xaa in position 485 to 488 is any amino acid
  Variant (490)..(493): Xaa in position 490 to 493 is any amino acid
  Variant (495)..(496): Xaa in position 495 to 496 is any amino acid
  Variant (499)..(504): Xaa in position 499 to 504 is any amino acid
  Variant (505)..(510): Xaa in position 505 to 510 is any or no amino acid
  Variant (512)..(514): Xaa in position 512 to 514 is any amino acid
  Variant (516)..(518): Xaa in position 516 to 518 is any amino acid
  Variant (521)..(521): Xaa in position 521 is any amino acid
  Variant (525)..(528): Xaa in position 525 to 528 is any amino acid
  Variant (531)..(532): Xaa in position 531 to 532 is any amino acid
  Variant (536)..(542): Xaa in position 536 to 542 is any amino acid
  Variant (545)..(551): Xaa in position 545 to 551 is any amino acid
  Variant (552)..(553): Xaa in position 552 to 553 is any or no amino acid
  Variant (555)..(556): Xaa in position 555 to 556 is any amino acid
  Variant (558)..(558): Xaa in position 558 is any amino acid
  Variant (561)..(565): Xaa in position 561 to 565 is any amino acid
VXXXRXXXPYXXXXRXXTFVXXXXGXXXXXXXXXXXXXXXXXXXXXXXXXXXXXXXXXXXXXXXXXDXXLLXXLGXXXVXVXGXXXQIXXXLXXXXXXXXXXXXXRXTDXXXLXXXXXAXGXXXXXIXAXLSXXXXXXXXXXXXXXXXXXXXXXXXXXXXXXVXXGNFXXAXXXGVXXGXDXXXXGXXXXXDXXXIXXXLXXXXXVLXXXXXXSXXGEXXNXXXXXXAXXXAXXXXAXKXIXXXXXXXXXXXXXXXXXXXXXXXXXXXXXXXXXXXXXXXXXXXXXXXXXXXXXXXXXXXXXXXXXXXXXXXXXXXXXXXXXXXXXXXXXXXXXXXXXXXXXXXXXXXXXXXXXXXXXXXLXXAXXXCXXGVXRXHXXXXXXXGXLLXELFXXDGXGTXXXXXXXEXXRXAXXXDXXGXXXXIXPLEXXGXLVXRXXXXLXXXXXXXXFXXXEXXXXXXXCAALXPXXXXXXXXXXXEXAXXAVXXXXRXXXXGXXLLXXXXXXXXXXXXAXXXGXXXLFXLTTXXXXWFXXRGFXXXXXXXLPXXXXXXXXXNXXRXSKXXXXXL

SEQ ID NO: 140765 - protein, 57 aa, Artificial sequence
  protein pattern
  Variant (2)..(2): Xaa in position 2 is any or no amino acid
  Variant (4)..(6): Xaa in position 4 to 6 is any amino acid
  Variant (8)..(10): Xaa in position 8 to 10 is any amino acid
  Variant (12)..(12): Xaa in position 12 is Ile or Val
  Variant (13)..(14): Xaa in position 13 to 14 is any amino acid
  Variant (16)..(16): Xaa in position 16 is Ile or Val
  Variant (18)..(20): Xaa in position 18 to 20 is any amino acid
  Variant (21)..(21): Xaa in position 21 is Ser or Thr
  Variant (23)..(23): Xaa in position 23 is any amino acid
  Variant (24)..(24): Xaa in position 24 is Ile or Val
  Variant (25)..(25): Xaa in position 25 is Lys or Arg
  Variant (26)..(26): Xaa in position 26 is any amino acid
  Variant (27)..(27): Xaa in position 27 is Ile, Leu or Val
  Variant (29)..(31): Xaa in position 29 to 31 is any amino acid
  Variant (32)..(32): Xaa in position 32 is Ile, Leu, Met or Val
  Variant (33)..(35): Xaa in position 33 to 35 is any amino acid
  Variant (37)..(40): Xaa in position 37 to 40 is any amino acid
  Variant (41)..(41): Xaa in position 41 is Ile, Leu, Met or Val
  Variant (42)..(42): Xaa in position 42 is Thr or Val
  Variant (43)..(43): Xaa in position 43 is Ile, Leu or Val
  Variant (44)..(44): Xaa in position 44 is Ile, Leu, Met or Val
  Variant (45)..(45): Xaa in position 45 is any amino acid
  Variant (46)..(46): Xaa in position 46 is Asn, Pro or Ser
  Variant (47)..(47): Xaa in position 47 is any amino acid
  Variant (48)..(48): Xaa in position 48 is Ala or Gly
  Variant (49)..(49): Xaa in position 49 is any amino acid
  Variant (51)..(51): Xaa in position 51 is any amino acid
  Variant (52)..(52): Xaa in position 52 is Ala, Ser or Thr
  Variant (54)..(54): Xaa in position 54 is Asp, Glu or Gln
  Variant (55)..(55): Xaa in position 55 is any amino acid
  Variant (56)..(56): Xaa in position 56 is Phe or Leu
GXNXXXAXXXGXXXGXDXXXXGXXXXXDXXXXXXXLXXXXXXXXXXXXXSXXGXXXN

SEQ ID NO: 140766 - protein, 27 aa, Artificial sequence
  protein pattern
  Variant (2)..(4): Xaa in position 2 to 4 is any amino acid
  Variant (5)..(6): Xaa in position 5 to 6 is any or no amino acid
  Variant (8)..(10): Xaa in position 8 to 10 is any amino acid
  Variant (11)..(11): Xaa in position 11 is Ile or Leu
  Variant (13)..(13): Xaa in position 13 is Ala, Leu or Val
  Variant (17)..(17): Xaa in position 17 is any amino acid
  Variant (18)..(18): Xaa in position 18 is Ala, Ser or Thr
  Variant (19)..(19): Xaa in position 19 is any amino acid
  Variant (20)..(20): Xaa in position 20 is Asp or His
  Variant (23)..(25): Xaa in position 23 to 25 is any amino acid
AXXXXXGXXXXFXLTTXXXXWFXXXGF

SEQ ID NO: 140767 - protein, 29 aa, Artificial sequence
  protein pattern
  Variant (3)..(3): Xaa in position 3 is any amino acid
  Variant (5)..(5): Xaa in position 5 is Ala, Cys, Ser, Thr or Val
  Variant (7)..(8): Xaa in position 7 to 8 is Ile, Leu or Val
  Variant (9)..(9): Xaa in position 9 is Asp, Gly, Pro or Ser
  Variant (10)..(12): Xaa in position 10 to 12 is any amino acid
  Variant (13)..(13): Xaa in position 13 is Asp, Gly, Asn, Ser or Thr
  Variant (15)..(15): Xaa in position 15 is any amino acid
  Variant (16)..(16): Xaa in position 16 is any or no amino acid
  Variant (19)..(19): Xaa in position 19 is any or no amino acid
  Variant (21)..(21): Xaa in position 21 is Phe, Ile or Leu
  Variant (22)..(22): Xaa in position 22 is Phe or Tyr
  Variant (23)..(23): Xaa in position 23 is any amino acid
  Variant (24)..(24): Xaa in position 24 is His or Arg
  Variant (25)..(25): Xaa in position 25 is Ala, Asp, Glu, Gly, Ser or Thr
  Variant (27)..(27): Xaa in position 27 is any amino acid
  Variant (29)..(29): Xaa in position 29 is Cys, Ser or Thr
GVXRXHXXXXXXXGXXLLXEXXXXXGXGX

SEQ ID NO: 140768 - protein, 27 aa, Artificial sequence
  protein pattern
  Variant (2)..(2): Xaa in position 2 is any amino acid
  Variant (4)..(5): Xaa in position 4 to 5 is any amino acid
  Variant (6)..(6): Xaa in position 6 is Asp, Glu, Asn or Ser
  Variant (8)..(8): Xaa in position 8 is Ile, Leu or Val
  Variant (9)..(9): Xaa in position 9 is any amino acid
  Variant (10)..(10): Xaa in position 10 is Ala, Asp or Gly
  Variant (11)..(11): Xaa in position 11 is Ile, Leu or Val
  Variant (12)..(13): Xaa in position 12 to 13 is any amino acid
  Variant (14)..(14): Xaa in position 14 is Ile or Leu
  Variant (15)..(15): Xaa in position 15 is Ile, Leu or Val
  Variant (16)..(16): Xaa in position 16 is any amino acid
  Variant (20)..(21): Xaa in position 20 to 21 is any amino acid
  Variant (23)..(23): Xaa in position 23 is any amino acid
  Variant (26)..(26): Xaa in position 26 is any or no amino acid
RXAXXXDXXXXXXXXXPLEXXGXLVXR

SEQ ID NO: 140769 - protein, 57 aa, Artificial sequence
  protein pattern
  Variant (2)..(2): Xaa in position 2 is Phe, Ile, Leu or Val
  Variant (3)..(3): Xaa in position 3 is Ala, Gly, Asn, Ser or Val
  Variant (4)..(4): Xaa in position 4 is Phe or Leu
  Variant (5)..(5): Xaa in position 5 is Leu or Met
  Variant (6)..(7): Xaa in position 6 to 7 is any amino acid
  Variant (8)..(8): Xaa in position 8 is Leu or Met
  Variant (10)..(11): Xaa in position 10 to 11 is any amino acid
  Variant (12)..(13): Xaa in position 12 to 13 is any or no amino acid
  Variant (16)..(16): Xaa in position 16 is any amino acid
  Variant (17)..(18): Xaa in position 17 to 18 is any or no amino acid
  Variant (20)..(22): Xaa in position 20 to 22 is any amino acid
  Variant (24)..(24): Xaa in position 24 is Ile or Val
  Variant (25)..(25): Xaa in position 25 is Asp, Glu, Asn or Gln
  Variant (26)..(27): Xaa in position 26 to 27 is any amino acid
  Variant (29)..(41): Xaa in position 29 to 41 is any amino acid
  Variant (43)..(43): Xaa in position 43 is Ile or Val
  Variant (45)..(45): Xaa in position 45 is Asp, Glu, Pro or Thr
  Variant (46)..(48): Xaa in position 46 to 48 is any amino acid
  Variant (49)..(49): Xaa in position 49 is Phe, Leu or Met
  Variant (50)..(51): Xaa in position 50 to 51 is any amino acid
  Variant (52)..(52): Xaa in position 52 is Ala, Ile or Val
  Variant (53)..(54): Xaa in position 53 to 54 is any amino acid
  Variant (55)..(55): Xaa in position 55 is Ala, Ser or Val
  Variant (56)..(56): Xaa in position 56 is any amino acid
DXXXXXXXGXXXXLVXXXGXXXQXXXXLXXXXXXXXXXXXXRXTXXXXXXXXXXXXG

SEQ ID NO: 140770 - protein, 18 aa, Artificial sequence
  protein pattern
  Variant (2)..(2): Xaa in position 2 is any amino acid
  Variant (3)..(3): Xaa in position 3 is Ile or Val
  Variant (4)..(6): Xaa in position 4 to 6 is any amino acid
  Variant (7)..(7): Xaa in position 7 is Asp or Glu
  Variant (8)..(8): Xaa in position 8 is Asp, Glu, Gly or Asn
  Variant (9)..(11): Xaa in position 9 to 11 is any amino acid
  Variant (12)..(12): Xaa in position 12 is Ala or Gly
  Variant (17)..(17): Xaa in position 17 is any amino acid
  Variant (18)..(18): Xaa in position 18 is Glu, Pro or Gln
FXXXXXXXXXXXCAALXX

SEQ ID NO: 140771 - DNA, 1008 bp, Arabidopsis thaliana
  CDS (1)..(1008)
atgacgtctgacggagcaacgtcgacgtcagctgcagctgcagcagcagcgatggcgacgaggaggaaaccgtcgtggagagagagggagaacaatcggagaagagagcggcggagaagagctgttgcggcgaagatttatactggtcttagagctcaaggtaactacaatcttccaaaacattgtgacaacaatgaggttcttaaggctctttgttctgaagctggttgggttgttgaagaagacggaactacttatcgcaagggacacaagcctctacctggtgacatggctggatcatcttctcgagcaactccttactcttcccataaccaaagtcctctttcttccacttttgatagccccatcttatcttaccaagtcagtccttcctcttcttcattcccgagtccttctcgagttggtgatccacacaatatctccacaatcttccctttcctcaggaatggtggtattccttcatcgcttcctccacttagaatctcaaacagtgctcctgtcactccaccagtgtcatccccaacttctagaaaccccaaaccattgcctacttgggaatcttttaccaaacaatccatgtccatggctgctaaacagtcaatgacttctttgaactacccgttttatgcggtgtctgcacctgccagtcctactcatcatcgccagttccatgctccggctactatacctgaatgtgatgagtctgactcttccactgttgattctggtcattggataagctttcaaaagtttgcacaacaacagccattctctgcctctatggtgccaacctcgcctaccttcaatctcgtgaaacctgcaccacagcaattgtctccaaacacagcagcaatccaagagattggtcaaagctccgagtttaagtttgagaacagccaagttaagccatgggaaggggagaggatccatgatgtggctatggaggatctagagctcacgcttggaaatggtaaagctcatagttga

SEQ ID NO: 140772 - protein, 335 aa, Arabidopsis thaliana
MTSDGATSTSAAAAAAAMATRRKPSWRERENNRRRERRRRAVAAKIYTGLRAQGNYNLPKHCDNNEVLKALCSEAGWVVEEDGTTYRKGHKPLPGDMAGSSSRATPYSSHNQSPLSSTFDSPILSYQVSPSSSSFPSPSRVGDPHNISTIFPFLRNGGIPSSLPPLRISNSAPVTPPVSSPTSRNPKPLPTWESFTKQSMSMAAKQSMTSLNYPFYAVSAPASPTHHRQFHAPATIPECDESDSSTVDSGHWISFQKFAQQQPFSASMVPTSPTFNLVKPAPQQLSPNTAAIQEIGQSSEFKFENSQVKPWEGERIHDVAMEDLELTLGNGKAHS

SEQ ID NO: 140773 - DNA, 1355 bp, Glycine max
  CDS (142)..(1068)
caacatttctatttcctcttcttcatcacttgaatccaccaagtccttctcctcacacacataaaaacaaatatcctccacttcttctacccccagcagtagaacaagaggtgccggagcaagtttcgtcacgccggaacgatgaccggcggcggatccacggggaggttgccgacgtggaaggagagagagaacaacaagaggagagagagaagacgaagagcgattgcagctaagatctacactggccttcgagcccaggggaactacaagcttccaaagcactgcgacaacaacgaggtcctgaaagctctctgcgccgaagctggctggatcgtggaagaagatggcacaacttatcgaaagggatgtaagagacccacgagtgagattggaggaacaccactgaacttaagcgcgtgttcttccattcaggcaagtccacaatcctcgtcatacccgagtcctgtaccatcctaccatgctagcccaacctcttcctcgttcccaagccccacgcgcattgacggaaaccacccttcttcctttctcatcccattcatccgcaacataacttccatccccgccaacctccctcctctcaggatatccaacagcgcccccgtcaccccacctctttcttctccccgaagctcaaagcgcaaggcggatttcgactccctccgccaccctctttttgccacctccgccccgtccagccccacgcgccgccaccacgttgccacctccaccatcccggagtgcgacgagtccgacgcctccaccgtggactccgcctcgggccgctgggttagtttccaggttcagacgacgatggtggctgcggcggcggctgctcctccttcgcctacctttaacctcatgaagcccgcgatgcagcagatcgctgcccaggaaggcatgcagtggggttctgttgccgagagaggcagaggaggctccgattttgacttcgagaatggcagagtgaaaccctgggagggtgagagaatacacgaggttggaatggatgatttggagcttactctaggagttggaaaggcttgatttgatgatgctattgaaatcatcccttgcttggatctgctactaccctcagggcaattggttcttgttatgcttaatttctctatatttttccttttatgtgtacagtttttcatttatatagcagttgttaggtgttacattacttggaatttgacttcattgtaatgccttgttaattgttggaaaggttgcatttgaagcaatctttgtgcaagtgttttgagactcttcaatcttgacttactaagaccaggggaaacgaggtcatattcttaattattctt

SEQ ID NO: 140774 - protein, 308 aa, Glycine max
MTGGGSTGRLPTWKERENNKRRERRRRAIAAKIYTGLRAQGNYKLPKHCDNNEVLKALCAEAGWIVEEDGTTYRKGCKRPTSEIGGTPLNLSACSSIQASPQSSSYPSPVPSYHASPTSSSFPSPTRIDGNHPSSFLIPFIRNITSIPANLPPLRISNSAPVTPPLSSPRSSKRKADFDSLRHPLFATSAPSSPTRRHHVATSTIPECDESDASTVDSASGRWVSFQVQTTMVAAAAAAPPSPTFNLMKPAMQQIAAQEGMQWGSVAERGRGGSDFDFENGRVKPWEGERIHEVGMDDLELTLGVGKA

SEQ ID NO: 140775 - DNA, 1679 bp, Glycine max
  CDS (119)..(1054)
ccacgggcgagaagacgacagaagggggaggaaagcgcgatcctcgtgactcgcgacccctcgggtttaaatcccctgcgacgcagcacaggctactacttcaccatcgccggataaaatggtcgacgacggagcaacctcggcggcgacgagccggagaaagccgtcgtggagagaaagagaaaacaacaggagaagagaacggaggagaagagcaatagctgcgaaaatatactctggacttcgagctcaggggaacttcaacttgccaaagcactgcgacaacaacgaagttctgaaagctctctgcgcagaagctggctggtgcgtggaagaagacggaaccacttatcgcaagggttgcaagccacctctggccaatggtgcagggagctccatgagaaacattaccttttcttcttctcaaaatccaagtcctctgtcttcgtcatttcccagcccaattccttcataccaagtgagcccttcctcctcctctttcccgagcccgtttcgtttagatgtggataaggacaatgtatcacacctcattccatacattcgcaatgcgtccttgtctcttcctcctctcaggatatcaaacagtgcccctgtgacaccacctctttcatcaccaacatcaagaaatccaaaaccaattcctacttgggagtctattgccaaagaatccatggcctccttcagttaccctttctttgcagcttctgcccctgctagccccacacaccgtcacctttacactccgcccactattccagaatgcgatgaatctgatacttccaccggcgagtctggccagtgggtgaaattccaagcatttgctccttcttcatctgtgttgccaatttctccaacctttaatcttgttaaacctgtggttccacccgggatgcctgataactcaatccaagagatgaggacgagttcagatgagtttggggtacaggtaaagccttgggttggggaaaaaattcatgaagtggcattggatgacttggagctcacacttggaagtgggaaggtgcggagttaggctgctagcagaattacctcatctgggttatgtaagaatgagaccacgggattgtttttgctggttggttgttcactcaacttggtgttagagcttgagctaatagctacctcatccagctctgttggtgcaagcagtttatctggaagagactagagagttattattgggaaccagatttatcagatattgtggtcattttatgtagaaaatcatctccttccatgccttgggtaaaatgtagaaatgagaattacacttcatcccttcttgattaaatcagctatggttcaaaaaatctcatcaggcataactgcttaagagttatgtgttgtgagtgatttgaattagaaatttgaggttttgtcaagtttattgtctgtcagaaagctcacaagaccaacttatttgttaatgtcatacatttaagttgtattgtttttctttatgttcctgttctttgtatcaaatagtttgtatgtgattttgattttcaccaacaaaaaccttaaggcttaggtatatgggttttctcctcactatgatgtttaacttttccacttttgtccgatgtgaaacttcatcttacacttgtaacccaacagagatttgctgttatattgtc

SEQ ID NO: 140776 - protein, 311 aa, Glycine max
MVDDGATSAATSRRKPSWRERENNRRRERRRRAIAAKIYSGLRAQGNFNLPKHCDNNEVLKALCAEAGWCVEEDGTTYRKGCKPPLANGAGSSMRNITFSSSQNPSPLSSSFPSPIPSYQVSPSSSSFPSPFRLDVDKDNVSHLIPYIRNASLSLPPLRISNSAPVTPPLSSPTSRNPKPIPTWESIAKESMASFSYPFFAASAPASPTHRHLYTPPTIPECDESDTSTGESGQWVKFQAFAPSSSVLPISPTFNLVKPVVPPGMPDNSIQEMRTSSDEFGVQVKPWVGEKIHEVALDDLELTLGSGKVRS

SEQ ID NO: 140777 - DNA, 1478 bp, Zea mays subsp. mays
  CDS (207)..(1148)
actactacagcgcgccaccaggcagtacactgcagccagccagccacctccctcctctcagttcagttggctccctcccggctcccgccccactagtcgttgtagtcaatactgtgcagtacgccacccaccacctctccaagtctccattaaagaaaaggggaggcaagtcggggcctcggggagaaggggctgagcatcagaccatgacgtccggggcggcggcggcggcaggaggtctggggcggacgccgacgtggaaggagcgggagaacaacaagcgccgggagcgccggcggagggccatcgccgccaagatcttcacgggcctgcgcgcgctcggcaactacaagctgcccaagcactgcgacaacaacgaggtgctcaaggcgctctgccgcgaggcggggtgggtcgtcgaggacgacggcaccacctaccggaagggttgcaggccgccgccggggatgctgagcccgtgctcgtcgtcgcagctgctgagcgcgccgtcctcgagcttcccgagcccggtgccgtcctaccacgccagcccggcgtcgtcgagcttcccgagcccgacgcgcctcgaccacagcagcggcggcagcagcacccacaaccccgccgcggcggccgccgccgccgcctccctgctcccgttcctccggggcctgccgaacctgccgccgctccgcgtgtccagcagcgcgcccgtcacgccgccgctctcctctcccacggccgcggcggcggcgtcgcgaccgcccaccaaggtccgcaggcccgactgggacgccgccgccgaccccttccggcaccccttcttcgcggtctccgcccccgccagccccacccgcgcgcgccggcgcgagcacccggacaccatcccggagtgcgacgagtccgacgtctgctccgcggccgactccgcccggtggatcagcttccaggccaccacggcgcccgcgtcgcccacgtacaacctcgtccacccggcctccgactccatggagctggacgggacgacggcagccgtcgaggagttcgagttcgacaagggccgcgtcgtcacgccatgggaaggcgagcggatccacgaggtggccgccgaggagctcgagctcacgctcggcgtcggcgccaagtgaagcgaagctctcaagcaaagctcggatctttgagctcccgtactgcaaatgccgcgattggcagaaaaaaaaatgtgtacgtactacgtagcgtcgtagccgcgtgaagaaatcgtggatgcattcgtgctgagtttcgatcggaggcacattcggtgtagggcgtaggtgttgtttcattcatggacagctgatcaggtgaaagaacaatcgttgttcgtccgtccctccgcctgtattgcattgcattattgatcacagactgtatgctgactccattcggatgtagtactaggtggatctttggcatctacttactgtttgttctgc

SEQ ID NO: 140778 - protein, 313 aa, Zea mays subsp. mays
MTSGAAAAAGGLGRTPTWKERENNKRRERRRRAIAAKIFTGLRALGNYKLPKHCDNNEVLKALCREAGWVVEDDGTTYRKGCRPPPGMLSPCSSSQLLSAPSSSFPSPVPSYHASPASSSFPSPTRLDHSSGGSSTHNPAAAAAAAASLLPFLRGLPNLPPLRVSSSAPVTPPLSSPTAAAAASRPPTKVRRPDWDAAADPFRHPFFAVSAPASPTRARRREHPDTIPECDESDVCSAADSARWISFQATTAPASPTYNLVHPASDSMELDGTTAAVEEFEFDKGRVVTPWEGERIHEVAAEELELTLGVGAK

SEQ ID NO: 140779 - DNA, 1068 bp, Oryza sativa (japonica cultivar-group)
  CDS (1)..(1068)
atgacgaacggggcggggggaggaggaggaggagggggattggggggcacgagggtgccgacgtggagggagcgggagaacaaccggcggagggagcggcggcggcgggcgatcgcggccaagatctacgccgggctgcgcgcctacggcaactacaacctccccaagcactgcgacaacaacgaggtgctcaaggcgctctgcaacgaggccggctggaccgtcgagcccgacggcaccacctaccgcaagggatgtaaacctcctcaagcagagcgtcctgatccaattggaagatcggcttcgccaagcccttgctcttcatatcaaccaagtccgcgggcttcatacaacccaagtcctgcatcgtcctcctttccaagctctggatcctcctcgcatatcactattggtggaaacagcttgattggtggtgtcgagggaagctccctcattccatggctgaagacacttccgttgagttcatcatatgcctcctcctccaagttcccacagcttcaccatttatatttcaatggaggttccattagtgcaccagtgactcctccatccagctcccctactcgcacacctcgcttaaggactgattgggagaacgcaagtgttcagccaccatgggctagtgcaaattatacatctcttcccaactctacaccaccgagcccaggccacaagattgcaccagacccagcatggctctcaggatttcaaatatcatctgctggtccctcatcgccaacatacaatcttgtttcgccgaatccatttgggattttcaaagaagctattgccagcacttccagggtgtgcacccctggtcagagcggaacatgttccccggtaatgggtggcatgccggctcatcatgatgttcagatggttgatggtgcgccggatgattttgcctttgggagcagcagcaatggcaacaatgaatcacctggactggtgaaggcatgggagggggagcggatacatgaagaatgcgcctccgatgagctggagctcactcttgggagctcaaagactcgtgcggatccctcctga

SEQ ID NO: 140780 - protein, 355 aa, Oryza sativa (japonica cultivar-group)
MTNGAGGGGGGGGLGGTRVPTWRERENNRRRERRRRAIAAKIYAGLRAYGNYNLPKHCDNNEVLKALCNEAGWTVEPDGTTYRKGCKPPQAERPDPIGRSASPSPCSSYQPSPRASYNPSPASSSFPSSGSSSHITIGGNSLIGGVEGSSLIPWLKTLPLSSSYASSSKFPQLHHLYFNGGSISAPVTPPSSSPTRTPRLRTDWENASVQPPWASANYTSLPNSTPPSPGHKIAPDPAWLSGFQISSAGPSSPTYNLVSPNPFGIFKEAIASTSRVCTPGQSGTCSPVMGGMPAHHDVQMVDGAPDDFAFGSSSNGNNESPGLVKAWEGERIHEECASDELELTLGSSKTRADPS

SEQ ID NO: 140781 - DNA, 897 bp, Oryza sativa (japonica cultivar-group)
  CDS (1)..(897)
atgacgtccggggcggcggcggcggggaggacgccgacgtggaaggagagggagaacaacaagaggcgggagcggcggcggcgtgccatcgccgccaagatcttcacggggctccgggcgctcgggaactacaacctccccaagcactgcgacaacaacgaggtgctcaaggcgctctgccgcgaggccggctgggttgtcgaggacgacggcaccacctaccgcaagggatgtaagccgccgccatcgtcggctgggggagcgtcggtggggatgagcccctgctcgtcaacgcagctgctgagcgcgccgtcgtcgtcgttcccgagcccggtgccgtcgtaccacgcgagcccggcgtcgtcgagcttcccgagccccagccggatcgacaacccgagcgcctcctgcctcctcccgttcctccgggggctccccaacctcccgccgctccgcgtctccagcagcgcgcccgtcacgccgccgctctcgtcgccgacggcgtcgcggccgcccaagatcaggaagccggactgggacgtcgacccgttccggcaccccttcttcgcggtctccgcgccggcgagccccacccgcggccgccgcctcgagcacccggacacgataccggagtgcgacgagtccgacgtctccacggtggactccggccggtggatcagcttccagatggccacgacggcgccgacgtcgcccacctacaacctcgtcaacccgggcgcctccacctccaactccatggagatagaagggacggccggccgaggcggcgcggagttcgagttcgacaaggggagggtgacgccatgggagggcgagaggatccacgaggtcgccgccgaggagctcgagctcacgctcggcgtcggcgcgaaatga

SEQ ID NO: 140782 - protein, 298 aa, Oryza sativa (japonica cultivar-group)
MTSGAAAAGRTPTWKERENNKRRERRRRAIAAKIFTGLRALGNYNLPKHCDNNEVLKALCREAGWVVEDDGTTYRKGCKPPPSSAGGASVGMSPCSSTQLLSAPSSSFPSPVPSYHASPASSSFPSPSRIDNPSASCLLPFLRGLPNLPPLRVSSSAPVTPPLSSPTASRPPKIRKPDWDVDPFRHPFFAVSAPASPTRGRRLEHPDTIPECDESDVSTVDSGRWISFQMATTAPTSPTYNLVNPGASTSNSMEIEGTAGRGGAEFEFDKGRVTPWEGERIHEVAAEELELTLGVGAK

SEQ ID NO: 140783 - DNA, 1074 bp, Arabidopsis thaliana
  CDS (1)..(1074)
atgaaaagattcttctataattccagcgaagaagaaagaaaaaaaaaagcgtattcctcgaagaagatgacgtctgacggagcaacgtcgacgtcagctgcagctgcagcagcagcgatggcgacgaggaggaaaccgtcgtggagagagagggagaacaatcggagaagagagcggcggagaagagctgttgcggcgaagatttatactggtcttagagctcaaggtaactacaatcttccaaaacattgtgacaacaatgaggttcttaaggctctttgttctgaagctggttgggttgttgaagaagacggaactacttatcgcaagggacacaagcctctacctggtgacatggctggatcatcttctcgagcaactccttactcttcccataaccaaagtcctctttcttccacttttgatagccccatcttatcttaccaagtcagtccttcctcttcttcattcccgagtccttctcgagttggtgatccacacaatatctccacaatcttccctttcctcaggaatggtggtattccttcatcgcttcctccacttagaatctcaaacagtgctcctgtcactccaccagtgtcatccccaacttctagaaaccccaaaccattgcctacttgggaatcttttaccaaacaatccatgtccatggctgctaaacagtcaatgacttctttgaactacccgttttatgcggtgtctgcacctgccagtcctactcatcatcgccagttccatgctccggctactatacctgaatgtgatgagtctgactcttccactgttgattctggtcattggataagctttcaaaagtttgcacaacaacagccattctctgcctctatggtgccaacctcgcctaccttcaatctcgtgaaacctgcaccacagcaattgtctccaaacacagcagcaatccaagagattggtcaaagctccgagtttaagtttgagaacagccaagttaagccatgggaaggggagaggatccatgatgtggctatggaggatctagagctcacgcttggaaatggtaaagctcatagttga

SEQ ID NO: 140784 - protein, 357 aa, Arabidopsis thaliana
MKRFFYNSSEEERKKKAYSSKKMTSDGATSTSAAAAAAAMATRRKPSWRERENNRRRERRRRAVAAKIYTGLRAQGNYNLPKHCDNNEVLKALCSEAGWVVEEDGTTYRKGHKPLPGDMAGSSSRATPYSSHNQSPLSSTFDSPILSYQVSPSSSSFPSPSRVGDPHNISTIFPFLRNGGIPSSLPPLRISNSAPVTPPVSSPTSRNPKPLPTWESFTKQSMSMAAKQSMTSLNYPFYAVSAPASPTHHRQFHAPATIPECDESDSSTVDSGHWISFQKFAQQQPFSASMVPTSPTFNLVKPAPQQLSPNTAAIQEIGQSSEFKFENSQVKPWEGERIHDVAMEDLELTLGNGKAHS

SEQ ID NO: 140785 - DNA, 1251 bp, Oryza sativa subsp
  CDS (1)..(1251)
atggggggaggaggtgtcggaggaggagcgggggcggcgggggtgggggtgggagggaggatgccgacgtggagggagcgggagaacaacaagcggagggagcggcggcgtcgcgcgatcgccgccaagatcttcgccggcctccgcgcccacggcggctacaagctccccaagcactgcgacaacaacgaggtcctcaaggccctctgcaacgaggccggctgggtcgtcgagcccgacggcaccacctaccgcaagatgcacgtggtggcgactggcaaaggtggggtgaagatgccgccagtctggacccgcgcacgggtgtggtgggtgggtggagcgcgggtggtggaatttccggggggaattttcgcgcggagagcattgcagttcgcggattcgtggaatcctttgctagggcgattgttaccaccactccacccgggatacaagcctcctgaacgcatggaagtgattgggtgctccgtatcaccaagcccgtgttcctcgtatcaaccaagcccgcgggcatcatacaatgcgagtcctacttcctcctcattccctagcggcgcatcctcccccttccttcctcaccctaacaacatggccaatggtgttgatggtaatcctatcctcccatggcttaaaacactgtccaattctccatcatcaaagaaacatccacagcttcccccactattgattcacggtggttccattagtgcccctgtaactcctccattgagttcaccaactgctcgcactcctcgcatgaagacagattgggatgaatcaaatgtccagcctacgtggactggttcgaacagtccctgcgtggtgaactccacgccgcccagccccggacgcacaatgcttccggacccagcatggttagctggtatccaaatatcatcaacaagtccatcatcaccgacatttagtcttgtgtcatcaaatccatttagtgtctttaaagacgctattccggtgggcaacaattcatcgaggatgtgcacgccagggcaaagtggcacatgctcccctgcgattcctggcatggcaccacacccagatattcatatgatggatgcggtttctgatgagtttgcatttggaagcagcacaaacggtggccatcaggcggctggtctggtgagggcgtgggaaggcgagaggatccacgaggactcgggatcggacgacctagagctgactcttggaagctctaggacaagagctgctgcttaa

SEQ ID NO: 140786 - protein, 416 aa, Oryza sativa subsp
MGGGGVGGGAGAAGVGVGGRMPTWRERENNKRRERRRRAIAAKIFAGLRAHGGYKLPKHCDNNEVLKALCNEAGWVVEPDGTTYRKMHVVATGKGGVKMPPVWTRARVWWVGGARVVEFPGGIFARRALQFADSWNPLLGRLLPPLHPGYKPPERMEVIGCSVSPSPCSSYQPSPRASYNASPTSSSFPSGASSPFLPHPNNMANGVDGNPILPWLKTLSNSPSSKKHPQLPPLLIHGGSISAPVTPPLSSPTARTPRMKTDWDESNVQPTWTGSNSPCVVNSTPPSPGRTMLPDPAWLAGIQISSTSPSSPTFSLVSSNPFSVFKDAIPVGNNSSRMCTPGQSGTCSPAIPGMAPHPDIHMMDAVSDEFAFGSSTNGGHQAAGLVRAWEGERIHEDSGSDDLELTLGSSRTRAAA

SEQ ID NO: 140787 - DNA, 1134 bp, Oryza sativa subsp
  CDS (1)..(1134)
atgatgaacggaggagggggagggagggtgccgacgtggagggagcgggagaacaaccggcggcgggagcggcggcggcgggcgatcgcggcgaagatctacgcggggctgcgggcgtacggaaactacacgctcccgaagcactgcgacaacaacgaggtgctcaaggcgctctgcaacgaggccggctggaccgtcgagcccgacggcaccacctaccgcaagtactggagcctggacagaattgaagctgctcatgtgaaaaaaggactggtgaaagaggcaattatggagacaaaaggatgcaagccgccggcgtcagagctcgctgatcagctcggccgctcgccgtcggcgagcccgtgctcgtcgtaccagccgagcccgcgcgggacgtcctccttccccagctccggctcctcctcccagatcacgctcggcggcggcggcggcggcgagggcagcagcctcatcccgtggctcaagaccctctcctccgccggcgtcggcatcggcggcggctcgtcgtccaagttcccggcgcactactcctacttcggcggcggctccatcagcgcgccggtgacgccgccctcgggctcgccgccgcgcacgccgcgcctcaagacggccgcctgggaggagtaccaccaccaccacgccggcagcgtgctgccgccgtgggccaccgtcggcgcgagctacgcctacgcggcctcgtcgtccctgccaaactccaccccgccgagcccgcgccgcaaggtcgccgcagccgccgccgccgccggcggcggcaacgacgcggcggcgtggcttgccgggttccagatatcctccgccgggccgtcgtccccgacgtacagcctcgtggctcctcctcccaacccgttcggcgccgccgccgccgccgccgcggggtcctcctcgagggtgatgagcggagcgtgctcgccggtcgccggcggcgacgtccagatggccgacgcggcgcgccgcgagttcgcgttcggcggcgagggcggcaagatgaccgggctggtgaaggcgtgggaaggggagcgcatccatgaggagtgcggctccgacgatctcgagctcaccctcgggagctccatgactcgcggcgatcgctaa

SEQ ID NO: 140788 - protein, 377 aa, Oryza sativa subsp
MMNGGGGGRVPTWRERENNRRRERRRRAIAAKIYAGLRAYGNYTLPKHCDNNEVLKALCNEAGWTVEPDGTTYRKYWSLDRIEAAHVKKGLVKEAIMETKGCKPPASELADQLGRSPSASPCSSYQPSPRGTSSFPSSGSSSQITLGGGGGGEGSSLIPWLKTLSSAGVGIGGGSSSKFPAHYSYFGGGSISAPVTPPSGSPPRTPRLKTAAWEEYHHHHAGSVLPPWATVGASYAYAASSSLPNSTPPSPRRKVAAAAAAAGGGNDAAAWLAGFQISSAGPSSPTYSLVAPPPNPFGAAAAAAAGSSSRVMSGACSPVAGGDVQMADAARREFAFGGEGGKMTGLVKAWEGERIHEECGSDDLELTLGSSMTRGDR

SEQ ID NO: 140789 - DNA, 1113 bp, Oryza sativa subsp
  CDS (1)..(1113)
atgacgaacggggcggggggaggaggaggagggggattggggggcacgagggtgccgacgtggagggagcgggagaacaaccggcggagggagcggcggcggcgggcgatcgcggccaagatctacgccgggctgcgcgcctacggcaactacaacctccccaagcactgcgacaacaacgaggtgctcaaggcgctctgcaacgaggccggctggaccgtcgagcccgacggcaccacctaccgcaaggtcatagacaaatatgaacataacagagtgccacttacctgcatccagggatgtaaacctcctcaagcagagcgtcctgatccaattggaagatcggcttcgccaagcccttgctcttcatatcaaccaagtccgcgggcttcatacaacccaagtcctgcatcgtcctcctttccaagctctggatcctcctcgcatatcactattggtggaaacagcttgattggtggtgtcgagggaagctccctcatcccatggctgaagacacttccgttgagttcatcatatgcctcctcctccaagttcccacagcttcaccatttatatttcaatggaggttccattagtgcaccagtgactcctccatccagctcccctactcgcacacctcgcttaaggactgattgggagaacgcaagtgttcagccaccatgggctagtgcaaattatacatctcttcccaactctacaccaccgagcccaggccacaagattgcaccagacccagcatggctcgcaggatttcaaatatcatctgctggtccctcatcgccaacatacaatcttgtttcgccgaatccatttgggattttcaaagaagctattgccagcacttccagggtgtgcacccctggtcagagcggaacatgttccccggtaatgggtggcatgccggctcatcatgatgttcagatggttgatggtgcgccggatgattttgcctttgggagcagcagcaatggcaacaatgaatcacctggactggtgaaggcatgggagggggagcggatacatgaagaatgcgcctccgatgagctggagctcactcttgggagctcaaagactcgtgcggatccctcctga

SEQ ID NO: 140790 - protein, 370 aa, Oryza sativa subsp
MTNGAGGGGGGGLGGTRVPTWRERENNRRRERRRRAIAAKIYAGLRAYGNYNLPKHCDNNEVLKALCNEAGWTVEPDGTTYRKVIDKYEHNRVPLTCIQGCKPPQAERPDPIGRSASPSPCSSYQPSPRASYNPSPASSSFPSSGSSSHITIGGNSLIGGVEGSSLIPWLKTLPLSSSYASSSKFPQLHHLYFNGGSISAPVTPPSSSPTRTPRLRTDWENASVQPPWASANYTSLPNSTPPSPGHKIAPDPAWLAGFQISSAGPSSPTYNLVSPNPFGIFKEAIASTSRVCTPGQSGTCSPVMGGMPAHHDVQMVDGAPDDFAFGSSSNGNNESPGLVKAWEGERIHEECASDELELTLGSSKTRADPS

SEQ ID NO: 140791 - DNA, 909 bp, Oryza sativa subsp
  CDS (1)..(909)
atgacgtccggggcggcggccgcggcggcggcggcggggaggacgccgacgtggaaggagagggagaacaacaagaggcgggagcggcggcggcgtgccatcgccgccaagatcttcacggggctccgggcgctcgggaactacaacctccccaagcactgcgacaacaacgaggtgctcaaggcgctctgccgcgaggccggctgggtcgtcgaggacgacggcaccacctaccgcaagggatgtaagccgccgccatcgtcggctgggggagcgtcggtggggatgagcccctgctcgtcaacgcagctgctgagcgcgccgtcgtcgtcgttcccgagcccggtgccgtcgtaccacgcgagcccggcgtcgtcgagcttcccgagccccagccggatcgacaacccgagcgcctcctgcctcctcccgttcctccgggggctccccaacctcccgccgctccgcgtctccagcagcgcgcccgtcacgccgccgctctcgtcgccgacggcgtcgcggccgcccaagatcaggaagccggactgggacgtcgacccgttccggcaccccttcttcgcggtctccgcgccggcgagccccacccgcggccgccgcctcgagcacccggacacgataccggagtgcgacgagtccgacgtctccacggtggactccggccggtggatcagcttccagatggccacgacggcgccgacgtcgcccacctacaacctcgtcaacccgggcgcctccacctccaactccatggagatagaagggacggccggccgaggcggcgcggagttcgagttcgacaaggggagggtgacgccatgggagggcgagaggatccacgaggtcgccgccgaggagctcgagctcacgctcggcgtcggcgcgaaatga

SEQ ID NO: 140792 - protein, 302 aa, Oryza sativa subsp
MTSGAAAAAAAAGRTPTWKERENNKRRERRRRAIAAKIFTGLRALGNYNLPKHCDNNEVLKALCREAGWVVEDDGTTYRKGCKPPPSSAGGASVGMSPCSSTQLLSAPSSSFPSPVPSYHASPASSSFPSPSRIDNPSASCLLPFLRGLPNLPPLRVSSSAPVTPPLSSPTASRPPKIRKPDWDVDPFRHPFFAVSAPASPTRGRRLEHPDTIPECDESDVSTVDSGRWISFQMATTAPTSPTYNLVNPGASTSNSMEIEGTAGRGGAEFEFDKGRVTPWEGERIHEVAAEELELTLGVGAK

SEQ ID NO: 140793 - DNA, 1251 bp, Oryza sativa subsp
  CDS (1)..(1251)
atggggggaggaggtgtcggaggaggagcgggggcggcgggggtgggggtgggagggaggatgccgacgtggagggagcgggagaacaacaagcggagggagcggcggcgtcgcgcgatcgccgccaagatcttcgccggcctccgcgcccacggcggctacaagctccccaagcactgcgacaacaacgaggtcctcaaggccctctgcaacgaggccggctgggtcgtcgagcccgacggcaccacctaccgcaagatgcacgtggtggcgactggcaaaggtggggtgaagatgccgccagtctggacccgcgcacgggtgtggtgggtgggtggggcgcgggtggtggaatttccggggggaattttcgcgcggagagcattgcagttcgcggattcgtggaatcctttgctagggcgattgttaccaccactccacccgggatacaagcctcctgaacgcatggaagtgattgggtgctccgtatcaccaagcccgtgttcctcgtatcaaccaagcccgcgggcatcatacaatgcgagtcctacttcctcctcattccctagcggcgcatcctcccccttccttcctcaccctaacaacatggccaatggtgttgatggtaatcctatcctcccatggcttaaaacactgtccaattctccatcatcaaagaaacatccacagcttcccccactattgattcacggtggttccattagtgcccctgtaactcctccattgagttcaccaactgctcgcactcctcgcatgaagacagattgggatgaatcaaatgtccagcctacgtggactggttcgaacagtccctgcgtggtgaactccacgccgcccagccccggacgcacaatgcttccggacccagcatggttagctggtatccaaatatcatcaacaagtccatcatcaccgacatttagtcttgtgtcatcaaatccatttagtgtctttaaagacgcgattctggtgggcaacaattcatcgaggatgtgcacgccagggcaaagcggcacatgctcccctgcgattcctggcatggcaccacacccagatattcatatgatggatgcggtttctgatgagtttgcatttggaagcagcacaaacggtggccatcaggcggctggtctggtgagggcgtgggaaggcgagaggatccacgaggactcgggatcggacgacctagagctgactcttggaagctctaggacaagagctgctgcttaa

SEQ ID NO: 140794 - protein, 416 aa, Oryza sativa subsp
MGGGGVGGGAGAAGVGVGGRMPTWRERENNKRRERRRRAIAAKIFAGLRAHGGYKLPKHCDNNEVLKALCNEAGWVVEPDGTTYRKMHVVATGKGGVKMPPVWTRARVWWVGGARVVEFPGGIFARRALQFADSWNPLLGRLLPPLHPGYKPPERMEVIGCSVSPSPCSSYQPSPRASYNASPTSSSFPSGASSPFLPHPNNMANGVDGNPILPWLKTLSNSPSSKKHPQLPPLLIHGGSISAPVTPPLSSPTARTPRMKTDWDESNVQPTWTGSNSPCVVNSTPPSPGRTMLPDPAWLAGIQISSTSPSSPTFSLVSSNPFSVFKDAILVGNNSSRMCTPGQSGTCSPAIPGMAPHPDIHMMDAVSDEFAFGSSTNGGHQAAGLVRAWEGERIHEDSGSDDLELTLGSSRTRAAA

SEQ ID NO: 140795 - DNA, 1131 bp, Oryza sativa subsp
  CDS (1)..(1131)
atgatgaacggaggagggggagggagggtgccgacgtggagggagcgggagaacaaccggcggcgggagcggcggcggcgggcgatcgcggcgaagatctacgcggggctgcgggcgtacggaaactacacgctcccgaagcactgcgacaacaacgaggtgctcaaggcgctctgcaacgaggccggctggaccgtcgagcccgacggcaccacctaccgcaagtactggagcctggacagaattgaagctgctcatgtgaaaaaaggactggtgaaagaggcaattatggagacaaaaggatgcaagccgccggcgtcagagctcgctgatcagctcggccgctcgccgtcggcgagcccgtgctcgtcgtaccagccgagcccgcgcgggacgtcctccttccccagctccggctcctcctcccagatcacgctcggcggcggcggcggcggcgagggcagcagcctcatcccgtggctcaagaccctctcctccgccggcgtcggcatcggcggcggctcgtcgtccaagttcccggcgcactactcctacttcggcggcggctccatcagcgcgccggtgacgccgccctcgggctcgccgccgcgcacgccgcgcctcaagacggccgcctgggaggagtaccaccaccaccacgccggcagcgtgctgccgccgtgggccaccgtcggcgcgagctacgcctacgcggcctcgtcgtccctgccaaactccaccccgccgagcccgcgccgcaaggtcgccgcagccgccgccgccgccggcggcggcaacgacgcggcggcgtggcttgccgggttccagatatcctccgccgggccgtcgtccccgacgtacagcctcgtggctcctcctcccaacccgttcggcgccgccgccgccgccgcggggtcctcctcgagggtgatgagcggagcgtgctcgccggtcgccggcggcgacgtccagatggccgacgcggcgcgccgcgagttcgcgttcggcggcgagggcggcaagatgaccgggctggtgaaggcgtgggaaggggagcgcatccatgaggagtgcggctccgacgatctcgagctcaccctcgggagctccatgactcgcggcgatcgctaa

SEQ ID NO: 140796 - protein, 376 aa, Oryza sativa subsp
MMNGGGGGRVPTWRERENNRRRERRRRAIAAKIYAGLRAYGNYTLPKHCDNNEVLKALCNEAGWTVEPDGTTYRKYWSLDRIEAAHVKKGLVKEAIMETKGCKPPASELADQLGRSPSASPCSSYQPSPRGTSSFPSSGSSSQITLGGGGGGEGSSLIPWLKTLSSAGVGIGGGSSSKFPAHYSYFGGGSISAPVTPPSGSPPRTPRLKTAAWEEYHHHHAGSVLPPWATVGASYAYAASSSLPNSTPPSPRRKVAAAAAAAGGGNDAAAWLAGFQISSAGPSSPTYSLVAPPPNPFGAAAAAAGSSSRVMSGACSPVAGGDVQMADAARREFAFGGEGGKMTGLVKAWEGERIHEECGSDDLELTLGSSMTRGDR

SEQ ID NO: 140797 - DNA, 1494 bp, Solanum lycopersicum
  CDS (21)..(1022)
gaaacaacaacaacaaaatcatgatgtgggaagctggagaatcaccagcatcttcttcggccggtgccggagctggtggaagtggaggtgccggagttggtttaccggaaagtggtggtggtggtggtggtgggagaaggaaaccatcatggagagaaagagagaataacaggagaagagagaggaggaggagagctgtagctgctaagatttatactggtttaagagctcaaggaaactataatcttccgaagcactgtgataacaatgaagttcttaaagctctttgtactgaagctggttggatcgttgaacctgatggtaccacttatcgcaagggatgcaagccaaccccgatggagattggaggcacttcaacaaacatcacgccaagttcttcacggcatccaagtcccccatcatcatactttgctagcccaattccatcttatcagccaagtccaacttcctcttctttccccagtccatctcgtgctgatgccaacatgttatcacatccatattcttttctccaaaatgtcgttccttcatcccttcctccattacgaatatcaaacagtgcccctgtaactccacctctttcatcaccaactaggcatcctaagcaaactttcaatttagaaactttggccaaagaatcaatgtttgctttaaacatccctttctttgctgcttcagccccagcaagcccaactagggttcagcgttttactcctccaactatacccgagtgtgatgaatctgactcatctaccattgattcaggccagtggatcaactttcaaaagtatgcgtcaaatgttccaccttctccaacatttaatcttgtaaaacctgtgcctcagccgcttcgtcctaatgatatgatcacagacaagggtaagagcatagacttcgactttgaaaatgtatcagtcaaggcatgggaaggtgaaaggattcacgatgtaggattcgatgatctggaactcacacttggaagtggcaatgctcgcatatgattgagattctctgatttagttagctgatgaagcactttgcattccagtggattattccagcctcgtctggtgagatattgcccaaacgagagcttgcatgaatctcgtttgctacttaccttatgtataacattccttcccccttatttgaaaagcccccttcaaaatttatacaggtcttatcacaagcatttcgtgtagatatatgcttgcttctatggtcgagaatcaatttcttcattgtagactagatgaagcttcttcacaactatgaactatccatatttgtctattagaactcgttttcttttctttctgttggaactagctacagttgaagtcgatgatgtaccttgtagtctctctgatgtttttcgtgcacatcatgaaagacatgaaacgcgttacagtttatacattggagattttgtgttgtgtttggttgaaaaaaaaaaaaaaaaaaaaaaaaaaa

SEQ ID NO: 140798 - protein, 333 aa, Solanum lycopersicum
MMWEAGESPASSSAGAGAGGSGGAGVGLPESGGGGGGGRRKPSWRERENNRRRERRRRAVAAKIYTGLRAQGNYNLPKHCDNNEVLKALCTEAGWIVEPDGTTYRKGCKPTPMEIGGTSTNITPSSSRHPSPPSSYFASPIPSYQPSPTSSSFPSPSRADANMLSHPYSFLQNVVPSSLPPLRISNSAPVTPPLSSPTRHPKQTFNLETLAKESMFALNIPFFAASAPASPTRVQRFTPPTIPECDESDSSTIDSGQWINFQKYASNVPPSPTFNLVKPVPQPLRPNDMITDKGKSIDFDFENVSVKAWEGERIHDVGFDDLELTLGSGNARI

SEQ ID NO: 140799 - DNA, 1065 bp, Oryza sativa subsp
  CDS (1)..(1065)
atggggggaggaggtgtcggaggaggagcgggggcggcgggggtgggggtgggagggaggatgccgacgtggagggagcgggagaacaacaagcggagggagcggcggcgtcgcgcgatcgccgccaagatcttcgccggcctccgcgcccacggcggctacaagctccccaagcactgcgacaacaacgaggtcctcaaggccctctgcaacgaggccggctgggtcgtcgagcccgacggcaccacctaccgcaagggatacaagcctcctgaacgcatggaagtgattgggtgctccgtatcaccaagcccgtgttcctcgtatcaaccaagcccgcgggcatcatacaatgcgagtcctacttcctcctcattccctagcggcgcatcctcccccttccttcctcaccctaacaacatggccaatggtgttgatggtaatcctatcctcccatggcttaaaacactgtccaattctccatcatcaaagaaacatccacagcttcccccactattgattcacggtggttccattagtgcccctgtaactcctccattgagttcaccaactgctcgcactcctcgcatgaagacagattgggatgaatcaaatgtccagcctacgtggactggttcgaacagtccctgcgtggtgaactccacgccgcccagccccggacgcacaatgcttccggacccagcatggttagctggtatccaaatatcatcaacaagtccatcatcaccgacatttagtcttgtgtcatcaaatccatttagtgtctttaaagacgcgattctggtgggcaacaattcatcgaggatgtgcacgccagggcaaagcggcacatgctcccctgcgattcctggcatggcaccacacccagatattcatatgatggatgcggtttctgatgagtttgcatttggaagcagcacaaacggtggccatcaggcggctggtctggtgagggcgtgggaaggcgagaggatccacgaggactcgggatcggacgacctagagctgactcttggaagctctaggacaagagctgctgcttaa

SEQ ID NO: 140800 - protein, 354 aa, Oryza sativa subsp
MGGGGVGGGAGAAGVGVGGRMPTWRERENNKRRERRRRAIAAKIFAGLRAHGGYKLPKHCDNNEVLKALCNEAGWVVEPDGTTYRKGYKPPERMEVIGCSVSPSPCSSYQPSPRASYNASPTSSSFPSGASSPFLPHPNNMANGVDGNPILPWLKTLSNSPSSKKHPQLPPLLIHGGSISAPVTPPLSSPTARTPRMKTDWDESNVQPTWTGSNSPCVVNSTPPSPGRTMLPDPAWLAGIQISSTSPSSPTFSLVSSNPFSVFKDAILVGNNSSRMCTPGQSGTCSPAIPGMAPHPDIHMMDAVSDEFAFGSSTNGGHQAAGLVRAWEGERIHEDSGSDDLELTLGSSRTRAAA

SEQ ID NO: 140801 - DNA, 831 bp, Arabidopsis thaliana
  CDS (1)..(831)
atgacggcatcaggaggaggatcaacggcggcgacggggaggatgccgacgtggaaggaaagagagaacaacaagaagagagaaagaagaagaagagcaatagcagctaaaatcttcaccggacttagatctcaaggcaattataaacttcctaaacactgtgacaacaatgaagtcctcaaagctctttgtcttgaagctggttggatcgttcatgaagatggcaccacttatcgaaagggttctcgaccaacagaaacaacagtgccgtgttcgtcaatccaacttagtccacaatcatcggcctttcaaagcccaattccttcgtatcaagctagcccttcatcgtcatcttacccaagtccgacccggtttgacccgaatcaatcctcgacttatctcattccctatctccaaaacctagcttcgtctggaaacctcgctcctctacgaatttccaatagtgcccctgttacaccgccgatttcttcacctagaagatcaaatccgagacttccgagatggcaaagcagtaatttcccagtctcagctccgtcaagcccaacacggcgtctccatcactacacatcgattccagaatgcgatgaatcggatgtttcgacggttgattcttgtcgatggggaaatttccaatcggttaacgtttctcagacatgtcctccgtcgccgacatttaacctggtcggaaaaagcgttagctccgtcggagtagatgtgtcggtgaagccgtgggaaggtgagaagattcacgatgttggtatcgatgacttggagctgacgctaggtcacaacaccaaaggacgcggctag

SEQ ID NO: 140802 - protein, 276 aa, Arabidopsis thaliana
MTASGGGSTAATGRMPTWKERENNKKRERRRRAIAAKIFTGLRSQGNYKLPKHCDNNEVLKALCLEAGWIVHEDGTTYRKGSRPTETTVPCSSIQLSPQSSAFQSPIPSYQASPSSSSYPSPTRFDPNQSSTYLIPYLQNLASSGNLAPLRISNSAPVTPPISSPRRSNPRLPRWQSSNFPVSAPSSPTRRLHHYTSIPECDESDVSTVDSCRWGNFQSVNVSQTCPPSPTFNLVGKSVSSVGVDVSVKPWEGEKIHDVGIDDLELTLGHNTKGRG

SEQ ID NO: 140803 - DNA, 957 bp, Arabidopsis thaliana
  CDS (1)..(957)
atggccgccggaggaggaggaggaggaggaggatcatcgtcgggacgtactccgacgtggaaagagagagagaacaataagaagagagaaagaagaagaagagccatcactgctaagatttactctggtcttagagctcaaggtaactataagcttcctaagcactgcgataacaacgaggttcttaaagctctctgtctcgaagctggttggatcgtcgaagacgatggcaccacttatcgcaaggggtttaagccaccagcatcagatatttcaggaactcctacaaacttcagcacaaattcatcaatccaaccaagtccacaatcatcagcttttccaagtcctgcaccttcgtaccacggaagtccagtctcatcatccttcccgagtccatctcgctatgacggaaacccttcttcataccttcttcttccgttcctacacaacatcgcttcttcgattcctgctaaccttccacctcttagaatatccaacagtgcgcctgtgactcctccgttgtcatctcctacttctcgtggttcgaagcggaaacttacttcagagcaattaccaaatggcgggtctttacacgttttgagacatccgcttttcgctatctctgctccatctagtcctactcgtcgtgctggtcaccaaacgccacctacaataccggaatgtgatgagtccgaggaggattcgatcgaggattcaggaaggtggatcaatttccaatctactgctcctacttcaccaacatttaaccttgttcagcaaacttctatggccattgatatgaaaaggtcagactggggaatgtccggaatgaatgggagaggggcagagtttgagtttgagaatggaacagttaagccgtgggaaggcgaaatgattcatgaagttggcgtagaagatctcgaactcactctcggtggcactaaagccagatgctga

SEQ ID NO: 140804 - protein, 318 aa, Arabidopsis thaliana
MAAGGGGGGGGSSSGRTPTWKERENNKKRERRRRAITAKIYSGLRAQGNYKLPKHCDNNEVLKALCLEAGWIVEDDGTTYRKGFKPPASDISGTPTNFSTNSSIQPSPQSSAFPSPAPSYHGSPVSSSFPSPSRYDGNPSSYLLLPFLHNIASSIPANLPPLRISNSAPVTPPLSSPTSRGSKRKLTSEQLPNGGSLHVLRHPLFAISAPSSPTRRAGHQTPPTIPECDESEEDSIEDSGRWINFQSTAPTSPTFNLVQQTSMAIDMKRSDWGMSGMNGRGAEFEFENGTVKPWEGEMIHEVGVEDLELTLGGTKARC

SEQ ID NO: 140805 - DNA, 855 bp, Arabidopsis thaliana
  CDS (1)..(855)
atgacgtcggggactagaacgccgacttggaaagagagagagaacaacaaacggcgagagcggcgaagacgagcgattgcggctaagatcttcgcaggactaaggattcatggaaacttcaagctccctaaacactgcgacaacaatgaagtcctcaaagctttatgcaatgaagctggttggactgtagaagacgacggaactacttaccgcaagggatgcaaaccaatggatcgaatggacctcatgaatggttctacttcagctagtccatgctcatcgtatcaacatagccctcgtgcttcctacaatccaagcccttcgtcttcatcattcccgagtcctacaaacccatttggtgatgctaactcactaatcccatggctcaagaacctctcttcaaactcaccttccaagcttcccttcttccatggaaattcaataagcgctcccgtgactccgccattggctcgaagccctactcgtgatcaagtaaccatccctgactctggatggctctcaggaatgcaaactccgcagagcggaccgtcttctcctactttcagtttagtttcaagaaacccgtttttcgacaaagaggcttttaaaatgggagattgtaattcaccaatgtggactcctggacaaagtggaaactgctctccagctattcctgctggtgttgatcagaactctgatgtgccaatggctgatggaatgacggctgagtttgcgtttggttgtaacgcaatggctgcgaatggaatggtgaagccttgggaaggagaaaggatacatggagaatgtgtttcagatgatttagaacttacacttggaaactcaagaaccagatga

SEQ ID NO: 140806 - protein, 284 aa, Arabidopsis thaliana
MTSGTRTPTWKERENNKRRERRRRAIAAKIFAGLRIHGNFKLPKHCDNNEVLKALCNEAGWTVEDDGTTYRKGCKPMDRMDLMNGSTSASPCSSYQHSPRASYNPSPSSSSFPSPTNPFGDANSLIPWLKNLSSNSPSKLPFFHGNSISAPVTPPLARSPTRDQVTIPDSGWLSGMQTPQSGPSSPTFSLVSRNPFFDKEAFKMGDCNSPMWTPGQSGNCSPAIPAGVDQNSDVPMADGMTAEFAFGCNAMAANGMVKPWEGERIHGECVSDDLELTLGNSRTR

SEQ ID NO: 140807 - DNA, 978 bp, Arabidopsis thaliana
  CDS (1)..(978)
atgacatcagggacgagaatgccgacatggagggaaagagagaacaacaagagaagagaaagacgacggagagcaatcgcagctaagatcttcaccggattaagaatgtacggtaattacgagcttccgaagcattgcgacaacaacgaagtgcttaaagcactctgtaacgaagctggttggatcgtcgaacctgatggaactacttaccgcaagggatgtagtagacctgtagagcgtatggagataggtggtggttcagcaaccgctagtccttgctcttcctatcagccaagtccctgtgcttcttataatcctagtccaggctcctccaacttcatgagtcctgcttcatcctcatttgctaatcttacctctggtgatggccaatctctcatcccatggctaaaacacctctcaacaacatcatcctcatcagcttcttcatcatcaagactccctaattacctctatatccctggaggctccataagcgctcctgtaactcctcctttaagctctccaacagctcgtaccccgagaatgaacactgattggcagcaactcaacaactccttctttgtctcctcaacaccgccaagtcccacgcgtcagatcatccctgactctgaatggttctcagggattcaactagcacaaagtgttccagcttcaccaacgtttagcctcgtctcacaaaacccatttggattcaaagaagaagcagcctctgctgctggaggcggaggagggtcaaggatgtggacaccaggtcaaagcggaacctgctcccctgctattcctcctggtgctgaccagacagcagatgttccaatgtctgaagccgtggctcctccagagtttgcttttgggagtaatacaaacgggctagtgaaagcatgggaaggagagaggatacacgaggagagtggttcagatgatcttgaactcactcttggaaactcaagcaccaggtaa

SEQ ID NO: 140808 - protein, 325 aa, Arabidopsis thaliana
MTSGTRMPTWRERENNKRRERRRRAIAAKIFTGLRMYGNYELPKHCDNNEVLKALCNEAGWIVEPDGTTYRKGCSRPVERMEIGGGSATASPCSSYQPSPCASYNPSPGSSNFMSPASSSFANLTSGDGQSLIPWLKHLSTTSSSSASSSSRLPNYLYIPGGSISAPVTPPLSSPTARTPRMNTDWQQLNNSFFVSSTPPSPTRQIIPDSEWFSGIQLAQSVPASPTFSLVSQNPFGFKEEAASAAGGGGGSRMWTPGQSGTCSPAIPPGADQTADVPMSEAVAPPEFAFGSNTNGLVKAWEGERIHEESGSDDLELTLGNSSTR

SEQ ID NO: 140809 - DNA, 858 bp, Brassica napus
  CDS (1)..(858)
atgacagcatcaggaggaggatccacggcggcgggaggagcaggagcgacggggaggatgccaacgtggaaggagagggagaacaacaagaagagagagagaaggagaagagccatagcagctaaaatattcaccggactcagatctcagggtaattacaagctccctaagcattgtgacaacaatgaagtactcaaagctctttgcgtcgaagctggttggatcgtccacgaagacggcaccacttaccgaaagggttcccgaccaacagaaacaacaccgccgcgcgtgagcgcgtgttcgtcaatccaactcagtcctcattcctcagcttttcaaagcccagttccgtcgtatcaagcgagcccagcctcgtcatcttacccaagcccgacccggttcgacccgaatcattcctcaacgtatctcatcccttatctccaagacctagcttcctccggaaacctagctcctctacgaatttccaatagtgcccctgtcacacctccagtttcctctcctagaggctcacatccgagactacccaagccacagttcagcaacttcccagtctcagctccttcaagcccaacacggcgtctccaccaccactacacatcgattcctgaatgcgacgagtcagatgtctccacggtcgattcttgtcgatggacccgttttcaaacggtgactgtttctcagacatgtccgccttcgccaacttttaacctcgtcaaaaatagcgtttgcgttggcggcggagacgtttcggtgaagccgtgggaaggtgagaagattcacgatgttggtgtcgatgacttggagctgacgttaggtaacgctaaaggacgcggctaa

SEQ ID NO: 140810 - protein, 285 aa, Brassica napus
MTASGGGSTAAGGAGATGRMPTWKERENNKKRERRRRAIAAKIFTGLRSQGNYKLPKHCDNNEVLKALCVEAGWIVHEDGTTYRKGSRPTETTPPRVSACSSIQLSPHSSAFQSPVPSYQASPASSSYPSPTRFDPNHSSTYLIPYLQDLASSGNLAPLRISNSAPVTPPVSSPRGSHPRLPKPQFSNFPVSAPSSPTRRLHHHYTSIPECDESDVSTVDSCRWTRFQTVTVSQTCPPSPTFNLVKNSVCVGGGDVSVKPWEGEKIHDVGVDDLELTLGNAKGRG

SEQ ID NO: 140811 - DNA, 936 bp, Glycine max
  CDS (1)..(936)
atggccgacgacggagcaacctcggcggcgacgagccggagaaagccgtcgtggagagaaagagagaacaacagaagaagagaaagacgaagaagagcaatagcagcgaaaatatactcaggacttcgagctcaggggaacttcaacttgccaaagcactgcgacaacaacgaagttctgaaagctctctgcgcagaagctggttggtgcgtagaagaagacggaaccacttatcgcaagggttgcaagccgcctctagccaatggtgctgggagctccatgagaaacattcccttttcttcttctcaaaatccaagtcctctttcttcatcatttcccagcccaattccttcataccaagttagcccttcctcctcctctttgccaagcccgtttcgtttagatggggataaggacaatgtatcaaacctcattccatacattcgcaatgcgtccttgtctcttcctcctctcaggatatcaaacagtgcccctgtgacaccacctctttcatcaccaacatcaagaaattcaaaaccaattcctacatgggagtctattgccaaagaatccatggcctccttcaattaccctttctttgcagcgtctgcccctgctagccccacgcaccgtcacctttacacccctctcactattccagaatgcgatgagtccgatacttccattggtgagtctggccagtgggtgaaattccaagcatttgctccttctgcatctgtgttcccaacttctccaaccttcaatcttgttaaacctgtgattccgcacaggatgcctgataactcaatccaagtgatgaggacgagttcagaagagtttggggtacaggtaaagccttgggttggggaaaaaattcatgaagtggcattggatgatttagagctcacacttggaagtgggaaggtgcggagttag

SEQ ID NO: 140812 - protein, 311 aa, Glycine max
MADDGATSAATSRRKPSWRERENNRRRERRRRAIAAKIYSGLRAQGNFNLPKHCDNNEVLKALCAEAGWCVEEDGTTYRKGCKPPLANGAGSSMRNIPFSSSQNPSPLSSSFPSPIPSYQVSPSSSSLPSPFRLDGDKDNVSNLIPYIRNASLSLPPLRISNSAPVTPPLSSPTSRNSKPIPTWESIAKESMASFNYPFFAASAPASPTHRHLYTPLTIPECDESDTSIGESGQWVKFQAFAPSASVFPTSPTFNLVKPVIPHRMPDNSIQVMRTSSEEFGVQVKPWVGEKIHEVALDDLELTLGSGKVRS

SEQ ID NO: 140813 - DNA, 1014 bp, Brassica napus
  CDS (1)..(1014)
atgacgtcggacggcgcgacgtcgacgtcagcagcagcagcgatggcggcgacgaggaggaagccgtcgtggagagagagggagaacaatcggaggagggagaggaggagaagagctgtagcggcgaagatttacactggtctgagagctcaaggtaactacaatctccccaagcactgcgacaacaatgaagtgctcaaggctctttgctctgaagctggatgggtggttgaagaagacggaaccacttatcgcaagggacacaagcctccttctctacctggtgacgtggctggatcatcctcacgagccactccttactcttcctacaaccaaagcccattcgaaagtcccatcctttcttaccaagtcagtccatcgtcttcctcattccctagcccttctcgtggtggtggagacacacacaacaacatctccaccatcttccctttcctcaggaacggtgggatcccttcttcgcttcctcctctcagaatctcaaacagtgctccagtgacaccacctgtctcatctccatcatctaaacacaccaagccgttacccacttgggaggaatcttttaccaaacagtccatggccattgctgctaaacagtcaatgtcgtcttttaactacccgttctacgcggtatctgcacctgcgagtcccactcatcatcgccagttcaatgctccggctactatacctgaatgtgatgagtctgacgcttccactgttgattctggtcattggataagctttcagaagttctcacaacagcaacagccgttccttggcgtttctgcagtgccggcttctcctactttcaatctagtgaaaccaccagtacctcagcagctatctccaaacactgcagcaatccaagagattggtcaaagctcggagtttaaatttgagaacaggcaagttaagccgtgggaaggggagaggatccatgatgtggctatggaggatctggagctcacacttggaaacgccaaagctcgtggttga

SEQ ID NO: 140814 - protein, 337 aa, Brassica napus
MTSDGATSTSAAAAMAATRRKPSWRERENNRRRERRRRAVAAKIYTGLRAQGNYNLPKHCDNNEVLKALCSEAGWVVEEDGTTYRKGHKPPSLPGDVAGSSSRATPYSSYNQSPFESPILSYQVSPSSSSFPSPSRGGGDTHNNISTIFPFLRNGGIPSSLPPLRISNSAPVTPPVSSPSSKHTKPLPTWEESFTKQSMAIAAKQSMSSFNYPFYAVSAPASPTHHRQFNAPATIPECDESDASTVDSGHWISFQKFSQQQQPFLGVSAVPASPTFNLVKPPVPQQLSPNTAAIQEIGQSSEFKFENRQVKPWEGERIHDVAMEDLELTLGNAKARG

SEQ ID NO: 140815 - DNA, 831 bp, Brassica napus
  CDS (1)..(831)
atgacttctgggactagaacgccgacttggaaagagagagagaacaacaaacggcgagagcggcgaagacgtgcgattgcggctaagatcttcgcggggcttaggattcatgggaactttaagctgccgaaacactgcgataacaacgaagttctcaaagctctttgcaatgaagctggttggaccgtagaggaagacgggactacttaccgtaagggatgcaaaccaatggatcgaatggaactcatgaacggttctacttcagcgagtccatgctcatcttaccaaccaagccctcgtggttcctacaatccaagcccttcatcttcctcattccctagtcctacaaacatatttggtgatgctaactctctaatcccatggctcaagaacctctcttcaaactcaccttccaagcttcccttcttccacgggaactccataagcgctcccgtgactccaccgctggctcgaagccctactcgtgaccaagtaaccatccctgaatctggatggctctctggaatgcaaaccccacagagcggaccgtcctctcctactttcagtttagtttcgagaaacccgtttttcgacaaagcggcttttacaatgggagattgtagctcaccaatgtggactcctggtcaaagtggaaactgctctccagctattcctgctggtgttgatcaaaactctgatgtaccaatggctgatggaatggcggcagagtttgcgtttggaatggtgaagccttgggaaggagaaaggatacatggagaatgcgtttcagatgatttagaacttacacttggaaactcaagaaccagatga

SEQ ID NO: 140816 - protein, 276 aa, Brassica napus
MTSGTRTPTWKERENNKRRERRRRAIAAKIFAGLRIHGNFKLPKHCDNNEVLKALCNEAGWTVEEDGTTYRKGCKPMDRMELMNGSTSASPCSSYQPSPRGSYNPSPSSSSFPSPTNIFGDANSLIPWLKNLSSNSPSKLPFFHGNSISAPVTPPLARSPTRDQVTIPESGWLSGMQTPQSGPSSPTFSLVSRNPFFDKAAFTMGDCSSPMWTPGQSGNCSPAIPAGVDQNSDVPMADGMAAEFAFGMVKPWEGERIHGECVSDDLELTLGNSRTR

SEQ ID NO: 140817 - DNA, 963 bp, Glycine max
  CDS (1)..(963)
atgacttcggacggagcaacgtcggcggcgacgcatcggaggaaaccttcgtggagggagagagagaacaaccggaggagagagaggataaggagagccattgcagccaagatatactccggccttagggcgcaagggaactacaatttgcccaaacactgcgacaacaatgaggtcttgaaggctctctgcgccgaagctggttggaccgtcgaagaagacggaaccacctatcgcaagggatgcagggcaccacttcctggtgatggtgtaggcacctccaccagaaacactcctttctcatcgcaaaatccgagtcctctttcttcgtcatttccaagtccaattccttcatatcaagtgagcccttcctcctcctctttcccgagcccttctcgtttggatgcaaacaacccttcaaacctgattccatatattcggcatgcgtttcctgcgtctgtccctcctttaaggatatcaaacagcgcccctgtgaccccacccctgtcctcgccaacttccagaaaccccaaaccaattcccacatgggattccattgccaaagcctccatggcatcatccttcaaccacagccaccatcctttctttgcggcttcagcaccggctagccccacacaccgccacctttatgccccacccactattccggagtgtgatgagtctgatacctccactgttgagtctggtcagtggctgaacttccaagcatttgccccttctgtttctcctgtgcctatctctcccaccatgaattttatcaaacctgttgtgagtcagcagcacaagcacaacctcaatctccctggtaatggaatccaagagatgagaatttcggagcccgaatttgcgatgcaggtgaagccttgggttggggagaggattcatgaagtgggattggatgatttggaactcacacttggaagtgggaagacgcctgcttag

SEQ ID NO: 140818 - protein, 320 aa, Glycine max
MTSDGATSAATHRRKPSWRERENNRRRERIRRAIAAKIYSGLRAQGNYNLPKHCDNNEVLKALCAEAGWTVEEDGTTYRKGCRAPLPGDGVGTSTRNTPFSSQNPSPLSSSFPSPIPSYQVSPSSSSFPSPSRLDANNPSNLIPYIRHAFPASVPPLRISNSAPVTPPLSSPTSRNPKPIPTWDSIAKASMASSFNHSHHPFFAASAPASPTHRHLYAPPTIPECDESDTSTVESGQWLNFQAFAPSVSPVPISPTMNFIKPVVSQQHKHNLNLPGNGIQEMRISEPEFAMQVKPWVGERIHEVGLDDLELTLGSGKTPA

SEQ ID NO: 140819 - DNA, 1005 bp, Glycine max
  CDS (1)..(1005)
atgacgtccgtcgcgaggcagccaacgtggaaggagcgggagaacaacaagaggcgagagaggaggaggagagccatcgcggcgaagatcttctccggcctgcgaatgtacggcaactacaagctccccaaacactgcgacaacaacgaagttctcaaggctctctgcaacgaagccggctggaccgtagaagccgatggcaccacctatcgcaagggatgcaagcctcctgttgaacgcatggacatagtaggtggttctgcagcagcaagcccatgctcatcttaccatccaagtccctgtgcttcctacaaccctagtccaggctcttcttgcttaccgagccctcgcgcatccccctttcctccaaacccaaatgctgatggcaattctctcattccatggctcaaaaacctttcatcaggatcatcatcggcatcctcttccaagcttccgcagctgtacattccgaatggctccatcagtgctccagtcactcctccaatcagctctccatcatcccgaaagccccagatcagagctgattgggaggatcagtccaattgtccgacagcgtggggcggaccggcatacacctttgtgccctcttcaactcctccaagccccggccgccaggttgccgaaacagattggttttccaagatcaggattcctcagggaggactagcaccaacttctccaaccttcagcctggtctcttccaacccatttggcctcaaggaagatgctatggttggcagcggttcccggatgtggacgacaccaggggcaagtggaacatgttctccagccgtagctgcaggctccgaaaacacttctgacattccaatggctgaagcagtttcagatgaatttgcctttggaagcagctcatcaggtttagtgaatgcctggaaaggagagaggatccatgaagcttcttttggaacagatgatcttgagctcactcttgggagctccaagaccaggttgctccataagtga

SEQ ID NO: 140820 - protein, 334 aa, Glycine max
MTSVARQPTWKERENNKRRERRRRAIAAKIFSGLRMYGNYKLPKHCDNNEVLKALCNEAGWTVEADGTTYRKGCKPPVERMDIVGGSAAASPCSSYHPSPCASYNPSPGSSCLPSPRASPFPPNPNADGNSLIPWLKNLSSGSSSASSSKLPQLYIPNGSISAPVTPPISSPSSRKPQIRADWEDQSNCPTAWGGPAYTFVPSSTPPSPGRQVAETDWFSKIRIPQGGLAPTSPTFSLVSSNPFGLKEDAMVGSGSRMWTTPGASGTCSPAVAAGSENTSDIPMAEAVSDEFAFGSSSSGLVNAWKGERIHEASFGTDDLELTLGSSKTRLLHK

SEQ ID NO: 140821 - DNA, 936 bp, Glycine max
  CDS (1)..(936)
atggccgacgacggagcaacctcggcggcgacgagccggagaaagccgtcgtggagagaaagagagaacaacagaagaagagaaagacgaagaagagcaatagcagcgaaaatatactcaggacttcgagctcaggggaacttcaacttgccaaagcactgcgacaacaacgaagttctgaaagctctctgcgcagaagctggttggtgcgtagaagaagacggaaccacttatcgcaagggttgcaagccgcctctagccaatggtgctgggagctccatgagaaacattcccttttcttcttctcaaaatccaagtcctctttcttcatcatttcccagcccaattccttcataccaagttagcccttcctcctcctctttgccaagcccgtttcgtttagatgtggataaggacaatgtatcacacctcattccatacattcgcaatgcgtccttgtctcttcctcctctcaggatatcaaacagtgcccctgtgacaccacctctttcatcaccaacatcaagaaatccaaaaccaattcctacttgggagtctattgccaaagaatccatggcctccttcagttaccctttctttgcagcttctgcccctgctagccccacacaccgtcacctttacactccgcccactattccagaatgcgatgaatctgatacttccaccggcgagtctggccagtgggtgaaattccaagcatttgctccttcttcatctgtgttgccaatttctccaacctttaatcttgttaaacctgtggttccacccgggatgcctgataactcaatccaagagatgaggacgagttcagatgagtttggggtacaggtaaagccttgggttggggaaaaaattcatgaagtggcattggatgacttggagctcacacttggaagtgggaaggtgcggagttag

SEQ ID NO: 140822 - protein, 311 aa, Glycine max
MADDGATSAATSRRKPSWRERENNRRRERRRRAIAAKIYSGLRAQGNFNLPKHCDNNEVLKALCAEAGWCVEEDGTTYRKGCKPPLANGAGSSMRNIPFSSSQNPSPLSSSFPSPIPSYQVSPSSSSLPSPFRLDVDKDNVSHLIPYIRNASLSLPPLRISNSAPVTPPLSSPTSRNPKPIPTWESIAKESMASFSYPFFAASAPASPTHRHLYTPPTIPECDESDTSTGESGQWVKFQAFAPSSSVLPISPTFNLVKPVVPPGMPDNSIQEMRTSSDEFGVQVKPWVGEKIHEVALDDLELTLGSGKVRS

SEQ ID NO: 140823 - DNA, 975 bp, Glycine max
  CDS (1)..(975)
atgacttcggacggagcaacgtcggcggcgacgcatcggaggaaaccttcgtggagggagagagagaacaaccggaggagagagaggataaggagagccattgcagccaagatatactccggccttagggcgcaagggaactacaatttgcccaaacactgcgacaacaatgaggtcttgaaggctctctgcgccgaagctggttggaccgtcgaagaagacggaaccacctatcgcaagggatgcagggcaccacttcctggtgatggtgtaggcacctccaccagaaacactcctttctcatcgcaaaatccgagtcctctttcttcgtcatttccgagtccaattccttcatatcaagtgagcccttcctcctcctctttcccgagcccttctcgtttggatgcaaacaacccttcaaacctgattccatatattcggcatgcgtttcctgcgtctgtccctcctttaaggatatcaaacagcgcccctgtgaccccacccctgtcctcgccaacttccagaaaccccaaaccaattcccacatgggattccattgccaaagcctccatggcatcatccttcaaccacagccaccatcctttctttgcggcttcagcaccggctagccccacacaccgccacctttatgccccacccactattccggagtgtgatgagtctgatacctccactgttgagtctggtcagtggctgaacttccaagcatttgccccttctgtttctcctgtgcctatctctcccaccatgaattttatcaaacctgttgtgagtcagcagcacaagcacaacctcaatctccctggtaatggaatccaagagatgagaatttcggagcccgaatttgcgatgcaggtgaagccttgggttggggagaggattcatgaagtgggattggatgatttggaactcacacttggaagtgggaagacgcctgcttatgcttatgtctga

SEQ ID NO: 140824 - protein, 324 aa, Glycine max
MTSDGATSAATHRRKPSWRERENNRRRERIRRAIAAKIYSGLRAQGNYNLPKHCDNNEVLKALCAEAGWTVEEDGTTYRKGCRAPLPGDGVGTSTRNTPFSSQNPSPLSSSFPSPIPSYQVSPSSSSFPSPSRLDANNPSNLIPYIRHAFPASVPPLRISNSAPVTPPLSSPTSRNPKPIPTWDSIAKASMASSFNHSHHPFFAASAPASPTHRHLYAPPTIPECDESDTSTVESGQWLNFQAFAPSVSPVPISPTMNFIKPVVSQQHKHNLNLPGNGIQEMRISEPEFAMQVKPWVGERIHEVGLDDLELTLGSGKTPAYAYV

SEQ ID NO: 140825 - DNA, 912 bp, Brassica napus
  CDS (1)..(912)
atggcggcaggtggaggaggatcatcgtcggcgggacggactccgacgtggaaggagagggagaacaacaagaagagggagaggagaagaagagccatcacggccaagatttactctggtctcagagctcaaggtaactacaagctccctaagcactgcgacaacaacgaagtccttaaagctctctgtctcgaagctggttggatcgttgaagacgacggcaccacttatcgcaagggttttaagccaactccgacgaacttcagcacgaactcatcaatccaaccgagtccacaatcatctgccttcccaagcccggcaccttcttaccacggctcccctgtctcatcctccttcccaagcccatctcgttacgaccaaaacccttcctcgtacctcctcctccctttcctccacaacatcgcttcctccatcccatcaaacctccctcctctcagaatctccaacagcgctcccgtaactccccccttgtcctctcccacctctcgcggttcgaagcggaagctcatcacagaacagctaccaaacggcgggtctttgctaagacacccgcttttcgctatctctgctccgtctagtcctacgcgccgcggcggtcaccagacgccgccgacgatacccgaatgcgacgagtcggaggaggattcggtagaggattcagggaggtggatcagttttcaatctacggctcctccttccccgacgtttaacctcgttcagcagacgtctatggagattgacatgaaaagaccagagtgggggatgaatgcgaggggctcagagtttgagttcgagaatggtactgttaagccatgggaaggcgaaatgattcatgaagttggtgtagaggatcttgagctcactctcggtggcactaaaacaagatgctaa

SEQ ID NO: 140826 - protein, 303 aa, Brassica napus
MAAGGGGSSSAGRTPTWKERENNKKRERRRRAITAKIYSGLRAQGNYKLPKHCDNNEVLKALCLEAGWIVEDDGTTYRKGFKPTPTNFSTNSSIQPSPQSSAFPSPAPSYHGSPVSSSFPSPSRYDQNPSSYLLLPFLHNIASSIPSNLPPLRISNSAPVTPPLSSPTSRGSKRKLITEQLPNGGSLLRHPLFAISAPSSPTRRGGHQTPPTIPECDESEEDSVEDSGRWISFQSTAPPSPTFNLVQQTSMEIDMKRPEWGMNARGSEFEFENGTVKPWEGEMIHEVGVEDLELTLGGTKTRC

SEQ ID NO: 140827 - DNA, 1068 bp, Zea mays
  CDS (1)..(1068)
atgacgagcggcgccgggggagccgcggccgggatcgggggcaccagggtgcccacgtggagggagcgcgagaacaaccgccgcagggagcgccggcgccgcgcgatcgccgccaagatcttcgccggcctcagggcctacggcaactacaacctccccaagcactgcgacaacaacgaggtgctcaaggcgctctgcaacgaggccggctggaccgtcgagcccgacggcaccacctaccgcaagggatgtaaacctctggcaacagagcgtccagatccaattgggaggtctgcatcaccaagcccctgctcttcatatcaaccaagtccgcgagcctcatacaacccaagcgcggcatcctcctcgttcccaagctctgggtcctcctcccacattactcttggcgggagcaacttcatgggaggcgtcgagggcagctcccttatcccgtggctaaagaacctctcgtcgagctcctcgttcgcctcctcctccaagttcccgcagcttcaccacctctacttcaacggcggttccatcagcgcgccggtgacgcctccatccagctctccaacccgcacgcctcgcatcaagactgactgggagaacccgagtgttcagccaccgtgggctggggcgaactacgcgtctcttcccaactcccagccgccgagccctgggcaccaggttgctccggacccggcgtggctagccgggttccagatttcgtctgctggcccttcgtctccaacttacagccttgtggctccgaatccgtttggtatcttcaaggagaccatcgtcagcacctcaagaatgtgcacccctgggcagagtggaacgtgctctcctgtaatgggcggtgcgccgatccatcacgatgtccagatggctgatggtgccccagatgacttcgccttcgggagcagcagcaacggcaacaacgagtcgcctggtctcgtgaaggcatgggagggggaacggatacacgaggagtgcgcctcggacgagcatgagctggagctcacccttgggagctcaaagactcgtgcagatccttcctga

SEQ ID NO: 140828 - protein, 355 aa, Zea mays
MTSGAGGAAAGIGGTRVPTWRERENNRRRERRRRAIAAKIFAGLRAYGNYNLPKHCDNNEVLKALCNEAGWTVEPDGTTYRKGCKPLATERPDPIGRSASPSPCSSYQPSPRASYNPSAASSSFPSSGSSSHITLGGSNFMGGVEGSSLIPWLKNLSSSSSFASSSKFPQLHHLYFNGGSISAPVTPPSSSPTRTPRIKTDWENPSVQPPWAGANYASLPNSQPPSPGHQVAPDPAWLAGFQISSAGPSSPTYSLVAPNPFGIFKETIVSTSRMCTPGQSGTCSPVMGGAPIHHDVQMADGAPDDFAFGSSSNGNNESPGLVKAWEGERIHEECASDEHELELTLGSSKTRADPS

SEQ ID NO: 140829 - DNA, 981 bp, Zea mays
  CDS (1)..(981)
atgacgtcgggagcggcggcggtgggaggcctcgggcggacgccgacatggaaggagcgggagaacaacaagcgccgggagcgccggcggagggccatcgccgccaagatcttcacgggcctccgcgcgctcggcaactacaagctgcccaagcactgcgacaacaacgaggtgctcaaggcgctgtgccgcgaggcggggtgggtcgtcgaggacgacggcaccacctaccgaaagggatgcaagccgccgccggggatgatgagcccgtgctcgtcctcgcagctgctgagcgcgccgtcctcgagcttcccgagcccggtgccgtcctaccacgccagcccggcgtcgtcgagcttcccgagcccgacgcgcctcgaccacagcagcggcagcaacagccacagccacacccccggccccgccgccgcagcagccgcagcggcggcggcggcctcctccctgctcccgttcctccgaggcctgccgccgctccgcgtctccagcagcgcgcccgtgacgccgccgctctcgtcgcccacggcggcgtcgcggtcgcccgccaaggtccgcaagcccgactgggacgccgccgccgccgccgacccgttccgccaccccttcttcgcggtgtccgcccccgccagcccgacccgcgcgcgccggcgcgaagagcacccggacaccatccccgagtgcgacgagtccgacgtctgctgctccgcggtggcggactccggccgctggatcagcttccagatcggggcggccaccacggcgcccgcgtcgcccgcgtacaacctcgtcaacccggccggtggcggcggcggcgcgtccgcttccgactccatggagctggacggggtggcgggcgcggagttcgagttcgacaagggccgcgtcacgccgtgggaaggcgagcgcatccacgaggtcgccgccgaggagctcgagctcacgctcggcgtcggcgccaagtga

SEQ ID NO: 140830 - protein, 326 aa, Zea mays
MTSGAAAVGGLGRTPTWKERENNKRRERRRRAIAAKIFTGLRALGNYKLPKHCDNNEVLKALCREAGWVVEDDGTTYRKGCKPPPGMMSPCSSSQLLSAPSSSFPSPVPSYHASPASSSFPSPTRLDHSSGSNSHSHTPGPAAAAAAAAAAASSLLPFLRGLPPLRVSSSAPVTPPLSSPTAASRSPAKVRKPDWDAAAAADPFRHPFFAVSAPASPTRARRREEHPDTIPECDESDVCCSAVADSGRWISFQIGAATTAPASPAYNLVNPAGGGGGASASDSMELDGVAGAEFEFDKGRVTPWEGERIHEVAAEELELTLGVGAK

SEQ ID NO: 140831 - DNA, 20 bp, Artificial sequence
  primer
atgacgtctgacggagcaac

SEQ ID NO: 140832 - DNA, 23 bp, Artificial sequence
  primer
tcaactatgagctttaccatttc

SEQ ID NO: 140833 - protein, 455 aa, Artificial sequence
  consensus sequence
  Variant (2)..(2): Xaa in position 2 is any amino acid
  Variant (4)..(4): Xaa in position 4 is any amino acid
  Variant (6)..(6): Xaa in position 6 is any amino acid
  Variant (12)..(12): Xaa in position 12 is any amino acid
  Variant (26)..(27): Xaa in position 26 to 27 is any amino acid
  Variant (32)..(32): Xaa in position 32 is any amino acid
  Variant (36)..(36): Xaa in position 36 is any amino acid
  Variant (52)..(52): Xaa in position 52 is any amino acid
  Variant (57)..(57): Xaa in position 57 is any amino acid
  Variant (60)..(60): Xaa in position 60 is any amino acid
  Variant (68)..(68): Xaa in position 68 is any amino acid
  Variant (69)..(128): Xaa in position 69 to 128 is any or no amino acid
  Variant (130)..(144): Xaa in position 130 to 144 is any amino acid
  Variant (145)..(154): Xaa in position 145 to 154 is any or no amino acid
  Variant (157)..(157): Xaa in position 157 is any amino acid
  Variant (160)..(161): Xaa in position 160 to 161 is any amino acid
  Variant (162)..(162): Xaa in position 162 is any or no amino acid
  Variant (165)..(166): Xaa in position 165 to 166 is any amino acid
  Variant (169)..(170): Xaa in position 169 to 170 is any amino acid
  Variant (173)..(173): Xaa in position 173 is any amino acid
  Variant (180)..(191): Xaa in position 180 to 191 is any amino acid
  Variant (192)..(213): Xaa in position 192 to 213 is any or no amino acid
  Variant (215)..(215): Xaa in position 215 is any amino acid
  Variant (217)..(220): Xaa in position 217 to 220 is any amino acid
  Variant (221)..(234): Xaa in position 221 to 234 is any or no amino acid
  Variant (236)..(239): Xaa in position 236 to 239 is any amino acid
  Variant (240)..(245): Xaa in position 240 to 245 is any or no amino acid
  Variant (247)..(247): Xaa in position 247 is any amino acid
  Variant (255)..(255): Xaa in position 255 is any amino acid
  Variant (259)..(275): Xaa in position 259 to 275 is any amino acid
  Variant (276)..(301): Xaa in position 276 to 301 is any or no amino acid
  Variant (303)..(303): Xaa in position 303 is any amino acid
  Variant (305)..(305): Xaa in position 305 is any amino acid
  Variant (308)..(316): Xaa in position 308 to 316 is any amino acid
  Variant (317)..(332): Xaa in position 317 to 332 is any or no amino acid
  Variant (334)..(341): Xaa in position 334 to 341 is any amino acid
  Variant (342)..(345): Xaa in position 342 to 345 is any or no amino acid
  Variant (347)..(354): Xaa in position 347 to 354 is any amino acid
  Variant (355)..(358): Xaa in position 355 to 358 is any or no amino acid
  Variant (360)..(365): Xaa in position 360 to 365 is any amino acid
  Variant (366)..(380): Xaa in position 366 to 380 is any or no amino acid
  Variant (382)..(382): Xaa in position 382 is any amino acid
  Variant (384)..(397): Xaa in position 384 to 397 is any amino acid
  Variant (398)..(416): Xaa in position 398 to 416 is any or no amino acid
  Variant (418)..(419): Xaa in position 418 to 419 is any amino acid
  Variant (420)..(430): Xaa in position 420 to 430 is any or no amino acid
  Variant (432)..(433): Xaa in position 432 to 433 is any amino acid
  Variant (438)..(438): Xaa in position 438 is any amino acid
  Variant (441)..(446): Xaa in position 441 to 446 is any amino acid
  Variant (447)..(449): Xaa in position 447 to 449 is any or no amino acid
RXPXWXERENNXRRERRRRAIAAKIXXGLRAXGNYXLPKHCDNNEVLKALCXEAGWXVEXDGTTYRKXXXXXXXXXXXXXXXXXXXXXXXXXXXXXXXXXXXXXXXXXXXXXXXXXXXXXXXXXXXXXGXXXXXXXXXXXXXXXXXXXXXXXXXSPXSSXXXSPXXSYXXSPXSSSFPSXXXXXXXXXXXXXXXXXXXXXXXXXXXXXXXXXXPXLXXXXXXXXXXXXXXXXXXPXXXXXXXXXXSXSAPVTPPXSSPXXXXXXXXXXXXXXXXXXXXXXXXXXXXXXXXXXXXXXXXXXXSXPXSPXXXXXXXXXXXXXXXXXXXXXXXXXIXXXXXXXXXXXXSXXXXXXXXXXXXFXXXXXXXXXXXXXXXXXXXXXSXTXXXXXXXXXXXXXXXXXXXXXXXXXXXXXXXXXFXXXXXXXXXXXXXVXXWEGEXIHXXXXXXXXXLELTLG

SEQ ID NO: 140834 - protein, 60 aa, Artificial sequence
  protein pattern
  Variant (5)..(5): Xaa in position 5 is Lys or Arg
  Variant (14)..(14): Xaa in position 14 is Ile or Val
  Variant (19)..(19): Xaa in position 19 is Phe or Tyr
  Variant (20)..(20): Xaa in position 20 is Ala, Ser or Thr
  Variant (24)..(25): Xaa in position 24 to 25 is any amino acid
  Variant (27)..(27): Xaa in position 27 is Gly or Asn
  Variant (28)..(28): Xaa in position 28 is Phe or Tyr
  Variant (29)..(29): Xaa in position 29 is any amino acid
  Variant (45)..(45): Xaa in position 45 is any amino acid
  Variant (50)..(50): Xaa in position 50 is any amino acid
  Variant (53)..(53): Xaa in position 53 is any amino acid
RENNXRRERRRRAXAAKIXXGLRXXGXXXLPKHCDNNEVLKALCXEAGWXVEXDGTTYRK

SEQ ID NO: 140835 - protein, 13 aa, Artificial sequence
  protein pattern
  Variant (2)..(2): Xaa in position 2 is any amino acid
  Variant (3)..(3): Xaa in position 3 is Ala or Pro
  Variant (8)..(8): Xaa in position 8 is any amino acid
  Variant (11)..(11): Xaa in position 11 is Asp, Glu or Gly
  Variant (12)..(12): Xaa in position 12 is any amino acid
  Variant (13)..(13): Xaa in position 13 is Ala, Cys, Gly or Ser
VXXWEGEXIHXXX

SEQ ID NO: 140836 - protein, 13 aa, Artificial sequence
  protein pattern
  Variant (2)..(2): Xaa in position 2 is any amino acid
  Variant (10)..(10): Xaa in position 10 is any amino acid
SXSAPVTPPXSSP

SEQ ID NO: 140837 - protein, 15 aa, Artificial sequence
  protein pattern
  Variant (2)..(2): Xaa in position 2 is any amino acid
  Variant (3)..(3): Xaa in position 3 is Ala, Leu or Pro
  Variant (6)..(6): Xaa in position 6 is any amino acid
  Variant (7)..(7): Xaa in position 7 is Ala, Gly, Pro or Val
  Variant (10)..(10): Xaa in position 10 is Ala, Ser, Thr or Val
  Variant (14)..(14): Xaa in position 14 is any amino acid
PXXSYXXSPXSSSXP

SEQ ID NO: 140838 - protein, 10 aa, Artificial sequence
  protein pattern
  Variant (2)..(2): Xaa in position 2 is any or no amino acid
  Variant (9)..(9): Xaa in position 9 is Gly, Asn, Ser or Val
  Variant (10)..(10): Xaa in position 10 is Ala, Gly, Ser or Thr
DXLELTLGXX

SEQ ID NO: 140839 - protein, 9 aa, Artificial sequence
  protein pattern
  Variant (2)..(2): Xaa in position 2 is Ala, Pro, Ser or Thr
  Variant (6)..(6): Xaa in position 6 is Phe or Tyr
  Variant (7)..(7): Xaa in position 7 is Asn or Ser
PXSPTXXLV

SEQ ID NO: 140840 - protein, 13 aa, Artificial sequence
  protein pattern
  Variant (2)..(2): Xaa in position 2 is any amino acid
  Variant (3)..(5): Xaa in position 3 to 5 is any or no amino acid
  Variant (7)..(7): Xaa in position 7 is Ala or Thr
  Variant (9)..(9): Xaa in position 9 is Ala, Pro or Ser
  Variant (12)..(12): Xaa in position 12 is any amino acid
  Variant (13)..(13): Xaa in position 13 is His or Arg
PXXXXSXPXSPXX

SEQ ID NO: 140841 - DNA, 1005 bp, Arabidopsis thaliana
  CDS (1)..(1005)
atggcccctgagatttccgtaaacccgatgtatttatccgaaaaggcgcatcaagcacctccaaggagagcttatgtgacgtttttggcaggaaatggagactacgtgaagggagtggtgggactagcaaagggtttgcgtaaggtcaaaagtgcgtatcctcttgttgttgctatgttacctgatgtgcctgaggaacatagagagatcttgaggtctcaaggctgtgtcgtgcgtgagatcgaacctgtttatcctccagacaaccaagttgagtttgccatggcttattacgttctcaactactcaaaacttcgtatttggaactttgaagagtacagcaagatgatataccttgacgcagatattcaagtctttgacaatatcgatcacctctttgatttgtctgatgcatatttctatgccgtgatggactgtttctgtgagaaaacatggagccactcgctgcagtattcaattgggtattgtcaacagtgcccggagaaggtcacgtggccagaagatatggaatctccacctcctcctctgtatttcaacgccggtatgtttgtgtttgagcctagtcctttgacttatgagagtctccttcagaccctggagatcacaccaccttcaccgtttgcagaacaagattttctcaatatgttctttgagaaagtgtacaaaccgatccctttggtatacaatctggttttggctatgctttggcgtcacccggagaacgtggagctggagaaagtcaaagttgttcactactgtgcagctggatccaagccatggagatacacaggagaagaagctaacatggacagagaagacatcaagatgttagttgataaatggtgggatgtctataatgatgaatctctcgatttcaaatcgaaaatccctgcagatgcggaagaaaccgttacaaaatcaagcatcctagcttccgttcttgaaccagaaatgacctactttcctgctccttctgctgcttga

SEQ ID NO: 140842 - protein, 334 aa, Arabidopsis thaliana
MAPEISVNPMYLSEKAHQAPPRRAYVTFLAGNGDYVKGVVGLAKGLRKVKSAYPLVVAMLPDVPEEHREILRSQGCVVREIEPVYPPDNQVEFAMAYYVLNYSKLRIWNFEEYSKMIYLDADIQVFDNIDHLFDLSDAYFYAVMDCFCEKTWSHSLQYSIGYCQQCPEKVTWPEDMESPPPPLYFNAGMFVFEPSPLTYESLLQTLEITPPSPFAEQDFLNMFFEKVYKPIPLVYNLVLAMLWRHPENVELEKVKVVHYCAAGSKPWRYTGEEANMDREDIKMLVDKWWDVYNDESLDFKSKIPADAEETVTKSSILASVLEPEMTYFPAPSAA

SEQ ID NO: 140843 - DNA, 1644 bp, Zea mays
  CDS (227)..(1270)
ggccggccgggaaaaaaaaaaaaaaaaaaaaaaaaaaaaaaaaaaccaagggacctcgagctgccgggaaacggggggttggggacctcgaccccggccgggaaccgcaagctcaagcaaaaacacaaagcgcttaaaccacactcaaaccaaccgccagccaacaaacaggcctcctagtcccgaccagaactcgctcgtagccccgagaacccgacagcgcgagatggctcccgagctgatgacagccaagatgaccgccaaggccgccgcggcggcggcggcggcggcggcgaagcctgccacgagggcgtacgtgacgttccttgcgggcgacggcgactactggaagggcgtggtggggctggccaagggcctgcgcaaggtccgctcggcctaccccctggtggtggccgtgctgcccgacgtgcccgagtcccaccgccgcatcctcgtctcgcagggctgcgtcgtccgcgagatcgagcccgtgtacccgcctgagaaccagacgcagttcgccatggcgtactacgtcatcaactactccaagctccgcatctgggagttcgtggagtacgagaggatggtgtacctggacgcggacatccaggtgttcgagaacatcgacggcctgttcgagctcgagaaggggtacttctacgcggtgatggactgcttctgcgagaagacgtggagccacaccccgcagtacaggatcggctactgccagcagtgcccggacaaggtggcgtggccagcggcgaccgccgagctgggccctccgccgtcgctctacttcaacgccggcatgttcgtgcacgagcccagcgtggccaccgccaaggcgctcctcgacaccctccgcgtgactccgcccacccccttcgcagagcaggacttcctgaacatgttcttcagggatcagtacaggccgatccccaacgtgtacaacctcgtgctggccatgctctggaggcaccccgagaacgtgcagctggagaaggtgaaggtcgtgcactactgcgcggcggggtccaagccgtggaggttcacgggcaaggaggcgaacatggacagggaggacatcaacgccctggtgaacaagtggtgggacatctacaacgacgagacgctggacttgaagggcctgccctcgctctcgcccgacgacgacgacgaggtggaggcggtggccaagaagccgcttcgcgcggccctggcggaggccggcacggtcaagtacgtcaccgcgccctcggccgcgtgatcccgtgctctggccttcccccaccgcgcaccgtaccggtggccgcgcgctatagcttgtgtgtgtgtggccatcgcggaacataagaagaatctctcactataaaggccttcgttctgtgtttgcattttggttttggattagggtgtctaatttttcaccagttccttttccccttgtgtaagtgtggagcttactatatagctagcgcccatttcaaggtgctgcaagcgttggtcaggaattgggctagagtgtttgtcctgtaccgagggattatgtgtatttttgctatttcgctcggtaaattaatacaataataaaaaatagggagccgcaaaattatggccaaaaaaaaaaaaaaaaaagcggcc

SEQ ID NO: 140844 - protein, 347 aa, Zea mays
MAPELMTAKMTAKAAAAAAAAAAKPATRAYVTFLAGDGDYWKGVVGLAKGLRKVRSAYPLVVAVLPDVPESHRRILVSQGCVVREIEPVYPPENQTQFAMAYYVINYSKLRIWEFVEYERMVYLDADIQVFENIDGLFELEKGYFYAVMDCFCEKTWSHTPQYRIGYCQQCPDKVAWPAATAELGPPPSLYFNAGMFVHEPSVATAKALLDTLRVTPPTPFAEQDFLNMFFRDQYRPIPNVYNLVLAMLWRHPENVQLEKVKVVHYCAAGSKPWRFTGKEANMDREDINALVNKWWDIYNDETLDLKGLPSLSPDDDDEVEAVAKKPLRAALAEAGTVKYVTAPSAA

SEQ ID NO: 140845 - DNA, 1514 bp, Zea mays subsp. mays
  CDS (127)..(1164)
  misc_feature (230)..(230): n is a, g, c or t
aatcgcaagctcaagcaaaaacacaaagcgcttaaaccacactcaaaccaaccgccaacaaacaggcctcctagtcccgaccagaacttgctcgtagccccgcccccgagaacccgacagcgcgagatggctcccgagctgatgacagccaagatgaccgccaaggccgcggcggcggcggcggcggtgaagcctgccacgagggcgtacgtgacgttccttgcgggcgncggcgactactggaagggcgtggtggggctggccaagggcctgcgcaaggtccgctcggcctaccccctggtggtggcggtgctgcccgacgtgcccgagtcccaccgccgcatcctcgtctcgcagggctgcgtcgtccgcgagatcgagcccgtgtacccgcctgagaaccagacgcagttcgccatggcgtactacgtcatcaactactccaagctccgcatctgggagttcgtggagtacgagaggatggtgtacctggacgcggacatccaggtgttcgagaacatcgacggcctgttcgagctcgagaaggggtacttctacgcggtgatggactgcttctgcgagaagacgtggagccacaccccgcagtacaggatcggctactgccagcagtgcccggacaaggtggcgtggccagcggcgaccgccgagctgggccctccgccgtcgctctacttcaacgccggcatgttcgtgcacgagcccagcgtggccaccgccaaggcgctcctcgacaccctccgcgtgactccgcccacccccttcgcagagcaggacttcctgaacatgttcttcagggatcagtacaggccgatccccaacgtgtacaacctcgtgctggccatgctctggaggcaccccgagaacgtgcagctggagaaggtgaaggtcgtgcactactgcgcggcggggtccaagccgtggaggttcacgggcaaggaggcgaacatggacagggaggacatcaacgccctggtgaacaagtggtgggacatctacaacgacgagacgctggacttgaagggcctgccctcgctctcgcccgacgacgacgacgaggtggaggcggtggccaagaagccgcttcgcgcggccctggcggaggccggcacggtcaagtacgtcaccgcgccctcggccgcgtgatcccgtgctctggccttcccccaccgcgcaccgtaccggtggccgcgcgctatagcttgtgtgtgtgtggccatcgcggaacataagaagaatctctcactataaaggccttcgttctgtgtttgcattttggttttggattagggtgtctaatttttcaccagttccttttccccttgtgtaagtgtggagcttactatatagctagcgcccatttcaaggtgctgcaagcgttggtcaggaattgggctagagtgtttgtcctgtaccgagggattatgtgtatttttgctatttcgctcggtaaattaatacaataataaaaaatagggagccgcaaaattatggcc

SEQ ID NO: 140846 - protein, 345 aa, Zea mays subsp. mays
  misc_feature (35)..(35): The Xaa at location 35 stands for Ala, Asp, Gly, or Val.
MAPELMTAKMTAKAAAAAAAVKPATRAYVTFLAGXGDYWKGVVGLAKGLRKVRSAYPLVVAVLPDVPESHRRILVSQGCVVREIEPVYPPENQTQFAMAYYVINYSKLRIWEFVEYERMVYLDADIQVFENIDGLFELEKGYFYAVMDCFCEKTWSHTPQYRIGYCQQCPDKVAWPAATAELGPPPSLYFNAGMFVHEPSVATAKALLDTLRVTPPTPFAEQDFLNMFFRDQYRPIPNVYNLVLAMLWRHPENVQLEKVKVVHYCAAGSKPWRFTGKEANMDREDINALVNKWWDIYNDETLDLKGLPSLSPDDDDEVEAVAKKPLRAALAEAGTVKYVTAPSAA

SEQ ID NO: 140847 - DNA, 1514 bp, Zea mays subsp. mays; identical to SEQ ID NO: 140845
  CDS (142)..(1164)
  misc_feature (230)..(230): n is a, g, c or t

SEQ ID NO: 140848 - protein, 340 aa, Zea mays subsp. mays
  misc_feature (30)..(30): The Xaa at location 30 stands for Ala, Asp, Gly, or Val.
MTAKMTAKAAAAAAAVKPATRAYVTFLAGXGDYWKGVVGLAKGLRKVRSAYPLVVAVLPDVPESHRRILVSQGCVVREIEPVYPPENQTQFAMAYYVINYSKLRIWEFVEYERMVYLDADIQVFENIDGLFELEKGYFYAVMDCFCEKTWSHTPQYRIGYCQQCPDKVAWPAATAELGPPPSLYFNAGMFVHEPSVATAKALLDTLRVTPPTPFAEQDFLNMFFRDQYRPIPNVYNLVLAMLWRHPENVQLEKVKVVHYCAAGSKPWRFTGKEANMDREDINALVNKWWDIYNDETLDLKGLPSLSPDDDDEVEAVAKKPLRAALAEAGTVKYVTAPSAA

SEQ ID NO: 140849 - DNA, 1510 bp, Zea mays subsp. mays
  CDS (160)..(1188)
gcacgagaccattacctagaacatcctaatcgaaaaaagcgaaagctcaagcaaatacaagctctcagttagaccacactcaaaccagccacggacagcctcaaaatcccgagcaggagctcgctcgtagccccgagaacccgaaagctctgcagcgagatgtctcccgagctgaccggcaagatggccgccaaggccgccgccgccgctgcggcggtgaagcccgcgacgagggcgtacgtgacgttcctggcgggcgacggcgactactggaagggcgtggtgggcctggccaagggcctgcgcaaggtcggctcggcctatcccctggtggtggcccttctgcccgacgtgccggagtcccaccgccgcatcctcgtctcgcagggctgcatcctccgcgagatcgagcccgtgtacccgcctgagaaccagacgcagttcgccatggcgtactacgtcatcaactactccaagctccgcatctgggagttcgtggagtacgagaggatggtgtacctggacgcggacatccaggtgttcgagaacatcgacgagctgttcgagctcgagaaggggtacttctacgcggtgatggactgcttctgcgagaagacgtggagccacaccccgcagtacaggatcggctactgccaacagtgcccggacaaggtggcgtggccgaccaccgagctgggccctccgcccccgctctacttcaacgccggcatgttcgcgcacgagcccagcatggccaccgccaaggcactcctcgacaccctccgcgtcactccgcccacccccttcgcagagcaggacttcctgaacatgttcttcagggaccagtacaggccgatccctaacgtgtacaacctcgtgctcgccatgctctggaggcaccccgagaacgtccagctggagaaggtgaaggtcgtgcactactgcgcggcggggtccaagccgtggaggttcacgggcaaggaggccaacatggacagggaggacatcaagacgctggtgaacaagtggtgggacatctacaacgacgaggcactggacttcaagggcctgcccctctcgcccgccgacgccgacgacgaggtggaggcggtggccaagaagccgctccgcgcggcgctggcggaggccggcacggtcaagtacgtcaccgcgccctcggccgcgtgacaccgtgcttcggcttcccgccggtggccgcgctatggcttttgcgcggtcctcacaagtccgtaaagaagaatctcactataaggcctttgttttgaattttgtttatgaattagggtgtctaattttggatcagttcctttcccttgtgtgtctatttagggtgtgagcttatatatatatagtaccaattcaaggtgcaagcgttcgtcaggaattgggctttatgaatacgcccttcggtcacagctagagtatttgtcctgtaccgagggattatgtgtattttgcttggtgaattaatatataaaatacgaagccg

SEQ ID NO: 140850 - protein, 342 aa, Zea mays subsp. mays
MSPELTGKMAAKAAAAAAAVKPATRAYVTFLAGDGDYWKGVVGLAKGLRKVGSAYPLVVALLPDVPESHRRILVSQGCILREIEPVYPPENQTQFAMAYYVINYSKLRIWEFVEYERMVYLDADIQVFENIDELFELEKGYFYAVMDCFCEKTWSHTPQYRIGYCQQCPDKVAWPTTELGPPPPLYFNAGMFAHEPSMATAKALLDTLRVTPPTPFAEQDFLNMFFRDQYRPIPNVYNLVLAMLWRHPENVQLEKVKVVHYCAAGSKPWRFTGKEANMDREDIKTLVNKWWDIYNDEALDFKGLPLSPADADDEVEAVAKKPLRAALAEAGTVKYVTAPSAA

SEQ ID NO: 140851 - DNA, 1510 bp, Zea mays subsp. mays; identical to SEQ ID NO: 140849
  CDS (184)..(1188)

SEQ ID NO: 140852 - protein, 334 aa, Zea mays subsp. mays
MAAKAAAAAAAVKPATRAYVTFLAGDGDYWKGVVGLAKGLRKVGSAYPLVVALLPDVPESHRRILVSQGCILREIEPVYPPENQTQFAMAYYVINYSKLRIWEFVEYERMVYLDADIQVFENIDELFELEKGYFYAVMDCFCEKTWSHTPQYRIGYCQQCPDKVAWPTTELGPPPPLYFNAGMFAHEPSMATAKALLDTLRVTPPTPFAEQDFLNMFFRDQYRPIPNVYNLVLAMLWRHPENVQLEKVKVVHYCAAGSKPWRFTGKEANMDREDIKTLVNKWWDIYNDEALDFKGLPLSPADADDEVEAVAKKPLRAALAEAGTVKYVTAPSAA

SEQ ID NO: 140853 - DNA, 1440 bp, Triticum aestivum
  CDS (94)..(1113)
atcagaaatccaaagccaaaaaccactctctaaacccgacacaaaaactcaagcccgaacccaagaaagcttccttcccgagacgagatcaagatggctcccgagctggccggcaagatgaccgccaaggccgccgtggcggcggccaagcccgcgacgaaggcgtacgtgacgttcctggcgggggcgggggactactggatgggcgtggtggggcttgccaagggcctgcgcaaggttgggtcggcctacccgctggtggtggccgtgctgcccgacgtgcccgagctccaccgcaagatcctcgtctcccagggctgcatcgtccgcgagatcgctcccgtgtacccgcccgagaaccacacccagtttgccatggcctactacgtcatcaactactccaagctccgcatctgggagtttgtggagtacgagaggatggtgtacctcgacgccgacatccaggtgttcgacaacatcgacgagttgtttgatctgcccaaggggcatttctacgccgtgatggactgcttctgcgagaagacgtggagccacaccccgcagtaccagatcggctactgccagcagtgtcccgacaaggtgacgtggccggccgccgagatgggcccgccgccggcgctctacttcaacgccggcatgttcgtgcacgagcccagcatggccaccgccaaggcgctccttgacaccctccgcgtgacgccgacgaccccattcgcggagcaggatttcctcaacatgttcttcagggagcagtacaagccgatcccgctggtctacaaccttgttctggcgatgctctggaggcacccggagaacgtgcagctggagaaggtcaaggtggtgcactactgcgctgcgggatcgaagccatggaggttcacgggcaaagaggagaacatggacagggaggacatcaagatcctcgccaggaactggtgggacatctacaacgacgagagcctcgatttcaagggcctgcccgccctggccgccgacgccgacgagctcgaggcggcggccaagaagccgctccgcgcggcgcttgcggaagccggcaccgtcaagtacgtcaccgcgccctcggctgcgtgatccccggttgcctagctccggcccgtgccactgtggtcatcaaagcaggaagccgggcacctataagcatttgcattttggtattttgcgtctgttcggttccaagttagcagtatcatttcaagtttaagataggatcgaaagagtccacgtatgtgaatatcctcgaccctttgtgaagtagagtgctgagtcgtcctgtatgaaagaattatgtgtgaatcaataggaagctttaaaaattatggcatatatttttcacgtcaaaaaaaaaaaaaaaaaaaaaaaaggagggggggggagggaaaaaaaaaaaaaaaagagctt

SEQ ID NO: 140854 - protein, 339 aa, Triticum aestivum
MAPELAGKMTAKAAVAAAKPATKAYVTFLAGAGDYWMGVVGLAKGLRKVGSAYPLVVAVLPDVPELHRKILVSQGCIVREIAPVYPPENHTQFAMAYYVINYSKLRIWEFVEYERMVYLDADIQVFDNIDELFDLPKGHFYAVMDCFCEKTWSHTPQYQIGYCQQCPDKVTWPAAEMGPPPALYFNAGMFVHEPSMATAKALLDTLRVTPTTPFAEQDFLNMFFREQYKPIPLVYNLVLAMLWRHPENVQLEKVKVVHYCAAGSKPWRFTGKEENMDREDIKILARNWWDIYNDESLDFKGLPALAADADELEAAAKKPLRAALAEAGTVKYVTAPSAA

SEQ ID NO: 140855 - DNA, 1440 bp, Triticum aestivum; identical to SEQ ID NO: 140853
  CDS (118)..(1113)

SEQ ID NO: 140856 - protein, 331 aa, Triticum aestivum
MTAKAAVAAAKPATKAYVTFLAGAGDYWMGVVGLAKGLRKVGSAYPLVVAVLPDVPELHRKILVSQGCIVREIAPVYPPENHTQFAMAYYVINYSKLRIWEFVEYERMVYLDADIQVFDNIDELFDLPKGHFYAVMDCFCEKTWSHTPQYQIGYCQQCPDKVTWPAAEMGPPPALYFNAGMFVHEPSMATAKALLDTLRVTPTTPFAEQDFLNMFFREQYKPIPLVYNLVLAMLWRHPENVQLEKVKVVHYCAAGSKPWRFTGKEENMDREDIKILARNWWDIYNDESLDFKGLPALAADADELEAAAKKPLRAALAEAGTVKYVTAPSAA

SEQ ID NO: 140857 - DNA, 1005 bp, Arabidopsis thaliana; identical to SEQ ID NO: 140841
  CDS (28)..(1005)

SEQ ID NO: 140858 - protein, 325 aa, Arabidopsis thaliana
MYLSEKAHQAPPRRAYVTFLAGNGDYVKGVVGLAKGLRKVKSAYPLVVAMLPDVPEEHREILRSQGCVVREIEPVYPPDNQVEFAMAYYVLNYSKLRIWNFEEYSKMIYLDADIQVFDNIDHLFDLSDAYFYAVMDCFCEKTWSHSLQYSIGYCQQCPEKVTWPEDMESPPPPLYFNAGMFVFEPSPLTYESLLQTLEITPPSPFAEQDFLNMFFEKVYKPIPLVYNLVLAMLWRHPENVELEKVKVVHYCAAGSKPWRYTGEEANMDREDIKMLVDKWWDVYNDESLDFKSKIPADAEETVTKSSILASVLEPEMTYFPAPSAA

SEQ ID NO: 140859 - DNA, 1147 bp, Gossypium hirsutum
  CDS (90)..(1103)
gcttataactgtaagagctctcttcagtcctcctccatcagtgatctcaatctccatcctatatatctcaccaagtaacacacactctcatggctcctgaactggttcaagcaggtgttaaaccaactgtgttggctaaaccagtcaccttgcccaagcgagcttacgttaccttcttggctggcgatggagattacgtgaaaggcgttgtagggttagccaaagggttaaggcaggtgaaatccgcataccctttagtggttgccgttttgcccgacgttcccgaggagcacaggcggatcctggagaaccaggggtgtatcgtccgagagatcgaacccgtttacccgcccgagaatcagacccagttcgccatggcttactacgtcatcaactattccaagctccgtatttggaagttcgtggagtacagtaagatgatatacctggacggggatattcaggtgtacgagaatattggcctcctattcgacttgcctgacgggcaattctatgcagtaatggactgtttctgtgagaaaacgtggagtcataccccacaattcaagatcggttactgccaacagtgccctgacaaggtcaagtggcccgccgagatgggtcagccacctgcactttacttcaatgctggcatgtttgtgtttgagcccagtcttaccacctatgaaaacctcttggctactcttaaaagcacccctcctaccccatttgccgagcaggactttttgaacatgtactttaaggacatttacaaaccaattcctttggtctacaacctggttctcgccatgttatggcgtcatcccgacaacgtggagcttgacaaagtgaaggttgttcactactgtgcagcgggatcgaagccatggaggtacacagggaaagaagagaacatgcaaagagaagacgtgaagatgttggttcagaaatggtgggatatttacaacgacgagtctcttgattacgaaaaaccaaccattggtgaaggacaggcggcagagccggtgaacatgcagccgttcctggtggcactctcagaagctggtgcagtccaatacgtaacggccccatcagcggcttaataataaacaacatggccagctctgttttagaagaacaacgatcc

SEQ ID NO: 140860 - protein, 337 aa, Gossypium hirsutum
MAPELVQAGVKPTVLAKPVTLPKRAYVTFLAGDGDYVKGVVGLAKGLRQVKSAYPLVVAVLPDVPEEHRRILENQGCIVREIEPVYPPENQTQFAMAYYVINYSKLRIWKFVEYSKMIYLDGDIQVYENIGLLFDLPDGQFYAVMDCFCEKTWSHTPQFKIGYCQQCPDKVKWPAEMGQPPALYFNAGMFVFEPSLTTYENLLATLKSTPPTPFAEQDFLNMYFKDIYKPIPLVYNLVLAMLWRHPDNVELDKVKVVHYCAAGSKPWRYTGKEENMQREDVKMLVQKWWDIYNDESLDYEKPTIGEGQAAEPVNMQPFLVALSEAGAVQYVTAPSAA

SEQ ID NO: 140861 - DNA, 1464 bp, Gossypium hirsutum
  CDS (117)..(1127)
gctccctcgccctccgaccccagcaaaggcagtccctaaaatcttgctctcttcactcctcctattttaaccatttcttccttgtcctcgccccttccctagcaagctacatttccatggccccccctgaattggttcaacccagtgataaaacaaacgttttcgctaaacaagtcagtttgcgtaatcgtgcatatgttacgttcttggccggaaatggggactacgtgaaaggcgttgtagggttagccaaagggttaaggaaagtgaaatcggcgtaccctttagtggttgccgttttacccgacgtgcctgaggagcataggcggatcctggagaaccagggttgtatcgtccgagagatcgaaccagtttacccgcctgagaaccagacccagttcgccatggcctattacgtcatcaattactccaagcttcgtatttgggagttcgtggagtacagtaaaatgatatacttggacggcgacattcaggtatacgacaacatcgatcacctgtttgatctgcctgatgggcatttctacgcagtaatggattgcttctgtgagaaaacatggagccacaccccacaatacaggatcggttactgccaacaatgccctgacatggtgaagtggcccgccgagatgggaaatccccctgcactttacttcaatgctggcatgttcgtgtttgagcccagccttgtgacttatgaatctctcttgaagactctcaaaatcacacaacctaccccatttgcggagcaggactttttgaaaatgttctttaaggacatttacaagccgattcctttaatttacaaccttgctctcgccatgtcatggcgtcatcccgagaatgtggagcttgaaaaagtgaaagttgttcactactgtgctgcgggatctaagccttggaggtacacagggaaggaggctaacatgcaaagagaagacattaagatgcttgttcagaaatggtgggacatttacaacgacgagtcacttgattaccgtaccagcgcggctgaaggagggacagagaccgtgaacctgcaaccgttcctggtggcactctctgaagttggtgcagtccatttcgtggccgccccatctgcggcgtaaatatgttgtgtaacgacgataaataccagttcataggtgtaaagaaatattgtaagaatcgagaaaggggcgatcctatgtggaaaacaaaggtggttttaaacaagggttggggaattggtgaaacgctcttagggggttttaaaactatttagggcgttgttttttcttgatgaatggtgatgaaggtcgagtgtggggtcaaagtgggtgtctgtttattgtgtggctctggcaaaaagtcttgctgataaaatgtctttggggtctggggccttcggcatcggtgactttcggcaattgtgacatgaaaatagaaaacaagtttgtgaattcc

SEQ ID NO: 140862 - protein, 336 aa, Gossypium hirsutum
MAPPELVQPSDKTNVFAKQVSLRNRAYVTFLAGNGDYVKGVVGLAKGLRKVKSAYPLVVAVLPDVPEEHRRILENQGCIVREIEPVYPPENQTQFAMAYYVINYSKLRIWEFVEYSKMIYLDGDIQVYDNIDHLFDLPDGHFYAVMDCFCEKTWSHTPQYRIGYCQQCPDMVKWPAEMGNPPALYFNAGMFVFEPSLVTYESLLKTLKITQPTPFAEQDFLKMFFKDIYKPIPLIYNLALAMSWRHPENVELEKVKVVHYCAAGSKPWRYTGKEANMQREDIKMLVQKWWDIYNDESLDYRTSAAEGGTETVNLQPFLVALSEVGAVHFVAAPSAA

SEQ ID NO: 140863 - DNA, 1265 bp, Cucurbita pepo; Burpee's hybrid
  CDS (33)..(1025)
  misc_feature (1183)..(1183): s is g or c
  misc_feature (1184)..(1184): w is a or t
  misc_feature (1186)..(1186): s is g or c
  misc_feature (1187)..(1187): r is g or a
  misc_feature (1188)..(1188): y is t or c
  misc_feature (1189)..(1189): k is g or t
  misc_feature (1190)..(1190): r is g or a
  misc_feature (1192)..(1192): w is a or t
  misc_feature (1193)..(1193): w is a or t
  misc_feature (1194)..(1194): y is t or c
  misc_feature (1195)..(1195): m is a or c
  misc_feature (1196)..(1196): m is a or c
  misc_feature (1197)..(1197): k is g or t
  misc_feature (1199)..(1199): y is t or c
  misc_feature (1200)..(1200): w is a or t
  misc_feature (1201)..(1201): s is g or c
  misc_feature (1202)..(1202): y is t or c
  misc_feature (1203)..(1203): w is a or t
  misc_feature (1204)..(1204): w is a or t
  misc_feature (1205)..(1205): m is a or c
ggcacgagtgttgttccacccacataatcaatatgtctccggctgccaccgaaactgccatcgagtcgaccgatgcccccaagagggcattcgtgacgttcttggccggtaatggagactattggaaaggtgtggttggattggcaaagggtctcagaaaggtcaagaccgtctaccctctcattgtagctgtcctgcctgatgttcccgaagaccatcgccagattctcgagtatcagggatgcatcgtccgagaaatcgagcctgtttacccccctgcaaaccagactcaatttgcgatggcatactatgttatcaactactcaaagcttaggatttgggagttcgtggagtatgagaagctgatatatttggatggggacattcaagtgtttgagaacatcgatcatctgttcgaaatgccaaatggatacttctacgccgtgatggactgcttctgtgagaagacatggagtaactcaccgcagtacaagattggttactgccagcaatgccctgacaaagtcaagtggcctgttgaggaaatgggaaacccaccccctctttacttcaacgccggattttttgtgtatgaacccgacctcttcacctacaaggatcttctcgaaacttgcaaggccaccactccaaccttgtttgctgagcaggactttctgaacatgtacttcaacgacatttacaaacccattcctcccatttacaacctcgtcatggccatgttgtggcgtcatcccgagaacatcgacgtagacaaagtcaaagttgtccactactgtgcggcgggatcaaagccgtggaggtacacaggagaggaagagaacatggacagagaagacataaaaatgttggtgaagaaatggtgggaggtttatgaagatgaatctttggactaccaaaatgttatcaaatctgaaaccaaagaagcaaccaacgtcgcgcctttggtctccgtgttgtcggaggctgaagttgtcaaccatattacagctccttctgctgcttaaattatatatacatatatatatatatatatatagataatatgtatgagtgtttgtggtgtgaggccaaatagtattattattattaagcttattattattatgtacggtagctcaggtgggggttgttttgtcctttgtgcatgcaactcccaaccttswtsrykrcwwymmktywsywwmcaaattttatgaataaccctgcttttatgtgtctttctaaaaaaaaaaaaaaaaaaaaaa

SEQ ID NO: 140864 - protein, 330 aa, Cucurbita pepo; Burpee's hybrid
MSPAATETAIESTDAPKRAFVTFLAGNGDYWKGVVGLAKGLRKVKTVYPLIVAVLPDVPEDHRQILEYQGCIVREIEPVYPPANQTQFAMAYYVINYSKLRIWEFVEYEKLIYLDGDIQVFENIDHLFEMPNGYFYAVMDCFCEKTWSNSPQYKIGYCQQCPDKVKWPVEEMGNPPPLYFNAGFFVYEPDLFTYKDLLETCKATTPTLFAEQDFLNMYFNDIYKPIPPIYNLVMAMLWRHPENIDVDKVKVVHYCAAGSKPWRYTGEEENMDREDIKMLVKKWWEVYEDESLDYQNVIKSETKEATNVAPLVSVLSEAEVVNHITAPSAA

SEQ ID NO: 140865 - DNA, 1406 bp, Glycine max; Cultivar Wye
  CDS (139)..(1125)
  misc_feature (1275)..(1275): k is g or t
  misc_feature (1276)..(1276): k is g or t
  misc_feature (1277)..(1277): k is g or t
  misc_feature (1278)..(1278): k is g or t
  misc_feature (1322)..(1322): s is g or c
  misc_feature (1323)..(1323): r is g or a
gtttgttttcaaagtgtgttttgtttcccaaatcctactcttgtgaccacaacccttcctcctctttcttttgaaacctctttttttctattccccaaccaaacaagcaaacgctactcactcatcatcactgagatcatggctcctaatatcaccactgtcaaaaccaccatcaccgacgctcaagccaaggtcgccaccgatcatggtcgtgcctacgtcaccttcctcgccggaaacggtgactatgtgaaaggtgtcgttggcttggcaaaaggtctgagaaaagtgaagagcatgtaccctctggtggttgcagtgctacccgatgttccccaagatcaccgcaacattctcacctcccaaggttgcattgttagagagattgagcccgtgtaccccccagagaatcaaacccagtttgccatggcatattacgtcatcaactattccaagctacgtatttgggagtttgtggagtacagcaagatgatatacctagacggtgatatccaagtttttgacaacattgaccacttgtttgacttgcctgataactacttctatgcggtgatggactgtttctgtgagccaacttggggccacactaaacaatatcagatcggttactgccagcagtgcccccataaggttcagtggcccactcactttgggcccaaacctcctctctatttcaatgctggcatgtttgtgtatgagcccaatttggctacttaccgtgacctccttcaaacagtccaagtcacccagcccacttcctttgctgaacaggattttttgaacatgtacttcaaggacaaatataggccaattcctaatgtctacaatcttgtgctggccatgctgtggcgtcaccctgagaacgttgagcttgacaaagttaaagtggttcactactgtgctgctgggtctaagccttggaggtacactgggaaggaggagaatatggagagagaagatatcaagatgttagtgaaaaagtggtgggatatatatgaggatgagactttggactacaacaatccactcaatgtggataagttcactgcggcacttatggaggttggtgaagtcaagttcgtccgtgccccatctgctgcttaagagtgtctttggaaatcaagtgtgatccaagtacatgtacaaagtcatacatcattacattaacttttatgtatttctaaaagtcatacatcattacattaagttttatgtatttctaaagtcttaagacttaagaggaccttttttatkkkkcccgcttttctttttttctttttccaattctgtcattgtaaagsrgagaataccgtatccttaattttataaatggatatgaattttatttgtactaaagggggggccggtaccaattcgcctatagt

SEQ ID NO: 140866 - protein, 328 aa, Glycine max; Cultivar Wye
MAPNITTVKTTITDAQAKVATDHGRAYVTFLAGNGDYVKGVVGLAKGLRKVKSMYPLVVAVLPDVPQDHRNILTSQGCIVREIEPVYPPENQTQFAMAYYVINYSKLRIWEFVEYSKMIYLDGDIQVFDNIDHLFDLPDNYFYAVMDCFCEPTWGHTKQYQIGYCQQCPHKVQWPTHFGPKPPLYFNAGMFVYEPNLATYRDLLQTVQVTQPTSFAEQDFLNMYFKDKYRPIPNVYNLVLAMLWRHPENVELDKVKVVHYCAAGSKPWRYTGKEENMEREDIKMLVKKWWDIYEDETLDYNNPLNVDKFTAALMEVGEVKFVRAPSAA

SEQ ID NO: 140867 - DNA, 1342 bp, Glycine max
  CDS (107)..(1099)
aaacaaccaacctcttcagtgatctttgattagtactaagctaaaccatttcttattccctcaaaatcaaaacctttttctttctagctatttcccttttcaaatcatgccacctaacatcaccaccgttgttgccaatgtcaccaccgagcaattacccaaggctcgtggaggaagtgggcgtgccttcgtgacctttcttgctgggaacggtgattacgtaaagggtgtcgtgggtttggccaaaggactgagaaaggccaaaagcatgtaccctttggtggttgctgtgttaccagatgttcctgaacaacatcgtgagattctcaaatcccaaggttgcattgtcagggagattgaacctgtgtaccctcctgagaaccagacccagttcgccatggcctattatgtcatcaattactccacgctacctatttgggatttcgtggactacaacaacaccatatacctagacggtgacctccaactatttggaaccataaaccacttgtttgatctgcctgataattatttctatgcggtgatggattgtttctgcgacaacacccggaaccagacccctcagttccagattgggtactgccaacagtgccctgataaggttcaatgggcctctcactttggttccaaacctcctctatatttcaatgctggcatgtttgtttatgaacctaatctcgacacctaccgtgatcttctccaaactgtccaactcaccaagcccacttcttttgctgagcaggactttctcaacatgtacttcaaggacaagtacaagccaataccgaacatgtacaaccttgtgctggccatgttgtggcgtcaccctgaaaatgttgaacttgataaagttcaagtggttcattactgtgctgctgggtctaagccttggaggttcactgggaaggaagagaacatggatagggcagatatcaagatgcttgtgaagaagtggtgggacatatatgaagatgagacactggactacaataacaactctgtcaacgtggaacgtttcacatcggcactattggatgctgggggctttcagtttgtgccagcaccttctgctgcctaatatgcttattatttacagctacacattaatgttaattaacgacaaagtatatgtattgttatttgctttttttcgtttttgggtcttatatatgaaggaacaacgtttatggttttaatttggatgaccttcttgtatacaaagccacatgtgatctcatacagcttttgattattattaagaaattagaggaccttttattatgagtcctttacttaaaaaaaaaaaaacacaaaaaaaaaa

SEQ ID NO: 140868 - protein, 330 aa, Glycine max
MPPNITTVVANVTTEQLPKARGGSGRAFVTFLAGNGDYVKGVVGLAKGLRKAKSMYPLVVAVLPDVPEQHREILKSQGCIVREIEPVYPPENQTQFAMAYYVINYSTLPIWDFVDYNNTIYLDGDLQLFGTINHLFDLPDNYFYAVMDCFCDNTRNQTPQFQIGYCQQCPDKVQWASHFGSKPPLYFNAGMFVYEPNLDTYRDLLQTVQLTKPTSFAEQDFLNMYFKDKYKPIPNMYNLVLAMLWRHPENVELDKVQVVHYCAAGSKPWRFTGKEENMDRADIKMLVKKWWDIYEDETLDYNNNSVNVERFTSALLDAGGFQFVPAPSAA

SEQ ID NO: 140869 - DNA, 1151 bp, Glycine max
  CDS (71)..(1090)
ctaagctctcttttagtcttactcacaaacacttttttcactgcttccattacgaacatatatttattatatggctcctgaacttgtccccaccgttgtgaaatccagtgctgcgttcacgaaacccgcgacccttccaaggcgtgcctacgtgacattcctcgccggaaacggtgactacgtgaaaggggtggttggcctcgccaaagggttgcgaaaggtgaaaaccgcgtacccgttggtggtggctgtcctccccgatgtgccggaggagcaccgtaagatcctggagtctcagggctgcatcgttcgcgagatcgaacccgtttacccacccgaaaaccaaacccagtttgccatggcttattacgtcatcaactactccaagctccgtatatgggagtttgtggagtacagcaagatgatatacttggacggagacattgaggtatatgagaacatagaccacctatttgacctacctgatggtaacttttacgctgtgatggattgtttctgcgagaagacatggagtcacacccctcagtacaaggtgggttactgccagcaatgcccggagaaggtgcggtggcccaccgaattgggtcagcccccttctctttacttcaacgctggcatgttcgtgttcgaacccaacatcgccacctatcatgacctattgaaaacggtgcaagtcaccactcccacctcgttcgctgaacaagatttcttgaacatgtacttcaaggacatttacaagccaatccctttaaattacaatcttgtcctcgccatgctgtggcgccacccggaaaacgttaaattagaccaagtcaaggttgttcactattgcgcagcggggtccaagccatggagatatacggggaaggaagagaatatgcagagggaggacataaagatgctggtgaagaaatggtgggatatctacaatgatgcttcgcttgactacaagccattgatgaatgcaagtgaagctccagcagcggatggtgttgacattgaacaattcgtgcaggctctatcagaggttggtcatgttcaatatgtcaccgcgccttcagcagcttaattaagagggcacattcaaatcacgacaaaaaacaaccaagtgaaaaaaaaaaaaaaaaaaa

SEQ ID NO: 140870 - protein, 339 aa, Glycine max
MAPELVPTVVKSSAAFTKPATLPRRAYVTFLAGNGDYVKGVVGLAKGLRKVKTAYPLVVAVLPDVPEEHRKILESQGCIVREIEPVYPPENQTQFAMAYYVINYSKLRIWEFVEYSKMIYLDGDIEVYENIDHLFDLPDGNFYAVMDCFCEKTWSHTPQYKVGYCQQCPEKVRWPTELGQPPSLYFNAGMFVFEPNIATYHDLLKTVQVTTPTSFAEQDFLNMYFKDIYKPIPLNYNLVLAMLWRHPENVKLDQVKVVHYCAAGSKPWRYTGKEENMQREDIKMLVKKWWDIYNDASLDYKPLMNASEAPAADGVDIEQFVQALSEVGHVQYVTAPSAA

SEQ ID NO: 140871 - DNA, 1350 bp, Glycine max
  CDS (114)..(1106)
gcacgagaaacaaccaacctcttcagtgatctttgattagtactaagctaaaccatttcttattccctcaaaatcaaaacctttttctttctagctatttcccttttcaaatcatgccacctaacatcaccaccgttgttgccaatgtcaccaccgagcaattacccaaggctcgtggaggaagtgggcgtgccttcgtgacctttcttgctgggaacggtgattacgtaaagggtgtcgtgggtttggccaaaggactgagaaaggccaaaagcatgtaccctttggtggttgctgtgttaccagatgttcctgaagaacatcgtgagattctcaaatcccaaggttgcattgtcagggagattgaacctgtgtaccctcctgagaaccagacccagttcgccatggcctattatgtcatcaattactccaagctacgtatttgggagttcgtggagtacaagaagacgatatacctagacggtgacatccaagtatttggaaacatagaccacttgtttgatctgcctgataattatttctatgcggtgatggattgtttctgcgagaagacttggagccacacccctcagttccagattgggtactgccaacagtgccctgataaggttcaatggccctctcactttggttccaaacctcctctatatttcaatgctggcatgtttgtttatgagcctaatctcgacacctaccgtgatcttctccaaactgtccaactcaccaagcccacttcttttgctgagcaggactttctcaacatgtacttcaaggacaagtacaagccaataccgaacatgtacaaccttgtgctggccatgttgtggcgtcaccctgaaaatgttgaacttgataaagttcaagtggttcattactgtgctgctgggtctaagccttggaggttcactgggaaggaagagaacatggatagggaagatatcaagatgcttgtgaagaagtggtgggacatatatgaagatgagacactggactacaataacaactctgtcaacgtggaacgtttcacatcggcactattggatgctgggggctttcagtttgtgccagcaccttctgctgcctaatatgcttattatttacagctacaaattaatgttaattaacgacaaagtatatgtattgttatttgctttttttcgtttttgggtcttatatatgaaggaacaacgtctatggttttaatttggatgaccttcttgtatacaaagccacatgtgatctcatacagcttttgattattattaagaaattagaggaccttttattatgagtcctttacttaaaaaaaaaaaaaaaaaaaaaaaaaaa

SEQ ID NO: 140872 - protein, 330 aa, Glycine max
MPPNITTVVANVTTEQLPKARGGSGRAFVTFLAGNGDYVKGVVGLAKGLRKAKSMYPLVVAVLPDVPEEHREILKSQGCIVREIEPVYPPENQTQFAMAYYVINYSKLRIWEFVEYKKTIYLDGDIQVFGNIDHLFDLPDNYFYAVMDCFCEKTWSHTPQFQIGYCQQCPDKVQWPSHFGSKPPLYFNAGMFVYEPNLDTYRDLLQTVQLTKPTSFAEQDFLNMYFKDKYKPIPNMYNLVLAMLWRHPENVELDKVQVVHYCAAGSKPWRFTGKEENMDREDIKMLVKKWWDIYEDETLDYNNNSVNVERFTSALLDAGGFQFVPAPSAA

SEQ ID NO: 140873 - DNA, 1417 bp, Glycine max
  CDS (213)..(1187)
ccaagatcttaaaatatctcttccatacaagtttgttttcaaagtgtttttgtctcccaaatcctactcttgtgaccacaagccttcacttcactctctctctctctctctctctctctctctctctctctctctcttttttgaaacccttttttctcttctcaaaccaaaccaagcaagcaattatattacactactcactcactgagaccatggctcctaatatcaccaccgtcaccgacgctcaagccaaggccgccggcgggcgtggccgtgcctacgtcaccttcctcgccggaaacggtgactatgtgaaaggtgtcgttggcttggccaaaggtctgaggaaggtgaaaagcatgtaccctctggtggttgcagtgttacccgatgttccagaacatcaccgaaacattctcacctcccaaggttgcattgttagagaaattgaacccgtgtaccctcctgagaatcagacgcagttcgccatggcatattacgtcatcaactattccaagctacgtatttgggagtttgtggagttcagcaagatgatatacctagacggtgatatacaagtgtttgacaatattgaccacttgtttgacttgcctgataactacttttatgcggtgatggactgtttttgtgagcccacttggggccacactctgcagtatcaaatcggatactgccagcagtgccctcataaggttcagtggcccactcactttgggcccaagcctcctctctatttcaatgctggcatgtttgtttatgagcccaatctggatacctaccgtgacctccttcaaactgtccaagtcactaagcccacttcctttgctgaacaggattttttgaacatgtacttcaaggacaaatataggccaattcctaatgtctataatcttgtgttggccatgctgtggcgtcaccctgagaacgttgagcttgaaaaagttaaagtggttcactactgtgctgctggatctaagccttggaggtacacagggaaggaggaaaatatggagagagaagatatcaagatgttggtgaagaagtggtgggatatatatgaggatgagactttggactacaacaatccattcaacgtggataggttcactgcggcacttttggaggttggtgaagtcaagttcgtccgtgccccatctgctgcttagagtgtctttggaaatcaagtgtgatccaagtacataggataagatatacagacccatacatcattaagttttatgtgtttttaaagtgtttagaggacctttttatgtgtcccttttttcttttttctttttcaattctgccattgtaaagcagtgaaataccatgtccttaattttattattggatatgaattttattttgtacgttctctaaaaaaaaaaaaaaaaaa

SEQ ID NO: 140874 - protein, 324 aa, Glycine max
MAPNITTVTDAQAKAAGGRGRAYVTFLAGNGDYVKGVVGLAKGLRKVKSMYPLVVAVLPDVPEHHRNILTSQGCIVREIEPVYPPENQTQFAMAYYVINYSKLRIWEFVEFSKMIYLDGDIQVFDNIDHLFDLPDNYFYAVMDCFCEPTWGHTLQYQIGYCQQCPHKVQWPTHFGPKPPLYFNAGMFVYEPNLDTYRDLLQTVQVTKPTSFAEQDFLNMYFKDKYRPIPNVYNLVLAMLWRHPENVELEKVKVVHYCAAGSKPWRYTGKEENMEREDIKMLVKKWWDIYEDETLDYNNPFNVDRFTAALLEVGEVKFVRAPSAA

SEQ ID NO: 140875 - DNA, 1526 bp, Sorghum bicolor
  CDS (127)..(1176)
aagcggcacctcaagcaaatccaagcgcttaaaccacactcatcagatcaaccacaaacagcctcccgagcagaactcgctcgtagccccgagaaccaacagccctcctcctccccctgcagcgagatggctcccgagcttgccggcaagatgaccgccaaggccgctgccgccgccgccgccgcggcggtgacgaagcccgcgacgagggcgtacgtgacgttcctggccggcgacggggactactggaagggcgtggtgggcctggccaagggcctgcgcaaggcccgctcggcgtacccgctggtggtggccgtgctgcccgacgtgccggagtcccaccgccgcatcctcgtctcgcagggctgcatcgtccgcgagatcgagcccgtgtacccgcctgagaaccagacgcagttcgccatggcgtactacgtcatcaactactccaagctccgcatctgggagttcgtggagtacgagaggatggtgtacctggacgcggacatccaggtgttcgagaacgtcgacgagctgttcgagctcgagaagggctacttttacgcggtgatggactgcttctgcgagaagacgtggagccacaccccgcagtacaagatcggctactgccagcagtgcccggacaaggtggcgtggccagcaaccgccgagctgggccctccgccggcgctctacttcaacgccggcatgttcgtgcacgagcccagcatggccaccgccaaggcgctcctcgacaccctccgtgtgactccgcccacccccttcgcggagcaggacttcctgaacatgttcttcagggaccagtacaggccgatcccgaacgtgtacaacctcgtgctggccatgctctggaggcaccccgagaacgtgcagctggagaaggtgaaggccgtgcactactgcgcggccgggtcgaagccgtggaggttcacgggcaaggagcccaacatggacagggaggacatcaagatgctggtgaagaagtggtgggacatctacaacgacgagacgctggacttcaagggcctgctgcccctctcgcccgccgacgccgacgccgacgacgaggtggaggcggtggccaagaagccgctgcgcgcggcgctggcggaggccggcacggtcaagtacgtcaccgcgccctcggccgcgtgatcccgtgctctggcttcccaccgccaccggtggccgccgtgctatagcagcttgtgtggtcatcgtcatcgcagaacataagaagaatctcactataaggactttgttttgcattttgttttttgaattagggtgtctaatcttcgatcagttccttgtacttaagtgtgagcttactatatagtaccatttcaaggtgcaagcatgcgttggtcaggaattgcgctttgtgaatacgccctttggtcacagctagagtatttgtcctgtaccgagggattatcattatatgtattttggttggtaaattattaatatatataaaataggaagccgcaaaattatggccg

SEQ ID NO: 140876 - protein, 349 aa, Sorghum bicolor
MAPELAGKMTAKAAAAAAAAAVTKPATRAYVTFLAGDGDYWKGVVGLAKGLRKARSAYPLVVAVLPDVPESHRRILVSQGCIVREIEPVYPPENQTQFAMAYYVINYSKLRIWEFVEYERMVYLDADIQVFENVDELFELEKGYFYAVMDCFCEKTWSHTPQYKIGYCQQCPDKVAWPATAELGPPPALYFNAGMFVHEPSMATAKALLDTLRVTPPTPFAEQDFLNMFFRDQYRPIPNVYNLVLAMLWRHPENVQLEKVKAVHYCAAGSKPWRFTGKEPNMDREDIKMLVKKWWDIYNDETLDFKGLLPLSPADADADDEVEAVAKKPLRAALAEAGTVKYVTAPSAA

SEQ ID NO: 140877 - DNA, 1578 bp, Oryza sativa
  CDS (121)..(1107)
  misc_feature (1509)..(1509): n is a, g, c or t
  misc_feature (1566)..(1566): n is a, g, c or t
agcttgcccgggcaagaagaacaatctggccgcacaccgatcctttgaagcaaattaacatttctcttgcaaatttcgatctagctagatcatttgcaaagcttgtttgttgatcgatcgatgatggggccgaacgtgtcgtcggagaagaaggcgttggcggcggcgaagaggagggcgtacgtgacgttcctggccggcgacggcgactactggaagggcgtcgtggggctcgccaaggggctccgccgcgtccgctcggcgtacccgctggtggtcgccgtgctcccggacgtccccggcgagcaccggcggaagctggtcgagcaggggtgcgtggtccgggagattcagccggtgtacccgccggagagccagacgcagttcgccatggcctactacgtgatcaactactcgaagctccgcatctgggagttcgtggagtacgagcggatggtctacctcgacgccgacatacaggtgttcgacaacatcgaccacctgttcgacctccacaagggcgccttctacgccgtcatggactgcttctgcgagaagacgtggagccacaccccgcagtacgacatcggctactgccagcagcgccccgacaaggtggcgtggccggagcgcgagctcggccccccgccgccgctctacttcaacgccggcatgttcgtccacgagcccggcctcggcaccgccaaggacctgctcgacgcgctcgtcgtcacgccgcccaccccgttcgccgagcaggacttcctcaacatgttcttccgcgaacagtacaagcccatccccaacgtctacaacctcgttctcgccatgctctggaggcacccggagaacgtcgacctcgaccaggtcaaggtcgtccattactgtgcagcgggttcgaagccatggaggttcaccgggaaggaggagaacatgaacagagaagatataaagatgctggtgaagaggtggtgggacatctacaacgacgagagcctcgactacaaggaggaggaggacaacgccgacgaggccagccagccgatgcggacggcgctcgccgaggccggcgccgtcaagtacttcccggcgccctccgccgcgtaggcgcgctcgtcgccggcagtggccgccgtcaagtcttgatagctacaataataattggcgcttattaaggagtgctagctatgattaattaggggacatgatctgcataaacattttagtattgcagatatatcggtcatggtcttacttttgagtgtgtttttttttcttttgtttagtacgagggaacacccaaagtctgtattcagtttgtaaatacgtacgtatatggttggtctaactataaacagatctgcctactatacatgtacgttactgctgatacattttgtagttaataaaggtttttcttctatattaccatagtaaaaaaaaaaaaaaaaaaaaaagggctttggccagtgttgttatttaagtttaggtacgggtgcatgggaggtnataggtgttttttggtgttatgtaaatttaattaagtggtggggggtttataagttngtgattgggaaa

SEQ ID NO: 140878 - protein, 328 aa, Oryza sativa
MMGPNVSSEKKALAAAKRRAYVTFLAGDGDYWKGVVGLAKGLRRVRSAYPLVVAVLPDVPGEHRRKLVEQGCVVREIQPVYPPESQTQFAMAYYVINYSKLRIWEFVEYERMVYLDADIQVFDNIDHLFDLHKGAFYAVMDCFCEKTWSHTPQYDIGYCQQRPDKVAWPERELGPPPPLYFNAGMFVHEPGLGTAKDLLDALVVTPPTPFAEQDFLNMFFREQYKPIPNVYNLVLAMLWRHPENVDLDQVKVVHYCAAGSKPWRFTGKEENMNREDIKMLVKRWWDIYNDESLDYKEEEDNADEASQPMRTALAEAGAVKYFPAPSAA

SEQ ID NO: 140879 - DNA, 1008 bp, Glycine max
  CDS (1)..(1008)
atggctcctgaacttgtccccaccgttgcgttcacgaaacccgcaacccttccaaggcgtgcctacgtgacattcctcgccggaaacggtgactacgtgaaaggggtcgttggtcttgccaaagggttgcgaaaggtgaaaaccgcgtacccattggtggtggcggtcctcccagatgtgccggaggaccaccgtaagatcctggagtctcagggctgcatcgtccgcgagatcgaacccgtttacccgcccgaaaaccaaacccagttcgccatggcttattacgtcattaactactccaagctccgtatatgggagtttgtggaatacaccaagatgatatacttggacggagacattcaggtatatgagaacatagaccacctatttgacctacctggtggttacttttacgctgtgatggattgtttctgcgagaagacatggagtcacacccctcagtacaaggtggggtactgccagcaatgcccggagaaggtgcagtggcccaccgaattgggccagccaccttctctttacttcaacgccggcatgttcgtgttcgagcccagcatcgccacctaccatgacctattaaaaacagtgcaagtcaccactcccacttcgttcgcagaacaagatttcttgaacatgtacttcaaggatatttacaagccaatccctttaaattacaatcttgtccttgccatgctctggcgccacccagaaaatgttaaattagaccaagtcaaggttgttcactattgcgcagcggggtcgaaaccgtggagatatacggggaaggaagagaacatgcagagggaggacataaagatgctggtgaaaaaatggtgggatatctacaatgatgcttcgcttgactacaagccattgatgagtgcaagtgaagctccagcaccggatggtgttgacaatattgaaccattcgtgcaggctctgtcagaggttggtcatgttcaatatgtcactgcgccctcagcagcttaa

SEQ ID NO: 140880 - protein, 335 aa, Glycine max
MAPELVPTVAFTKPATLPRRAYVTFLAGNGDYVKGVVGLAKGLRKVKTAYPLVVAVLPDVPEDHRKILESQGCIVREIEPVYPPENQTQFAMAYYVINYSKLRIWEFVEYTKMIYLDGDIQVYENIDHLFDLPGGYFYAVMDCFCEKTWSHTPQYKVGYCQQCPEKVQWPTELGQPPSLYFNAGMFVFEPSIATYHDLLKTVQVTTPTSFAEQDFLNMYFKDIYKPIPLNYNLVLAMLWRHPENVKLDQVKVVHYCAAGSKPWRYTGKEENMQREDIKMLVKKWWDIYNDASLDYKPLMSASEAPAPDGVDNIEPFVQALSEVGHVQYVTAPSAA

SEQ ID NO: 140881 - DNA, 1035 bp, Zea mays
  CDS (1)..(1035)
atgtctcccgagctgaccggcaagatggccgccaaggccgccgccgccgctgcggcggtgaagcccgcgacgagggcgtacgtgacgttcctggcgggcaacggcgactactggaagggcgtggtgggcctggccaagggcctgcgcaaggtcggctcggcctatcccctggtggtggcccttctgcccgacgtgccggagtcccaccgccgcatcctcgtctcgcagggctgcatcctccgcgagatcgagcccgtgtacccgcctgagaaccagacgcagttcgccatggcgtactacgtcatcaactactccaagctccgcatctgggagttcgtggagtacgagaagatggtgtacctggacgcggacatccaggtgttcgagaacatcgacgagctgttcgagctcgagaaagggtacttctacgcggtgatggactgcttctgcgaaaagacgtggagccacaccccgcagtacaagatcgggtactgccaacagtgcccggacaaggtgacgtggccgaccaccgagctgggccctccgcccccgctctacttcaatgccgggatgttcgcgcacgagcccagcatggccaccgccaaggcactcctcgacaccctccgcgtcactccgcccacccccttcgcagagcaagacttcctgaacatgttcttcagggaccagtacaggccgatccctaacgtgtacaacctcgtgctccccatgctctggaggcaccccgagaacgtgcaacttgagaaagtgaaagtcgtgcactactgcgcggcggggtccaagccgtggaggttcacgggcaaggaggccaacatggacagggaggacatcaagtcgctggtgaacaagtggtgggacatctacaacgacgagtcgctggacttcaagggcctgcccctctcgcccgccgacgccgacgccgacgacgaggtggaggcggtggccaagaagccgctccgcgcggcgctggcggaggccggcacggtcaagtacgtcaccgcgccctcggccgcgtga

SEQ ID NO: 140882 - protein, 344 aa, Zea mays
MSPELTGKMAAKAAAAAAAVKPATRAYVTFLAGNGDYWKGVVGLAKGLRKVGSAYPLVVALLPDVPESHRRILVSQGCILREIEPVYPPENQTQFAMAYYVINYSKLRIWEFVEYEKMVYLDADIQVFENIDELFELEKGYFYAVMDCFCEKTWSHTPQYKIGYCQQCPDKVTWPTTELGPPPPLYFNAGMFAHEPSMATAKALLDTLRVTPPTPFAEQDFLNMFFRDQYRPIPNVYNLVLPMLWRHPENVQLEKVKVVHYCAAGSKPWRFTGKEANMDREDIKSLVNKWWDIYNDESLDFKGLPLSPADADADDEVEAVAKKPLRAALAEAGTVKYVTAPSAA

SEQ ID NO: 140883 - DNA, 1047 bp, Zea mays
  CDS (1)..(1047)
atggctcccgagctgatgacagccaagatgaccgccaatgccgccgcggcggcggcggcggcggcggcggcgaagcctgccacgagggcgtacgtgacgttcctggcgggcgacggcgactactggaagggcgtggtggggctggccaagggcctccgcaaggtccgctcggcctaccccctggtggtggccgtgctgcccgacgtgcccgagtcccaccgccgcatcctcgtctcgcagggctgcgtcgtccgcgagatcgagcccgtgtacccgcctgagaaccagacgcagttcgccatggcgtactacgtcatcaactactccaagctccgcatctgggagttcgtggagtacgagaggatggtgtacctggacgcggacatccaggtgttcgagaacatcgacggcctgttcgagctcgagaaagggtacttctacgcggtgatggccggcttctgcgaaaaaacgtggagccacaccccgcagtacaggatcggctactgccaacagtgcccggacaaggtggcgtggccaacgcgaacggccgagctgggcctcccgccgtcctcctacttcaacgccggaatgttcttgaaggagccaaacttggcaaccgcaaaggggtcccccgaaaccctccggttgattccgccaacccccttcgcaaagaaggacttcctgaaaatgttcttcagggataattacaggccgatccccaacgtttacaacctcgtgctggccatgctttggaggcaccccgagaacgtgcagctggagaaggtgaaggtcgtgcattattgcgcggcggggtccaagccgtggaggttcacgggcaaggaggcgaacatggacagggaggacatcaacgccctggtgaagaagtggtgggacatctacaacgacgagacgctggacttgaagggctgcctcgcttctcgcccgacgacgacgacgaggtggaggcggtgcccaagaagccgcttcgcgcggccttggcggaggccggcacggtcaaagtacgtcaccgcgccctcggccgcgtga

SEQ ID NO: 140884 - protein, 348 aa, Zea mays
MAPELMTAKMTANAAAAAAAAAAAKPATRAYVTFLAGDGDYWKGVVGLAKGLRKVRSAYPLVVAVLPDVPESHRRILVSQGCVVREIEPVYPPENQTQFAMAYYVINYSKLRIWEFVEYERMVYLDADIQVFENIDGLFELEKGYFYAVMAGFCEKTWSHTPQYRIGYCQQCPDKVAWPTRTAELGLPPSSYFNAGMFLKEPNLATAKGSPETLRLIPPTPFAKKDFLKMFFRDNYRPIPNVYNLVLAMLWRHPENVQLEKVKVVHYCAAGSKPWRFTGKEANMDREDINALVKKWWDIYNDETLDLKGCLASRPTTTTRWRRCPRSRFARPWRRPARSKYVTAPSAA

SEQ ID NO: 140885 - DNA, 1038 bp, Zea mays
  CDS (1)..(1038)
atggctcccgagctgatgacagccaagatgaccgccaaagccgcggcggcggcggcggcggtgaagcctgccacgagggcgtacgtgacgttccttgcgggcgacggcgactactggaagggcgtggtggggctggccaaaggcctgcgcaaggtccgctcggcctaccccctggtggtggcggtgctgcccgacgtgcccgagtcccaccgccgcatcctcgtctcgcagggctgcgtcgtccgcgagatcgagcccgtgtacccgcctgagaaccagacgcagttcgccatggcgtactacgtcatcaactactccaagctccgcatctgggagttcgtggagtacgagaggatggtgtacctggacgcggacatccaggtgttcgagaacatcgacggcctgttcgagctcgagaaggggtacttctacgcggtgatggactgcttctgcgagaagacgtggagccacaccccgcagtacaggatcggctactgccagcagtgcccggacaaggtggcgtggccagcggcgaccgccgagctgggccctccgccgtcgctctacttcaacgccggcatgttcgtgcacgagcccagcgtggccaccgccaaggcgctcctcgacaccctccgcgtgactccgcccacccccttcgcagagcaggacttcctgaacatgttcttcagggatcagtacaggccgatccccaacgtgtacaacctcgtgctggccatgctctggaggcaccccgagaacgtgcagctggagaaggtgaaggtcgtgcactactgcgcggcggggtccaagccgtggaggttcacgggcaaggaggcgaacatggacagggaggacatcaacgccctggtgaacaagtggtgggacatctacaacgacgagacgctggacttgaagggcctgccctcgctctcgcccgacgacgacgacgaggtggaggcggtggccaagaagccgcttcgcgcggccctggcggaggccggcacggtcaagtacgtcaccgcgccctcggccgcgtga

SEQ ID NO: 140886 - protein, 345 aa, Zea mays
MAPELMTAKMTAKAAAAAAAVKPATRAYVTFLAGDGDYWKGVVGLAKGLRKVRSAYPLVVAVLPDVPESHRRILVSQGCVVREIEPVYPPENQTQFAMAYYVINYSKLRIWEFVEYERMVYLDADIQVFENIDGLFELEKGYFYAVMDCFCEKTWSHTPQYRIGYCQQCPDKVAWPAATAELGPPPSLYFNAGMFVHEPSVATAKALLDTLRVTPPTPFAEQDFLNMFFRDQYRPIPNVYNLVLAMLWRHPENVQLEKVKVVHYCAAGSKPWRFTGKEANMDREDINALVNKWWDIYNDETLDLKGLPSLSPDDDDEVEAVAKKPLRAALAEAGTVKYVTAPSAA

SEQ ID NO: 140887 - DNA, 1005 bp, Arabidopsis thaliana
  CDS (1)..(1005)
atggcacctgagatgaacaacaagttgagctacggagaaaagaagagagcgtacgttacgttcctcgccggaaccggagactacgtgaaaggagtggttggtctggctaaagggctaaggaaaactaaaagcaagtacccattagtggttgctgtgttacctgacgtgccggccgatcaccggagacagctattggaccaaggctgcgtcatcaaggagattcagccggtttacccaccggataaccaaactcagtttgctatggcttactacgtcctcaactactctaaacttcgtatttggaagtttgtagagtacagcaagctgatatacttagacggagacatacaagtgtttgagaacatagatcacttgtttgatcttcctgacggcaacttctacgccgttaaagactgtttctgcgagaagacttggagccacacgcctcagtacaagattggctactgccaacagtgtccggacaaggtgacgtggcctgagtcagagcttggtcctaagccaccgttgtacttcaacgccggcatgttcgtctacgagccaagcctccccacttattacaaccttttggagacactcaaagttgtccctcccacaccttttgctgaacaggatttcttgaacatgtacttcaaagacatatacaagcctattccaccagtttacaatcttgtcttggccatgctctggaggcatccagagaacatagagcttaacgaagctaaggttgttcattactgtgcagccggtgctaagccttggaggttcacaggccaagaaggaaatatggagagggaagacatcaagatgcttgtagagaaatggtgggacatttacaacgacgagtctcttgactacaaaaactttaatgtgcattgcggacaaaaagaagatgttcacaggaaaccgaaaacccttccacagttctttacagatttgtctgaagctgatgtgcttcaatgtgccaaagctccatccgcggcttag

SEQ ID NO: 140888 - protein, 334 aa, Arabidopsis thaliana
MAPEMNNKLSYGEKKRAYVTFLAGTGDYVKGVVGLAKGLRKTKSKYPLVVAVLPDVPADHRRQLLDQGCVIKEIQPVYPPDNQTQFAMAYYVLNYSKLRIWKFVEYSKLIYLDGDIQVFENIDHLFDLPDGNFYAVKDCFCEKTWSHTPQYKIGYCQQCPDKVTWPESELGPKPPLYFNAGMFVYEPSLPTYYNLLETLKVVPPTPFAEQDFLNMYFKDIYKPIPPVYNLVLAMLWRHPENIELNEAKVVHYCAAGAKPWRFTGQEGNMEREDIKMLVEKWWDIYNDESLDYKNFNVHCGQKEDVHRKPKTLPQFFTDLSEADVLQCAKAPSAA

SEQ ID NO: 140889 - DNA, 1008 bp, Arabidopsis thaliana
  CDS (1)..(1008)
atggcacctgagatcaataccaaactcaccgtaccggtccactcagcaaccggcggagaaaagagggcgtacgtgactttccttgctggaactggagactacgtgaaaggggtggtgggtcttgctaaggggctaaggaaagctaagagcaagtacccactcgtggtggcggttttgccggatgtaccggaggatcaccggaaacagttggtggatcaaggctgtgttgttaaggagatagagccggtttatccaccggagaatcaaaccgagtttgctatggcttactatgtcattaactactctaagcttcgtatctgggagttcgtggagtacaacaagatgatatacttggacggtgacatacaagtgttcgacaacatagatcacttgtttgatcttccaaacggccaattctatgcagttatggactgtttttgcgagaagacatggagtcactcgccacagtacaagatcggttattgccaacagtgtccggacaaggtgacatggccagaggccaagcttggtcctaagccgcctttgtacttcaacgccggtatgttcgtttacgagcctaacctctccacttatcataacctcttggagacggtcaaaattgtgcctcccactctttttgctgaacaggattttttgaatatgtacttcaaggacatatacaagccaataccaccagtgtataacttggtcttggcaatgctttggaggcatccagagaatatagagcttgaccaagtcaaagttgttcactactgtgctgctggtgctaaaccttggagattcactggagaagaagagaacatggacagagaagacattaagatgctggtcaagaaatggtgggacatttacaatgacgagtctcttgattacaagaatgttgtcattggggacagccacaagaagcaacagacacttcagcagtttatcgaagctttgtctgaagccggtgcgcttcagtatgtcaaagctccatctgcagcttag

SEQ ID NO: 140890 - protein, 335 aa, Arabidopsis thaliana
MAPEINTKLTVPVHSATGGEKRAYVTFLAGTGDYVKGVVGLAKGLRKAKSKYPLVVAVLPDVPEDHRKQLVDQGCVVKEIEPVYPPENQTEFAMAYYVINYSKLRIWEFVEYNKMIYLDGDIQVFDNIDHLFDLPNGQFYAVMDCFCEKTWSHSPQYKIGYCQQCPDKVTWPEAKLGPKPPLYFNAGMFVYEPNLSTYHNLLETVKIVPPTLFAEQDFLNMYFKDIYKPIPPVYNLVLAMLWRHPENIELDQVKVVHYCAAGAKPWRFTGEEENMDREDIKMLVKKWWDIYNDESLDYKNVVIGDSHKKQQTLQQFIEALSEAGALQYVKAPSAA

SEQ ID NO: 140891 - DNA, 999 bp, Arabidopsis thaliana
  CDS (1)..(999)
atgacccctgaaactcatgtggacatgatcaatgcatccgagaaggctcctaaggagagagcctacgtgacgtttttggcaggaaatggagactacgtgaagggagtggtgggattagcaaagggtttgcggaaggtcaaaagtgcgtatcctcttgttgttgctatgttacctgatgtgcctgaagaacatagagagatcttgaggtctcaaggatgcattgtgcgtgagatcgagcctgttcatcctccagatagccaagatgcatacgcaagggcttattacattattaactactcaaaactgcgaatttggaattttgaagagtacaacaagatgatctacttggacgcagatattcaagtctttggcaatatcgatgacctctttgatatgcaagatggctatttacatggcgtgttgagttgtttctgtgagaaaatatggagttacactcctctctactcgatcggctattgtcaatattgtcctgagaaggtcgtgtggcccgccgagatggaatctgctcctccctctccatacttcaatgccggtatgtttgtatttgagcctaatcctttgacgtatgagagtctccttcagaccctccaggtcacacctcctacaccatttgcggagcaagattttctcaatatgttctttgggaaggtctttaaaccggtatctccggtatacaacctgattttgtctgtgctttggcgccatccggggaaggttgacttggagagtgtcaaagttgttcactactgtccacctggatccaagccatggaggtacacaggagaagaacctaacatggacagagaagacgtcaaaatgttaattaagaaatggtgggatatctacaatgacgagtctcttgattttaaaccgaaaagccctgcagatttggaagcaaccgttttggaatcaacaattatagcttcggtaaccgaagcaccactttcctactctcctgctgcaccttctgccgcttga

SEQ ID NO: 140892 - protein, 332 aa, Arabidopsis thaliana
MTPETHVDMINASEKAPKERAYVTFLAGNGDYVKGVVGLAKGLRKVKSAYPLVVAMLPDVPEEHREILRSQGCIVREIEPVHPPDSQDAYARAYYIINYSKLRIWNFEEYNKMIYLDADIQVFGNIDDLFDMQDGYLHGVLSCFCEKIWSYTPLYSIGYCQYCPEKVVWPAEMESAPPSPYFNAGMFVFEPNPLTYESLLQTLQVTPPTPFAEQDFLNMFFGKVFKPVSPVYNLILSVLWRHPGKVDLESVKVVHYCPPGSKPWRYTGEEPNMDREDVKMLIKKWWDIYNDESLDFKPKSPADLEATVLESTIIASVTEAPLSYSPAAPSAA

SEQ ID NO: 140893 - DNA, 1035 bp, Arabidopsis thaliana
  CDS (1)..(1035)
atggctccggggcttactcaaaccgctgatgctatgtccaccgtgacgataacaaaaccgtcactgccatcagtccaagacagcgatcgagcttacgtgacgtttcttgctggaaacggtgattacgtgaaaggagtcgttggtttagccaaagggttaaggaaagtcaaatcggcttatccactcgtagtagcgatgttacccgacgtcccggaggaacaccgtcgtatacttgtggatcaaggatgcatcgtccgtgaaatcgaacccgtttacccacccgagaaccaaactcagttcgccatggcttattacgtcatcaactactctaaactccgtatctggaagtttgtggagtatagtaaaatgatatatttagatggagacattcaagtttacgaaaacatcgatcacttgtttgacctaccagatggctatttgtacgcggtgatggattgtttctgtgagaaaacatggagtcacacgccgcaatacaagatcagatattgccaacaatgccccgacaaagtccagtggccaaaagcggagcttggagagccaccggctctttacttcaacgccggaatgttcttgtacgagcctaacctcgagacttacgaggatctactacgaacacttaaaatcactcctccgactcctttcgctgaacaggattttttgaacatgtactttaagaaaatctacaagccgattcctttagtgtacaatctcgtccttgcgatgttatggcgtcacccagaaaatgtagagcttggaaaagtcaaggtggttcactactgtgcagcgggttcgaagccgtggagatacacagggaaagaagcgaacatggagagggaagatataaaaatgttagtgaaaaaatggtgggacatttacgacgacgaatccttggattacaagaaacctgttaccgttgtggacacagaggtcgatctcgtgaatctgaagccgttcatcaccgctcttactgaagctggccggctcaactacgtgaccgcaccgtccgctgcttga

SEQ ID NO: 140894 - protein, 344 aa, Arabidopsis thaliana
MAPGLTQTADAMSTVTITKPSLPSVQDSDRAYVTFLAGNGDYVKGVVGLAKGLRKVKSAYPLVVAMLPDVPEEHRRILVDQGCIVREIEPVYPPENQTQFAMAYYVINYSKLRIWKFVEYSKMIYLDGDIQVYENIDHLFDLPDGYLYAVMDCFCEKTWSHTPQYKIRYCQQCPDKVQWPKAELGEPPALYFNAGMFLYEPNLETYEDLLRTLKITPPTPFAEQDFLNMYFKKIYKPIPLVYNLVLAMLWRHPENVELGKVKVVHYCAAGSKPWRYTGKEANMEREDIKMLVKKWWDIYDDESLDYKKPVTVVDTEVDLVNLKPFITALTEAGRLNYVTAPSAA

SEQ ID NO: 140895 - DNA, 1002 bp, Arabidopsis thaliana
  CDS (1)..(1002)
atgacgatgactgtcgagaagaggatcgaagctgacgttacggtgagccatgaaggtgtggaacgggcttacgtaactttcctcgccggaaacaaagactactggatgcttgtagttggtctagccaaaggtcttcgtaaagtgaaatcagcttatccactcgttgtggcgactctccctgacgtgcctgaggaacatcgtcaaatcttagtggatcagggatgcatcatccgtgacatcgaaccggtctatcctccggagaacacgaccggttattctatggcttattacgttatcaactactccaaacttcgtatttgggagtttgtggagtatgagaagatgatatatctagatggagacatacaagtgtttaagaacattgatcatcttttcgatactcctcgtggctacttgtacgcagtcaaagactgcttttgtgaggtgtcttggtccaaaactcctcaatacaagatcggttattgccaacagtcacctgaaaaggtaacttggcctgttgaaagtttaggtgctccaccgccggtatatttcaacgccggtatgttggtttttggaccaaatcttgtcacttacgaggatctccttcgtgttgttcaaatcaccactccaacttattttgccgagcaggactttctgaatatatacttcagagacatttacaagccaatcccttcgacctacaacctcgtaatggctatgctttggcgtcatcccgaacacattgaccttgaccaaatcagtgttgttcactattgtgctaatggttcgaagccttggaaattcgatgaagctgaagagcatatggatcgagaagacataaaaatgttggtgaagaagtggtgggagatttacgaagattcgagtttagactacaagaatttcgtcgagactgagtccaagctgaatccggtcactgcaaccttggcttccaagaaacttgttggcgatgtcctaacaagccttgccccttccgccgcataa

SEQ ID NO: 140896 - protein, 333 aa, Arabidopsis thaliana
MTMTVEKRIEADVTVSHEGVERAYVTFLAGNKDYWMLVVGLAKGLRKVKSAYPLVVATLPDVPEEHRQILVDQGCIIRDIEPVYPPENTTGYSMAYYVINYSKLRIWEFVEYEKMIYLDGDIQVFKNIDHLFDTPRGYLYAVKDCFCEVSWSKTPQYKIGYCQQSPEKVTWPVESLGAPPPVYFNAGMLVFGPNLVTYEDLLRVVQITTPTYFAEQDFLNIYFRDIYKPIPSTYNLVMAMLWRHPEHIDLDQISVVHYCANGSKPWKFDEAEEHMDREDIKMLVKKWWEIYEDSSLDYKNFVETESKLNPVTATLASKKLVGDVLTSLAPSAA

SEQ ID NO: 140897 - DNA, 1011 bp, Arabidopsis thaliana
  CDS (1)..(1011)
atggctcaaatgtcgatgaccgtcgagaagagtatcaaagctgacgtgacggtgagccatgaccgtgtgaaaagggcttacgtcactttccttgctggaaacaaagactactggatgggtgtagttggtctagccaagggacttcgtaaggtgaaatctgcttatcctcttgtggttgcgattctcccggacgtgcctgaggaacaccgtcaaatcctgttggctcagggatgcatcatccgtgagattgaaccggtttatccaccggaaaacaaaaccggttattcaatggcctattacgttatcaactactccaagcttcgtatttgggagtttgtggagtatgaaaagatgatttatctagatggagacattcaagtatttagtaacatcgatcatcttttcgatactcctcgtggctacttgtacgctgtcaaagattgcttttgcgagatttcttggtccaaaactcctcaatttaagataggttactgccaacaatgtcctgaaaaggtgacatggcctgttgaaagtcttggttctccaccgccggtatatttcaacgccggtatgttggtttttgaacctaatctcctcacttacgaggatctccttcgtgttgttcaaatcaccactccgacatattttgccgaacaggattttctgaatgaatactttacagacatttacaagcccatcccttcgacctacaaccttgtaatggctatgctttggcgtcatcctgaacacattgaccttgaccaaatcagtgttattcattattgtgcaaatggttcgaagccttggagattcgatgaaactgaagagcatatggatcgtgaggacataaaaatgttggtgaagaaatggtgggatatttatgaagattcgagtttagattacaagaactttgtcgagactgagtccaaactgagtccgatcaatgcaaccttggcttccaaggaatctgttggcgatgtccttattagtcttgccccttccgctgcataa

SEQ ID NO: 140898 - protein, 336 aa, Arabidopsis thaliana
MAQMSMTVEKSIKADVTVSHDRVKRAYVTFLAGNKDYWMGVVGLAKGLRKVKSAYPLVVAILPDVPEEHRQILLAQGCIIREIEPVYPPENKTGYSMAYYVINYSKLRIWEFVEYEKMIYLDGDIQVFSNIDHLFDTPRGYLYAVKDCFCEISWSKTPQFKIGYCQQCPEKVTWPVESLGSPPPVYFNAGMLVFEPNLLTYEDLLRVVQITTPTYFAEQDFLNEYFTDIYKPIPSTYNLVMAMLWRHPEHIDLDQISVIHYCANGSKPWRFDETEEHMDREDIKMLVKKWWDIYEDSSLDYKNFVETESKLSPINATLASKESVGDVLISLAPSAA

SEQ ID NO: 140899 - DNA, 987 bp, Arabidopsis thaliana
  CDS (1)..(987)
atggcaccaacggagatgaacatcgaaagaaaggtagaggctgacgtggcggtgattcctaatgatggaaaaagggcttacgtcactttcctagctggtaaccaagactattggatgggtgtggttggtttagccaagggacttcgtaaggtgaaagcagcttatcctcttgttgtggctatgctcccagacgtaccgaaagaacaccgtcaaatcttggtggctcaaggatgtatcatccgggagattgaaccggtttatccgccggaaaaccaagctggttatgctatggcttattacgttatcaactactccaagcttcgaatttgggagtttgtggaatatgagaagatgatatatttagatggagacatacaagtgtttagcaacatcgatcatctatttgacactccatctggctacttgtacgccgtcaaagactgtttttgcgagggttcttggtcaaaaacacctcaatacaagattggttactgccaacagtcgcccgaaaaagtgaggtggccgatgaacagtcttggtcatgtgccgccattgtatttcaacgcgggtatgttggtctttgaaccaaatctcctcacttacgaggatcttcttcaaactgttcaagtcaccactcctacttcattcgccgaacagccaatcccttcgacgtacaacctcgtactagctatgctttggcgtcatcccgaatgcattgacctcgaccaaatcaatgttgttcattattgtgctaaaggctcaaaaccttggagattcactggagaagaggagcatatggaccgagaagatattaaaatgttggtgaaaaaatggtgggacatttatgaagacacgagtttagactacaagacatttgttgagaacgagtcgaagctgaatccgatcgttgcagccttggcctctaaagaatcaggttgtgatggtcttactagcctcgctccttccgccgcaaaatcaaatccctaa

SEQ ID NO: 140900 - protein, 328 aa, Arabidopsis thaliana
MAPTEMNIERKVEADVAVIPNDGKRAYVTFLAGNQDYWMGVVGLAKGLRKVKAAYPLVVAMLPDVPKEHRQILVAQGCIIREIEPVYPPENQAGYAMAYYVINYSKLRIWEFVEYEKMIYLDGDIQVFSNIDHLFDTPSGYLYAVKDCFCEGSWSKTPQYKIGYCQQSPEKVRWPMNSLGHVPPLYFNAGMLVFEPNLLTYEDLLQTVQVTTPTSFAEQPIPSTYNLVLAMLWRHPECIDLDQINVVHYCAKGSKPWRFTGEEEHMDREDIKMLVKKWWDIYEDTSLDYKTFVENESKLNPIVAALASKESGCDGLTSLAPSAAKSNP

SEQ ID NO: 140901 - DNA, 987 bp, Ammopiptanthus mongolicus
  CDS (1)..(987)
atggcacctgatatcaccaccgctgctgccaatgccaccgtggaacaacccaaagctggtggcggcagaggacgtgccttcgtgactttcctagcagggaacggtgactatgttaagggtgttgtaggtttggctaaaggacttaggaaggtgaaaagcgtgcaccctcttgtggtagcagtcttacctgatgtccctgaagaacaccgtaagattcttaactcacaaggttgcattgttagagagattgagccagtgtacccacctgagaaccagacccagtatgccatggcctattatgtcataaattactccaagctacgaatttgggagtttgtggagtacagcaagatgatttacctagacggtgatatccaggtttttgaaaacattgaccacctatttgatttgcctgataattacttctacgcggttatggattgtttctgtgagaaaagttggacccacacccctcagtatcagattggttactgccaacagtgccctgataaggttgaatggccttctaattttggtcccaagcctcctctctatttcaatgcagggatgtttgtttatgagcctaatctcgtcacttaccgtgacctcctcgaagcactccaagtcactaaacccacttcctttgctgaacaagactttctgaacattttcttcagggaaaaatacaagccaatacccaatgtgtacaaccttgtgctggccatgttgtggcgtcaccctgagaatgttgaacttgacaaagttcaagtggttcactactgtgctgctgggtccaagccttggaggtacactgggaaagaggagaatatggagagagaagatatcaagatgcttgtgaagaagtggtgggacatatatgaggatgagacattggattatgacaatcccctcaacgtggaacgttttacagcggcgcttttgaaggctggtggcgttaagtttgttcccgccccatccgctgcctaa

SEQ ID NO: 140902 - protein, 328 aa, Ammopiptanthus mongolicus
MAPDITTAAANATVEQPKAGGGRGRAFVTFLAGNGDYVKGVVGLAKGLRKVKSVHPLVVAVLPDVPEEHRKILNSQGCIVREIEPVYPPENQTQYAMAYYVINYSKLRIWEFVEYSKMIYLDGDIQVFENIDHLFDLPDNYFYAVMDCFCEKSWTHTPQYQIGYCQQCPDKVEWPSNFGPKPPLYFNAGMFVYEPNLVTYRDLLEALQVTKPTSFAEQDFLNIFFREKYKPIPNVYNLVLAMLWRHPENVELDKVQVVHYCAAGSKPWRYTGKEENMEREDIKMLVKKWWDIYEDETLDYDNPLNVERFTAALLKAGGVKFVPAPSAA

SEQ ID NO: 140903 - DNA, 1014 bp, Xerophyta viscosa
  CDS (1)..(1014)
atggcgccggagatcgtgagcaagagggctgccaactacgccgggaagcaggtggcagctccgcgaaacgcctacgttactttcctggcgggagctggggactacgttaagggcgtcgttggactcgctaaggggctgcgaaaagtaggctctgcttaccccttagtggttgcggtgctccccgacgttcctgacgaacaccggaagctactggtgtcccaggggtgcatcgtaaggcaaatcgagcccgtgtaccctcccgagaaccagacccaattcgccatggcgtattacgtcatcaactattctaagctccgcatttgggagtttgtagagtatagcaagatgatatatttggacgcagacatccaagtctacgataacatagaccacctgtttgacctgcccggcgggcgtttctacgcagtaatggactgcttctgcgagaagacatggagccacacgccgcagtacaaaattggctactgccagcagtgtcccaacaaggtgacatggccggcggagctggggcaaccgccggcgctatacttcaacgcaggcatgttcgttcacgagcctagcctcgctaccgccgaaaaactccttgctactctgaaggttgctccaacgactcccttcgctgagcaagactacttgaacatgttcttcaaggacatctacaggcccattccacttacttataaccttgtcctcgcaatgctctggcgccaccctgagaatgtcgagctcgacaaggtcatggtcgtccattactgtgctgcgggatcgaagccatggaggtatactggtaaagaagaaaacatggacagagaagacatcaagatgttggttaagaagtggtgggacatctacaacgacgactcgctggattacaagggaccggcggcaacgatggatctggagccggaggcccctggtttgaagcagcttaagctggcggcgctgtcggaggccggcgaggtgcgctatactaaagcaccttcagcagcttaa

SEQ ID NO: 140904 - protein, 337 aa, Xerophyta viscosa
MAPEIVSKRAANYAGKQVAAPRNAYVTFLAGAGDYVKGVVGLAKGLRKVGSAYPLVVAVLPDVPDEHRKLLVSQGCIVRQIEPVYPPENQTQFAMAYYVINYSKLRIWEFVEYSKMIYLDADIQVYDNIDHLFDLPGGRFYAVMDCFCEKTWSHTPQYKIGYCQQCPNKVTWPAELGQPPALYFNAGMFVHEPSLATAEKLLATLKVAPTTPFAEQDYLNMFFKDIYRPIPLTYNLVLAMLWRHPENVELDKVMVVHYCAAGSKPWRYTGKEENMDREDIKMLVKKWWDIYNDDSLDYKGPAATMDLEPEAPGLKQLKLAALSEAGEVRYTKAPSAA

SEQ ID NO: 140905 - DNA, 1026 bp, Oryza sativa subsp
  CDS (1)..(1026)
atggctcctccccagcttgccggcaagatgaccgccaaggccgccgcggcggtgaagcccgcgacgagggcgtacgtgacgttcctcgcgggcgacggtgactactggaagggcgtggtcgggctggccaagggccttcgcaaggtgggctcggcctacccgctggtggtcgccgtcctccccgacgtgccggagtcccaccgccgcatcctcatctcccagggctgcatcgtccgggagatcgagccggtgtacccgccggagaaccagacgcagttcgccatggcctactacgtcatcaactactccaagctccgcatctgggagttcgtggagtacgagaggatggtgtaccttgacgccgacatccaggtgttcgacaacatcgacgagctgttcgagctgcccaaggggcccttctacgcggtgatggactgcttctgcgagaagacgtggagccacaccccgcagtaccagatcggctactgccagcagtgccccgacaaggtggcgtggccgaccgccgagctcggcccgccgccggcgctctacttcaacgccggcatgttcgtgcacgagcccagcatggccaccgccaagtcccttctcgacactctgcgcgtcaccacgcccactcccttcgcggagcaggatttcctgaacatgttcttcagggagcagtacaagccgatcccactgatctacaaccttgtcctggccatgctctggaggcatccagagaacgtccagctcgagaaggtcaaggtcgtgcactactgcgcagcgggatcgaagccgtggaggtacacgggcaaggaggcgaacatggacagggaggacatcaagatgctggtcaagaagtggtgggacgtctacaacgacggcagcctggacttcaagggcctcccgcccatcgcggccgccgacgacgccgacgaggtcgaggcggcggccaagaagccgctgcgcgccgcgctggcggaggcccgcaccgtcaagtacgtcacggcgccatcggccgcgtga

SEQ ID NO: 140906 - protein, 341 aa, Oryza sativa subsp
MAPPQLAGKMTAKAAAAVKPATRAYVTFLAGDGDYWKGVVGLAKGLRKVGSAYPLVVAVLPDVPESHRRILISQGCIVREIEPVYPPENQTQFAMAYYVINYSKLRIWEFVEYERMVYLDADIQVFDNIDELFELPKGPFYAVMDCFCEKTWSHTPQYQIGYCQQCPDKVAWPTAELGPPPALYFNAGMFVHEPSMATAKSLLDTLRVTTPTPFAEQDFLNMFFREQYKPIPLIYNLVLAMLWRHPENVQLEKVKVVHYCAAGSKPWRYTGKEANMDREDIKMLVKKWWDVYNDGSLDFKGLPPIAAADDADEVEAAAKKPLRAALAEARTVKYVTAPSAA

SEQ ID NO: 140907 - DNA, 984 bp, Oryza sativa subsp
  CDS (1)..(984)
atggggccgaacgtgtcgtcggagaagaaggcgttggcggcggcgaagaggagggcgtacgtgacgttcctggccggcgacggcgactactggaagggcgtcgtggggctcgccaaggggctccgccgcgtccgctcggcgtacccgctggtggtcgccgtgctcccggacgtccccggcgagcaccggcggaagctggtcgagcaggggtgcgtggtccgggagatccagccggtgtacccgccacagagccagacgcagttcgccatggcctactacgtgatcaactactcgaagctccgcatctgggagttcgtggagtacgagcggatggtctacctcgacgccgacatacaggtgttcgacaacatcgaccacctgttcgacctcgacaagggcgccttctacgccgtcaaggactgcttctgcgagaagacgtggagccacacgccgcagtacgacatcggctactgccagcagcgccccgacgaggtggcgtggccggagcgcgagctcggtcccccgccgccgctctacttcaacgccggcatgttcgtccacgagcccggcctcggcaccgccaaggacctgctcgacgcgctcgtcgtcacgccgcccaccccgttcgccgagcaggacttcctcaacatgttcttccgcgaacagtacaagcccatccccaacgtctacaacctcgttctcgccatgctctggaggcacccggagaacgtcgacctcgaccaggtcaaggtcgtccattactgtgcagcgggttcgaagccatggaggttcaccgggaaggaggagaacatgaacagagaagatataaagatgctggtgaagaggtggtgggacatctacaacgacgagagcctcgactacaaggaggaggaggacaacgccgacgaggccagccagccgatgcggacggcgctcgccgaggccggcgccgtcaagtacttcccggcgccctccgccgcgtag

SEQ ID NO: 140908 - protein, 327 aa, Oryza sativa subsp
MGPNVSSEKKALAAAKRRAYVTFLAGDGDYWKGVVGLAKGLRRVRSAYPLVVAVLPDVPGEHRRKLVEQGCVVREIQPVYPPQSQTQFAMAYYVINYSKLRIWEFVEYERMVYLDADIQVFDNIDHLFDLDKGAFYAVKDCFCEKTWSHTPQYDIGYCQQRPDEVAWPERELGPPPPLYFNAGMFVHEPGLGTAKDLLDALVVTPPTPFAEQDFLNMFFREQYKPIPNVYNLVLAMLWRHPENVDLDQVKVVHYCAAGSKPWRFTGKEENMNREDIKMLVKRWWDIYNDESLDYKEEEDNADEASQPMRTALAEAGAVKYFPAPSAA

SEQ ID NO: 140909 - DNA, 951 bp, Oryza sativa subsp
  CDS (1)..(951)
atggctcctccccagcttgccggcaagatgaccgccaaggccgccgcggcggtgaagcccgcgacgagggcgtacgtgacgttcctcgcgggcgacggtgactactggaagggcgttgtcgggctggccaagggccttcgcaaggtgggctcggcctacccgctggtggtcgccgtcctccccgacgtgccggagtcccaccgccgcatcctcatctcccagggctgcatcgtccgggagatcgagccggtgtacccgccggagaaccagacgcagttcgccatggcctactacgtcatcaactactccaagctccgcatctgggagttcgtggagtacgagaggatggtgtaccttgacgccgacatccaggtgttcgacaacatcgacgagctgttcgagctgcccaaggggcacttctacgcggtgatggactgcttctgcgagaagacgtggagccacaccccgcagtaccagatcggctactgccagcagtgccccgacaaggtggcgtggccgaccgccgagctcggcccgccgccggcgctctacttcaacgccggcatgttcgtgcacgagcccagcatggccaccgccaaggagcagtacaagccgatcccactgatctacaaccttgtcctggccatgctctggaggcatccagagaacgtccagctcgagaaggtcaaggtcgtgcactactgcgcagcgggatcgaagccgtggaggtacacgggcaaggaggcgaacatggacagggaggacatcaagatgctggtcaagaagtggtgggacgtctacaacgacggcagcctggacttcaagggcctcccgcccatcgcggccgccgacgacgccgacgaggtcgaggcggcggccaagaagccgctgcgcgccgcgctggcggaggcccgcaccgtcaagtacgtcacggcgccatcggccgcgtga

SEQ ID NO: 140910 - protein, 316 aa, Oryza sativa subsp
MAPPQLAGKMTAKAAAAVKPATRAYVTFLAGDGDYWKGVVGLAKGLRKVGSAYPLVVAVLPDVPESHRRILISQGCIVREIEPVYPPENQTQFAMAYYVINYSKLRIWEFVEYERMVYLDADIQVFDNIDELFELPKGHFYAVMDCFCEKTWSHTPQYQIGYCQQCPDKVAWPTAELGPPPALYFNAGMFVHEPSMATAKEQYKPIPLIYNLVLAMLWRHPENVQLEKVKVVHYCAAGSKPWRYTGKEANMDREDIKMLVKKWWDVYNDGSLDFKGLPPIAAADDADEVEAAAKKPLRAALAEARTVKYVTAPSAA

SEQ ID NO: 140911 - DNA, 960 bp, Triticum aestivum
  CDS (1)..(960)
atggctcccatgctcaagcggatcgccgaggacgagcccaagaaggcggcgtacgtgaccttcctcgccggctccggcgactactggaagggcgtggtgggcctggccaagggcctccgcgccgtcaagtcggcctacccgctcgtggtggccgtgctccccgacgtccccgaggaccaccgccagaagctgctcgcccagggctgcctcgtccgcgagatcgtgcccgtctacccgccggagagccagacccagttcgccatggcatactacgtcatcaactactccaagctccgcatctgggagttcgtggagtacgagaggatggtgtacctggacgcggacatccaggtgtacgacaacgtcgaccacctcttcgacctcgagaagggcagcttctacgccgtcaaggactgcttctgcgagaagacgtggagccacaccaagcagtacgagatcggctactgccagcagtgccccgacagggtcgtctggccggagcgcgacctcggcgtgcccccgccgccgctctacttcaacgccggcatgttcgtgcacgagcccagcatggccaccgccaaggccctgctcgacaagctcgtcgtcaccgaccccacccccttcgccgagcaggacttcctcaacatgttcttcagggacgtgtacacgcccattccgcccgtctacaacctcgtcttggccatgctctggaggcaccccgagaacatccagctccacaaggtcaaggtcgtccactactgtgcagcgggttcgaagccgtggaggtacaccggcgaggaggccaacatggacagggaggacatcaagatgctggtcaagaaatggtgggccatctacgacgacgagagcctcaactacaagcctgccgccgacccgctgcgtgctgccctcgccgaggtcgtcgccgtcaagtccttcccggcgccctcggctgcatag

SEQ ID NO: 140912 - protein, 319 aa, Triticum aestivum
MAPMLKRIAEDEPKKAAYVTFLAGSGDYWKGVVGLAKGLRAVKSAYPLVVAVLPDVPEDHRQKLLAQGCLVREIVPVYPPESQTQFAMAYYVINYSKLRIWEFVEYERMVYLDADIQVYDNVDHLFDLEKGSFYAVKDCFCEKTWSHTKQYEIGYCQQCPDRVVWPERDLGVPPPPLYFNAGMFVHEPSMATAKALLDKLVVTDPTPFAEQDFLNMFFRDVYTPIPPVYNLVLAMLWRHPENIQLHKVKVVHYCAAGSKPWRYTGEEANMDREDIKMLVKKWWAIYDDESLNYKPAADPLRAALAEVVAVKSFPAPSAA

SEQ ID NO: 140913 - DNA, 972 bp, Triticum aestivum
  CDS (1)..(972)
atggctcccatgctcaagcggatcgccgaggacgagccgaagaaggcggcgtacgtgaccttcctcgccggctccggcgactactggaagggcgtggtgggcctggccaagggcctccgcgccgtcaagtcggcctacccgctcgtggtggccgtgctccctgacgtccccgaggaccaccgccagaagctgctcgcccagggctgcgtcgtccgcgagatcgtgcccgtgtacccgccggagagccagacccagttcgccatggcctactacgtcatcaactactccaagctccgcatctgggagttcgtggagtacgagcggatggtgtacctggacgcggacatccagttgtacgacaacatagaccacctctttgacctggagatgggcagcttctatgccgtcatggactgcttctgcgagaagacgtggagccacaccccgcagtacgagatcggctactgccagcagtgcccggaccgggtggtctggccggagcgcgacctcggcgtgcccccgccgccgctctacttcaacgccggcatgttcgtgcacgagcccagcatggccaccgccaaggccctgctcgacaagcttgtcgtcaccgaccccacccccttcgccgagcaggactttcttaacatgttcttcagggacgtgtacaagcccatcccgccggtgtacaacctcgtgctcgccatgctctggaggcaccccgagaacatccagctccacaaggtcaaggtcgtccactactgcgccgcgggttccaagccgtggaggtacaccggcgaggaggccaacatggacagggacgacatcaagatgctggtcaagaagtggtgggccatctacgacgacgagagcctcaactacaagcctgccgccgacgaggccgccgacccgctgcgtgctgccctcgccgaggtcgtcgccgtcaagtccttcccggcgccatcagctgcgtag

SEQ ID NO: 140914 - protein, 323 aa, Triticum aestivum
MAPMLKRIAEDEPKKAAYVTFLAGSGDYWKGVVGLAKGLRAVKSAYPLVVAVLPDVPEDHRQKLLAQGCVVREIVPVYPPESQTQFAMAYYVINYSKLRIWEFVEYERMVYLDADIQLYDNIDHLFDLEMGSFYAVMDCFCEKTWSHTPQYEIGYCQQCPDRVVWPERDLGVPPPPLYFNAGMFVHEPSMATAKALLDKLVVTDPTPFAEQDFLNMFFRDVYKPIPPVYNLVLAMLWRHPENIQLHKVKVVHYCAAGSKPWRYTGEEANMDRDDIKMLVKKWWAIYDDESLNYKPAADEAADPLRAALAEVVAVKSFPAPSAA

SEQ ID NO: 140915 - DNA, 978 bp, Vitis vinifera
  CDS (1)..(978)
atggctcctactttggcctctgcaactggtttagccaaggctgccagcatttccagccgggcatatgtgactttcttggccggtaacggcgactacgtgaagggcgtggtggggctggccaaggggctgagaaaggtgaaaaccgcatacccacttgtggtggcggtactgccggacgtcccggcggagcaccgccgcattctggaggaccagggctgcgtcgtcagggagatcgagccggtgaacccaccggagaaccagacccagttcgccatggcctactacgtcatcaactactccaaactccgcatctgggagtttgtggagtacagtaagatgatatacttggacggagacatacaggtgtttagtaacatagaccatttgtttgatttggatgatgggtatttctatgctgtgatggactgtttctgtgagaagacgtggagcaactcgccgcagtacaagattgggtactgccagcagtgcccggagaaggtgaagtggccggcggagatgggtccagcaccccctctctacttcaacgccggcatgtttgtgtttgagccttgcctctccgtctatgatgatctccttaccactctcaagatcacaactcctacctcttttgccgagcaggactatttgaatatgttcttcagggacatctacaagcccattccacccacctacaaccttgttttagccatgctatggcgccacccagagaacattgaccttcaaagaaccaatgttgttcactattgtgctgctggttcaaagccatggaggtatactgggaaggaggagaacatggacagggaagatataaagatgttggtgaagaagtggtgggatatatacaatgatgagagcttggactacaggaactcatcggcaaatggacagcctttcacggcggcgctttcggaggccggcgtagtccaccacttcattaccgcctcatcggctgcctag

SEQ ID NO: 140916 - protein, 325 aa, Vitis vinifera
MAPTLASATGLAKAASISSRAYVTFLAGNGDYVKGVVGLAKGLRKVKTAYPLVVAVLPDVPAEHRRILEDQGCVVREIEPVNPPENQTQFAMAYYVINYSKLRIWEFVEYSKMIYLDGDIQVFSNIDHLFDLDDGYFYAVMDCFCEKTWSNSPQYKIGYCQQCPEKVKWPAEMGPAPPLYFNAGMFVFEPCLSVYDDLLTTLKITTPTSFAEQDYLNMFFRDIYKPIPPTYNLVLAMLWRHPENIDLQRTNVVHYCAAGSKPWRYTGKEENMDREDIKMLVKKWWDIYNDESLDYRNSSANGQPFTAALSEAGVVHHFITASSAA

SEQ ID NO: 140917 - DNA, 978 bp, Vitis vinifera
  CDS (1)..(978)
  misc_feature (84)..(84): w is a or t
atggctcctactttggcctctgcaactggtttagccaaggctgccagcatttccagccgggcatatgtgactttcttggccggwaacggcgactacgtgaagggcgtggtggggctggccaaggggctgagaaaggtgaaaaccgcatacccacttgtggtggcggtactgccggacgtcccggcggagcaccgccgcattctggaggaccagggctgcgtcgtcagggagatcgagccggtgaacccgccggagaaccagacccagttcgccatggcctactacgtcatcaactactccaaactccgcatctgggagtttgtggagtacagtaagatgatatacttggacggagacatacaggtgtttggtaacatagaccatttgttcgatttggacaatgggtatttctatgctgtgatggactgtttctgtgagaagacgtggagcaactcgccgcagtacaagattgggtactgccagcagtgtccggagaaggtgcagtggccggcggagatgggtccagcacctcctctctacttcaacgccggcatgtttgtgtttgagccttgcctctccgtctatgatgatctccttaccactctcaagatcacaactcctacctcctttgccgagcaggactatttgaatatattcttcagggacatctacaggccaattccacccacctacaaccttgttttagccatgctatggcgccacccagagaacattgaccttcaaagaaccaatgttgttcactattgtgctgctggttcaaaaccatggaggtatactgggaaggaggagaacatggagagggaggatataaagatgttggtgaagaagtggtgggatatatacaatgatgagagcttggactacaggaactcatcagcaaatggacagcctttcacggcggtgctttcggaggccggcgaagtccaccactacattaccgccccatcggctgcctag

SEQ ID NO: 140918 - protein, 325 aa, Vitis vinifera
MAPTLASATGLAKAASISSRAYVTFLAGNGDYVKGVVGLAKGLRKVKTAYPLVVAVLPDVPAEHRRILEDQGCVVREIEPVNPPENQTQFAMAYYVINYSKLRIWEFVEYSKMIYLDGDIQVFGNIDHLFDLDNGYFYAVMDCFCEKTWSNSPQYKIGYCQQCPEKVQWPAEMGPAPPLYFNAGMFVFEPCLSVYDDLLTTLKITTPTSFAEQDYLNIFFRDIYRPIPPTYNLVLAMLWRHPENIDLQRTNVVHYCAAGSKPWRYTGKEENMEREDIKMLVKKWWDIYNDESLDYRNSSANGQPFTAVLSEAGEVHHYITAPSAA

SEQ ID NO: 140919 - DNA, 1029 bp, Vitis vinifera
  CDS (1)..(1029)
  misc_feature (67)..(67): r is g or a
  misc_feature (675)..(675): s is g or c
atggctcctgaaatcatctccgcttcgggaaaaccgtccagatttttgaaaccggctagtcttccgracagagcatacgtggccttcttggccggtaacggggactacgtgaaaggtgttgttgggttagccaaggggctgcggaaggtgaaatccgcttacccgcttgtggtggcggtgttaccggacgtgccggtggagcaccgccgagaactggaatcccaggggtgcatcgtcagagagattgagccggtttacccacccgagaaccagacccagttcgccatggcctattacgttatcaattattcaaagctccgtatctgggagttcgtggagtacagtaagatgatatacttggatggggatattcaagtctacgataacattgaccacctctttgagctaccagacggacatttctatgcagtgatggactgtttctgtgagaaaacatggagtcacacgccacagtacaagattggatactgccaacagtgtccggaaaaggttcagtggccggcggagctgggtcagccgccttcactttacttcaacgcaggcatgtttgtgtttgagcccagcctctccacctatgaagatctcttggaaaccctcaggatcacccctgcaaccccttttgcagagcaggatttcttgaatatgtacttcagsgatgtatataagcctattcctctggtctacaatcttgtccttgccatgctgtggcggcatcctgagaatgtagagcttgataaagtgaaagttgttcactactgtgcagcggggtcgaagccatggaggtacacagggaaggaggacaacatgcagagagaggacattaagatgctggtaaacaaatggtgggagatatacaatgacaagtcattggattacaagaagacgaggatgatggcgaatgattacagcagtgttttgccgggggagcaggtgaatttggagccgttcattgcagctctttccgaggtggggcatgttgaatttgtgagagccccttcagcagcctag

SEQ ID NO: 140920 - protein, 342 aa, Vitis vinifera
  misc_feature (225)..(225): The Xaa at location 225 stands for Arg, or Ser.
MAPEIISASGKPSRFLKPASLPBRAYVAFLAGNGDYVKGVVGLAKGLRKVKSAYPLVVAVLPDVPVEHRRELESQGCIVREIEPVYPPENQTQFAMAYYVINYSKLRIWEFVEYSKMIYLDGDIQVYDNIDHLFELPDGHFYAVMDCFCEKTWSHTPQYKIGYCQQCPEKVQWPAELGQPPSLYFNAGMFVFEPSLSTYEDLLETLRITPATPFAEQDFLNMYFXDVYKPIPLVYNLVLAMLWRHPENVELDKVKVVHYCAAGSKPWRYTGKEDNMQREDIKMLVNKWWEIYNDKSLDYKKTRMMANDYSSVLPGEQVNLEPFIAALSEVGHVEFVRAPSAA

SEQ ID NO: 140921 - DNA, 951 bp, Vitis vinifera
  CDS (1)..(951)
atggctcctactttggcctctgcaactggtttggccaaggctggcagcatttccagccgggcatatgtgacgttcttgaccggaaacggcgactacgtgaagggcgtggtggggctggccaaggggctgagaaaagttaaaaccgcatacccacttgtggtggcggtactgccggacgtcccggcggagcaccgccgcattctgaaggaacagggctgcgtcgtcaaggagatcgagccggtgaacccgccggagaaccagacccagttcaccatggcctactacgtcatcaactactccaaactccgcatctgggagtttgtggaatacagtaagatgatatacttggacggagacatacaggtgtttggtaacatagaccatttgtttgatttggatgatgggtatttctatgctgtgatggactgtttctgtgagaagacgtggagcaactcgctgcagtacaagattgggtactgccagcagtgcccggagaaggtgaagtggccggcggagatgggtccggagcctcctttctacttcaacgccagcatgtttatcttcgagcctaacctctccgtctatgacgatctccttagcactctcaagatcactcctgctagcacttttgctgagcaggactatttgaatacgttcttcgtagagacctacatgcccattacactaacctacaaccttggtttgcccatgctatggcgccacccagaacacgtcgaccttgaaagaaccaaagttgttcgctattgtactgccggttcaaagccatggaagtatactgggcaggaggagaacatggagagggaggatataaagatgttgcttggattacgggaactcatctgcaaacggacagccgtgaacggcggcgcttttggaggccggcgtagtccagtacattgcgcccacatcggctgcctagacgattcatga

SEQ ID NO: 140922 - protein, 316 aa, Vitis vinifera
MAPTLASATGLAKAGSISSRAYVTFLTGNGDYVKGVVGLAKGLRKVKTAYPLVVAVLPDVPAEHRRILKEQGCVVKEIEPVNPPENQTQFTMAYYVINYSKLRIWEFVEYSKMIYLDGDIQVFGNIDHLFDLDDGYFYAVMDCFCEKTWSNSLQYKIGYCQQCPEKVKWPAEMGPEPPFYFNASMFIFEPNLSVYDDLLSTLKITPASTFAEQDYLNTFFVETYMPITLTYNLGLPMLWRHPEHVDLERTKVVRYCTAGSKPWKYTGQEENMEREDIKMLLGLRELICKRTAVNGGAFGGRRSPVHCAHIGCLDDS

SEQ ID NO: 140923 - DNA, 1011 bp, Capsicum annuum
  CDS (1)..(1011)
atggcacctaatgtttttggtcttgcaaataaggcaactggtttggccaagacaaaaagtttgtctagccgtgcctatgtgacgtttttagctggaaacggtgattactggcaaggtgtagttggcttggttaagggattgcgtaaggcaaaatctgcttacccacttgttgtggcttgtttgcctgacgtccctgaggaacatcgacgtatactcatcaaccaaggttgtattgttcgagagatcgagccagtttatcccccggagaaccaaactcaatttgctatggcttattatgtcatcaactattccaaactccgtatatgggagtttgtggagtatagcaagatgatatacttggatggagatatccaggtgtttgataacatagaccacctttttgacttgccagatggttatttctatgcggtgatggattgtttctgtgagaaaacatggagtcacactccacaatacaaggttggatactgccaacagtgcccagataaggtccagtggactcaagacttgggccctaagccatcactctatttcaatgctggcatgtttgtctatgagccaagtctctccacttatgatgatctcttgaagaccctcaaagttacccctcctaccccatttgctgagcaggatttcttgaacatgtatttcagagatgtatacaagccaattccaaacaattacaacttagtattagctatgttgtggcgtcaccctgagaatgttgatcttgacaaggtaaaagttgttcactactgtgcagcggggtcaaaaccatggaggtacactggcaaagaagagaacatggacagagaagacattaagatgctaatcaaaaaatggtgggatatttacaatgacataacactagattacaagaatgccaacgtgactcctgttgttgatgaccaagttgaagctaacaaattaatgacagcgatatcagagcctgatgttctgcactacataactgctccatctgccgcttag

SEQ ID NO: 140924 - protein, 336 aa, Capsicum annuum
MAPNVFGLANKATGLAKTKSLSSRAYVTFLAGNGDYWQGVVGLVKGLRKAKSAYPLVVACLPDVPEEHRRILINQGCIVREIEPVYPPENQTQFAMAYYVINYSKLRIWEFVEYSKMIYLDGDIQVFDNIDHLFDLPDGYFYAVMDCFCEKTWSHTPQYKVGYCQQCPDKVQWTQDLGPKPSLYFNAGMFVYEPSLSTYDDLLKTLKVTPPTPFAEQDFLNMYFRDVYKPIPNNYNLVLAMLWRHPENVDLDKVKVVHYCAAGSKPWRYTGKEENMDREDIKMLIKKWWDIYNDITLDYKNANVTPVVDDQVEANKLMTAISEPDVLHYITAPSAA

SEQ ID NO: 140925 - DNA, 954 bp, Vitis vinifera
  CDS (1)..(954)
atggatgtaactactgatagagcatacgtcactttcttagctggaaatggagactatgtgaagggagtggtggggttggcaaagggtctgaggaaggcccggagcctgtacccactagtggtgcctgttctgcctgatgtgccggaggagcaccgccagattctgaagtcacaagggtgtattgtgagggagattgagcctgtgtacccgccggagaaccagacccagttttccatggcttatttcgtcatcaactactcaaagcttcgtatttgggaattcgtggagtacagcaagatgatatacttggatggagacatacaagtattcgaaaacatcgaccacctctttgactcacaagacggccatttctatgctgtgaaggactgtttttgtgagcagacatggagtcattccacccagtacaaaattggctactgtcagcagtgcccgaacaaggtggagtggaaggccgagctcggccctccaccgccgctctacttcaacgccggcatgttcgtcttcgagcccagtctctctacctactctaatctcctcgacactctcaaagtcacccctcctacttcatttgccgagcaggactttctgaacatgtttttcagagacgtctacgttccaatcccttctgaatacaaccttgtgttggccatgctgtggcggcaccccgaaaatgtggacctcaccaaagccaaagtgattcactattgtgcggcgggatcgaagccgtggaggttcacagggaaggaggagaacatggacagagaagatataaaggagttggtgaggaaatggtgggaaatatatgaagatgagacattggattataagacaagcttgaaggatcatgacgagaagtcaagccaggatgcgcttcttaccgcaatgtgtgaagctgggcttgtgcccatcaggcccgctcctcgagctgcatag

SEQ ID NO: 140926 - protein, 317 aa, Vitis vinifera
MDVTTDRAYVTFLAGNGDYVKGVVGLAKGLRKARSLYPLVVPVLPDVPEEHRQILKSQGCIVREIEPVYPPENQTQFSMAYFVINYSKLRIWEFVEYSKMIYLDGDIQVFENIDHLFDSQDGHFYAVKDCFCEQTWSHSTQYKIGYCQQCPNKVEWKAELGPPPPLYFNAGMFVFEPSLSTYSNLLDTLKVTPPTSFAEQDFLNMFFRDVYVPIPSEYNLVLAMLWRHPENVDLTKAKVIHYCAAGSKPWRFTGKEENMDREDIKELVRKWWEIYEDETLDYKTSLKDHDEKSSQDALLTAMCEAGLVPIRPAPRAA

SEQ ID NO: 140927 - DNA, 978 bp, Vitis vinifera
  CDS (1)..(978)
atggctcctactttggcctctgcaactggtttagccaaggctgccagcatttccagccgggcatatgtgactttcttggccggtaacggcgactacgtgaagggcgtggtggggctggccaaggggctgagaaaggtgaaaaccgcatacccacttgtggtggcggtactgccggacgtcccggcggagcaccgccgcattctggaggaccagggctgcgtcgtcagggagatcgagccggtgaacccgccggagaaccagacccagttcgccatggcctactacgtcatcaactactccaaactccgcatctgggagtttgtggagtacagtaagatgatatacttggacggagacatacaggtgtttggtaacatagaccatttgttcgatttggacaatgggtatttctatgctgtgatggactgtttctgtgagaagacgtggagcaactcgccgcagtacaagattgggtactgccagcagtgtccggagaaggtgcagtggccggcggagatgggtccagcacctcctctctacttcaacgccggcatgtttgtgtttgagccttgcctctccgtctatgatgatctccttaccactctcaagatcacaactcctacctcctttgccgagcaggactatttgaatatattcttcagggacatctacaggccaattccacccacctacaaccttgttttagccatgctatggcaccacccagagaacattgaccttcaaagaaccaatgttgttcactattgtgctgctggttcaaaaccatggaggtatactgggaaggaggagaacatggagagggaggatataaagatgttggtgaagaagtggtgggatatatacaatgatgagagcttggactacaggaactcatcagcaaatggacagcctttcacggcggtgctttcggaggccggcgaagtccaccactacattaccgccccatcggctgcctag

SEQ ID NO: 140928 - protein, 325 aa, Vitis vinifera
MAPTLASATGLAKAASISSRAYVTFLAGNGDYVKGVVGLAKGLRKVKTAYPLVVAVLPDVPAEHRRILEDQGCVVREIEPVNPPENQTQFAMAYYVINYSKLRIWEFVEYSKMIYLDGDIQVFGNIDHLFDLDNGYFYAVMDCFCEKTWSNSPQYKIGYCQQCPEKVQWPAEMGPAPPLYFNAGMFVFEPCLSVYDDLLTTLKITTPTSFAEQDYLNIFFRDIYRPIPPTYNLVLAMLWHHPENIDLQRTNVVHYCAAGSKPWRYTGKEENMEREDIKMLVKKWWDIYNDESLDYRNSSANGQPFTAVLSEAGEVHHYITAPSAA

SEQ ID NO: 140929 - DNA, 999 bp, Vitis vinifera
  CDS (1)..(999)
atggctcctactttggcctctgaaactggtttggccaaggcttatagcctttccgacagggcatatgtgacgttcttggccgaaaatggcgactacgtgaaaggcgtggtggggctggccaaggggctgagaaaggtgaaaaccgcatacccacttgtggtggcggtactgccggacgtccaggcggagcaccgccgcattctggaggaccagggctgcgtcgtcagggagatcgagcctgtgaacccgccggagaaccagacccagttcgccatggcctactacgtcatcaactactccaaactccgcatctggaagtttgtggagtacagtaagataatatacttggacggagacatacaggtgtttgataacatagatcatttgtttgatttgggtgatgggcatttccatgctgtgatggactgtttctgtgagagatcgtggagtaactcgccgcagtacaggattgggtactgccagctgtgcccggagaaggtgaagtggccggaggagatgggtccggagcctcctttctacttcaacgccggcatgtttatcttcgagcctaacctctccgtctatgaccatctcctcagcactctagtgatcactcctgctagcacttttgctgagcaggactatttgaatatgttcttcaaagacacctacaagcccattacactaacctacaaccttggtttgcccatgctatggcgccacccagaacacgttgacattgaaagaaccaaagttgttcgctattgtgctgccggttcaaagccatggaagtatactgggcaggaggagaacatggagagggaggatataaagatgttggtgaagaagtggtgggatatatacaatgatgagagcttggattacgggaactcatctgccttggattacaggaactcatctgcagacggaaagccattcacggtggcgctttcagaggccggcgtagtccactacattgccgccccatcggctgcctag

SEQ ID NO: 140930 - protein, 332 aa, Vitis vinifera
MAPTLASETGLAKAYSLSDRAYVTFLAENGDYVKGVVGLAKGLRKVKTAYPLVVAVLPDVQAEHRRILEDQGCVVREIEPVNPPENQTQFAMAYYVINYSKLRIWKFVEYSKIIYLDGDIQVFDNIDHLFDLGDGHFHAVMDCFCERSWSNSPQYRIGYCQLCPEKVKWPEEMGPEPPFYFNAGMFIFEPNLSVYDHLLSTLVITPASTFAEQDYLNMFFKDTYKPITLTYNLGLPMLWRHPEHVDIERTKVVRYCAAGSKPWKYTGQEENMEREDIKMLVKKWWDIYNDESLDYGNSSALDYRNSSADGKPFTVALSEAGVVHYIAAPSAA

SEQ ID NO: 140931 - DNA, 978 bp, Vitis vinifera
  CDS (1)..(978)
atggctcctactttggcctctgcaactggtttagccaaggctgccagcatttccagccgggcatatgtgactttcttggccggtaacggcgactacgtgaagggcgtggtggggctggccaaggggctgagaaaggtgaaaaccgcatacccacttgtggtggcggtactgccggacgtcccggcggagcaccgccgcattctggaagaccagggctgcgtcgtcagggagatcgagccggtgaacccgccggagaaccagacccagttcgccatggcctactacgtcatcaactactccaaactccgcatctgggagtttgtggagtacagtaagatgatatacttggacggagacatacaggtgtttagtaacatagaccatttgtttgatttggatgatgggtatttctatgctgtgatggactgtttctgtgagaagacgtggagcaactcgccgcagtacaagattgggtactgccagcagtgcccggagaaggtgaagtggccggcggagatgggtccagcaccccctctctacttcaacgccggcatgtttgtgtttgagccttgcctctccgtctatgatgatctccttaccactctcaagatcacaactcctacctcttttgccgagcaggactatttgaatatgttcttcagggacatctacaagcccattccacccacctacaaccttgttttagccatgctatggcgccacccagagaacattgaccttcaaataaccaatgttgttcactattgtgctgctggttcaaagccatggaggtatactgggaaggaggagaacatggacagggaagatataaagatgttggtgaagaagtggtgggatatatacaatgatgagagcttggactacaggaactcatcggcaaatggacagcctttcacggcggcactttcggaggccggcgtagtccaccacttcattactgcctcatcggctgcctag

SEQ ID NO: 140932 - protein, 325 aa, Vitis vinifera
MAPTLASATGLAKAASISSRAYVTFLAGNGDYVKGVVGLAKGLRKVKTAYPLVVAVLPDVPAEHRRILEDQGCVVREIEPVNPPENQTQFAMAYYVINYSKLRIWEFVEYSKMIYLDGDIQVFSNIDHLFDLDDGYFYAVMDCFCEKTWSNSPQYKIGYCQQCPEKVKWPAEMGPAPPLYFNAGMFVFEPCLSVYDDLLTTLKITTPTSFAEQDYLNMFFRDIYKPIPPTYNLVLAMLWRHPENIDLQITNVVHYCAAGSKPWRYTGKEENMDREDIKMLVKKWWDIYNDESLDYRNSSANGQPFTAALSEAGVVHHFITASSAA

SEQ ID NO: 140933 - DNA, 975 bp, Vitis vinifera
  CDS (1)..(975)
atggctcctactttggcttctgcaactggtttggccaaggctgccagcatttccagccgggcatatgtgacgttcttggccggaaacggcgactacgtgaagggcgtggtggggctggccaaggggctgagaaaggtgaaaaccgcatacccacttgtggtggcggtactgccggacgtcccggcggagcaccgccgcattctggaggaccagggctgcgtcgtcagggagatcgagccggtgaacccgccggagaaccagacccagttcgccatggcctactacgtcatcaactactccaaactccgcatctgggagtttgtggaatacagtaagatgatatacttggacggagacatacaggtgtttggtaacatagaccatttgtttgatttggatgatgggtatttctatgctgtgatggactgtttctgtgagaagacgtggagcaactcgccgcagtacaagattgggtactgccagcagtgcccggagaaggtgaagtggccggcggagatgggtccagcaccccctctctacttcaacgccggcatgtttgtgtttgagccttgcctctccgtctatgatgatctccttaccactctcaagatcacaactcctacctcctttgccgagcaggactatttgaatatgttcttcagggacatctacaggcccattccacccacctacaaccttgttttagccatgctatggcgccacccagagaacattgaccttcaaagaaccaatgttgttcactattgtgctgctggttcaaagccatggaggtatactgggaaggaggagaacatggagagggaggatataaagatgttggtgaagaagtggtgggatacatacaatgacgagagcttggattacaggaactcatctgcagacggaaagccattcacggtggcgctttcagaggccggcgtagtccactactttgccgccccatcggctgcctag

SEQ ID NO: 140934 - protein, 324 aa, Vitis vinifera
MAPTLASATGLAKAASISSRAYVTFLAGNGDYVKGVVGLAKGLRKVKTAYPLVVAVLPDVPAEHRRILEDQGCVVREIEPVNPPENQTQFAMAYYVINYSKLRIWEFVEYSKMIYLDGDIQVFGNIDHLFDLDDGYFYAVMDCFCEKTWSNSPQYKIGYCQQCPEKVKWPAEMGPAPPLYFNAGMFVFEPCLSVYDDLLTTLKITTPTSFAEQDYLNMFFRDIYRPIPPTYNLVLAMLWRHPENIDLQRTNVVHYCAAGSKPWRYTGKEENMEREDIKMLVKKWWDTYNDESLDYRNSSADGKPFTVALSEAGVVHYFAAPSAA

SEQ ID NO: 140935 - DNA, 1029 bp, Vitis vinifera
  CDS (1)..(1029)
atggctcctgaaatcatctccgcttcgggaaaaccgtccagatttttgaaaccggctagtcttccggacagagcatacgtggccttcttggccggtaacggggactacgtgaaaggtgttgttgggttagccaaggggctgcggaaggtgaaatccgcttacccgcttgtggtggcggtgttaccggacgtgccggtggagcaccgccgagaactggaatcccaggggtgcatcgtcagagagattgagccggtttacccacccgagaaccagacccagttcgccatggcctattacgttatcaattattcaaagctccgtatctgggagttcgtggagtacagtaagatgatatacttggatggggatattcaagtctacgataacattgaccacctctttgagctaccagacggacatttctatgcagtgatggactgtttctgtgagaaaacatggagtcacacgccacagtacaagattggagactgccaacagtgtccggaaaaggttcagtggccggcggagctgggtcagccgccttcactttacttcaacgcaggcatgtttgtgtttgagcccagcctctccacctatgaagatctctgggaaaccctcaggatcacccctgcaaccccttttgcagagcaggatttcttgaatatgtacttcagcgatgtatataagcctattcctctggtctacaatcttgtccttgccatgctgtggcggcatcctgagaatgtagagcttgataaagtgaaagttgttcactactgtgcagcggggtcgaagccatggaggtacacagggaaggaggacaacatgcagagagaggacattaagatgctggtaaacaaatggtgggagatatacaatgacaagtcattggattacaagaagacgaggatgatggcgaatgattacagcagtgttttgccgggggagcaggtgaatttggagccgttcattgcagctctttccgaggtggggcatgttgaatttgtgagagccccttcagcagcctag

SEQ ID NO: 140936 - protein, 342 aa, Vitis vinifera
MAPEIISASGKPSRFLKPASLPDRAYVAFLAGNGDYVKGVVGLAKGLRKVKSAYPLVVAVLPDVPVEHRRELESQGCIVREIEPVYPPENQTQFAMAYYVINYSKLRIWEFVEYSKMIYLDGDIQVYDNIDHLFELPDGHFYAVMDCFCEKTWSHTPQYKIGDCQQCPEKVQWPAELGQPPSLYFNAGMFVFEPSLSTYEDLWETLRITPATPFAEQDFLNMYFSDVYKPIPLVYNLVLAMLWRHPENVELDKVKVVHYCAAGSKPWRYTGKEDNMQREDIKMLVNKWWEIYNDKSLDYKKTRMMANDYSSVLPGEQVNLEPFIAALSEVGHVEFVRAPSAA

SEQ ID NO: 140937 - DNA, 1023 bp, Vitis vinifera
  CDS (1)..(1023)
atggctcctgaaatcatctccgcttcgggaaaaccgtccggatttttgaaaccggctagtcttccggacagagcatacgtggccttcttggccggtaacggggactacgtgaaaggtgttgttgggttagccaaggggctgcggaaggtgaaatccgattacccgcttgtggtggcggtgttaccggacgtgccggtggagcacagccgagaactggaatcccaggggtgcatcgtcagagagattgtgccggtttacaagaaccagacccagttcgccatggcctattacgttatcaattattcaaagatccgtatctgggagttcgtggagtacagtaagatgatatacttggatggggatattcaagtctacgataacattgaccacctctttgagctaccagacggacatttctatgcagtgatggactgtttctgtgagaaaacatggagtcacacgccacagtacaagattggagactgccaacagtgtccggaaaaggttcagtggccggcggagctgggtcagccgccttcactttacttcaacgcaggcatgtttgtgtttgagcccagcctctccacctatgaagatctctgggaaaccctcaggatcacccctgcaaccccttttgcagagcaggatttcttgaatatgtacttcagggatgtatataagcctattcctctggtctacaatcttgtccttgccatgctgtggcggcatcctgagaatgtagagcttgataaagtgaaagttgttcactactgtgcagcggggtcgaagccatggaggtacacagggaaggaggacaacatgcagagagaggacattaagatgctggtaaacaaatggtgggagatatacaatgacaagtcattggattacaagaagacgaggatgatggcgaatgattacagcagcgttttgccgggggagcaggtgaatttggagcctttcattgcagctctttccgaggtggggcatgttgaatttgtgagagccccttcagcagcctag

SEQ ID NO: 140938 - protein, 340 aa, Vitis vinifera
MAPEIISASGKPSGFLKPASLPDRAYVAFLAGNGDYVKGVVGLAKGLRKVKSDYPLVVAVLPDVPVEHSRELESQGCIVREIVPVYKNQTQFAMAYYVINYSKIRIWEFVEYSKMIYLDGDIQVYDNIDHLFELPDGHFYAVMDCFCEKTWSHTPQYKIGDCQQCPEKVQWPAELGQPPSLYFNAGMFVFEPSLSTYEDLWETLRITPATPFAEQDFLNMYFRDVYKPIPLVYNLVLAMLWRHPENVELDKVKVVHYCAAGSKPWRYTGKEDNMQREDIKMLVNKWWEIYNDKSLDYKKTRMMANDYSSVLPGEQVNLEPFIAALSEVGHVEFVRAPSAA

SEQ ID NO: 140939 - DNA, 957 bp, Vitis vinifera
  CDS (1)..(957)
atggatgtaactactgatagagcatacgtcactttcttagctggaaatggcgactatgtgaagggagtggtggggttggcaaagggtttgaggaaggtccggagcctgtacccactagtggtgcctgttctgcctgatgtgccggaggagcaccgccagattctgaagtcacaagggtgtattgtgagggagattgagcctgtgtacccgccggagaaccagacccagttttccatggcttattacgtcatcaactactcaaagcttcgtatttgggaattcgtggagtacagcaagatgatatacttggatggagacatacaagtattcgaaaacatcgaccacctctttgactcacaagacggccatttctatgctgtgaaggactgtttttgtgagcagacatggagtcattccacccagtacaaaattggctactgtcagcagtgcccgaacaaggtggagtggaaggccgagcttggccctccaccgccgctctacttcaacgccggcatgttcgtcttcgagcccagtctctctacctactctaatctcctcgacactctcaaagtcacccctcctacttcatttgccgagcaggactttctgaacatgtttttcagagacgtctacgttccaatcccttctgaatacaaccttgtgttggccatgctgtggcggcaccccgaaaatgtggacctcaccaaagccaaagtggttcactattgtgcggcgggatcgaagccgtggaggttcacagggaaggaggaaaacatggagagagaagatataaaggagttggtgaggaaatggtgggaaatatatgaagatgagacattggattataagacaagcttgaaggatcatgatgacgagaagccaagccaggatgcgcttcttaccgcaatgtgtgaagctgggcttgtgcccatcaggcccgctcctcgagctgcatag

SEQ ID NO: 140940 - protein, 318 aa, Vitis vinifera
MDVTTDRAYVTFLAGNGDYVKGVVGLAKGLRKVRSLYPLVVPVLPDVPEEHRQILKSQGCIVREIEPVYPPENQTQFSMAYYVINYSKLRIWEFVEYSKMIYLDGDIQVFENIDHLFDSQDGHFYAVKDCFCEQTWSHSTQYKIGYCQQCPNKVEWKAELGPPPPLYFNAGMFVFEPSLSTYSNLLDTLKVTPPTSFAEQDFLNMFFRDVYVPIPSEYNLVLAMLWRHPENVDLTKAKVVHYCAAGSKPWRFTGKEENMEREDIKELVRKWWEIYEDETLDYKTSLKDHDDEKPSQDALLTAMCEAGLVPIRPAPRAA

SEQ ID NO: 140941 - DNA, 1011 bp, Vitis vinifera
  CDS (1)..(1011)
atggccccaggagtgcccgcagatgtgtttacagccggcggaaaggtttccaccctcaacgcaggctactcaaagggggcctacgtcacatttttagctggaaacggggactatgtgaaaggggttgttgggttggctaagggtttgcgcaaggtgaagagcgcgtaccctcttgtggttgcaatgttgccggatgtgcctgaggagcaccgtgagatcttaaagtctcagggctgcataattcgtgaaattgagcccatctaccctcctgagaaccaaatccagtttgcaatggcatactacgtcatcaactattccaaactccgtatttggaatttcgaggaatacagcaagatggtgtatttggatgctgatatccaagtttacgacaacatagaccaccttatggacgccccggacggctacttttacgcggtaatggactgcttctgtgagaagacatggagtcacactccccagtactccgtcggctactgccagcagtgcccggacaaggtgacttggcccgctgagatgggttcacctccacctttgtacttcaacgctgggatgttcgtctttgagcctagccgtttgacttatgaaagccttctccatactctacggatcactcctccgaccgcctttgccgagcaagatttcttgaacatgttcttccaacatatgtacaagcccatccctctcgtatacaacttggttctagcaatgctgtggcgacacccggagaacgttgagctcgaccaggtcaaggtggtgcactactgtgctgctggatcaaagccatggagatacactgggaaagaagcaaacatggagagagaggacatcaagatgttggtagccaaatggtgggacatttacaatgataagtctctggatttcaaggctgaggacagtgttccagagggagaaggattctctaggccatcgatcatggcttccatgcctgagcctgcaatctcctatattcccgcaccctctgctgcttga

SEQ ID NO: 140942 - protein, 336 aa, Vitis vinifera
MAPGVPADVFTAGGKVSTLNAGYSKGAYVTFLAGNGDYVKGVVGLAKGLRKVKSAYPLVVAMLPDVPEEHREILKSQGCIIREIEPIYPPENQIQFAMAYYVINYSKLRIWNFEEYSKMVYLDADIQVYDNIDHLMDAPDGYFYAVMDCFCEKTWSHTPQYSVGYCQQCPDKVTWPAEMGSPPPLYFNAGMFVFEPSRLTYESLLHTLRITPPTAFAEQDFLNMFFQHMYKPIPLVYNLVLAMLWRHPENVELDQVKVVHYCAAGSKPWRYTGKEANMEREDIKMLVAKWWDIYNDKSLDFKAEDSVPEGEGFSRPSIMASMPEPAISYIPAPSAA

SEQ ID NO: 140943 - DNA, 1041 bp, Picea sitchensis
  CDS (1)..(1041)
atgaatccagaaattcctcctgtagatctgctcttcagggctaaggctgcggcggccaagaagaactgtagagcgtacgtgactttcttggctggatgtggcgactacgtgaaaggtgttgtcggtcttgcaaagggtctccggaaggtgaagagcgcatatcctcttgttgttgctgttttggccgatgttccagaggatcatcgcctgcaattgcgcagacagggttgtattgttcgccagattcaaccaatcgacccccccgacaatgaagtgcaattctcaatgccttactatgtcctcaactactccaaactccgtatttgggagtttgaggagtacagcaagatggtatatctggacgcagacatccaagtcttccacaacattgatcacctctttgacatgcgagatggatatttctatgcggttatggattgcttctgcgagaagacatggagtcacactccgcagtacaacatcggatactgccagcagtgcccagaaaaggtgtcgtggcccaccgaattagggcagcggccttctctgtactttaacgctggaatgtttgtgtttgagcccagtcagctgaccttcgattgccttttagagactctcatggccactgtgccaacgcccttcgcagaacaggatttcttgaacatgttttttgagaagatatacaagcctattccgttggtgtacaatctggttctggccatgatgtggcgacatccccagaacgtggacttggacactgtcaaagttgttcactattgtgcagctggatcgaagccgtggaggttcagtggaaatgaggaaaatatggagagggaagatataaagacgttggtgcagaaatggtggaacatatataatgacccctctctggatcacttgggatctggagacacaattccagatccaatttcagaggtggacggaaaatcaaatgatctgcaacaagtggctgctgctaattctttcctggctgcggtgccaacatacccaaacttaatgcctgctccgcctgcagcttaa

SEQ ID NO: 140944 - protein, 346 aa, Picea sitchensis
MNPEIPPVDLLFRAKAAAAKKNCRAYVTFLAGCGDYVKGVVGLAKGLRKVKSAYPLVVAVLADVPEDHRLQLRRQGCIVRQIQPIDPPDNEVQFSMPYYVLNYSKLRIWEFEEYSKMVYLDADIQVFHNIDHLFDMRDGYFYAVMDCFCEKTWSHTPQYNIGYCQQCPEKVSWPTELGQRPSLYFNAGMFVFEPSQLTFDCLLETLMATVPTPFAEQDFLNMFFEKIYKPIPLVYNLVLAMMWRHPQNVDLDTVKVVHYCAAGSKPWRFSGNEENMEREDIKTLVQKWWNIYNDPSLDHLGSGDTIPDPISEVDGKSNDLQQVAAANSFLAAVPTYPNLMPAPPAA

SEQ ID NO: 140945 - DNA, 1038 bp, Picea sitchensis
  CDS (1)..(1038)
atgaatccagaaatttctcctgtagatctgctcttcggggctaaggctgcggcggccaagaagaactgtagagcgtacgtgactttcttggcgggatgtggcgactacgtgaaaggtgttgtcggtcttgcaaagggtttgcgcaatgtgaaaagcgcatatcctcttgttgttgctgttttggccgatgttccagaggatcaccgcctgcaattgcgcagacagggttgtattgttcgccagattcaaccaatcgacccccccgacaatgaagtgcaattctcaatgccttactatgtcctcaactactccaaactccgtatttgggagtttgaggagtacagcaagatggtatatctggacgcagacattcaagtcttcgacaacatcgatcacctctttgacttgcgggatggatatttctatgcggttatggattgcttctgcgagaagacatggagtcatactccgcagtacaagatcggatactgccagcagtgcccagaaaaggtgtcgtggcccatcgaattagggcagcggccttctctgtactttaacgctggaatgttcgtgtttgagcccagtcagctgaccttcgattgccttttagagactctcatggctactgtgccaacgcccttcgcagaacaggatttcttgaacatgttttttgagaagatatacaagcctatccctctggcgtacaatctggttctggccatgatgtggcgacatccccagaacgtggacttggacactgtcaaagttgttcactattgtgcagctggatcgaagccgtggaggttcagtgggaaggaggaaaacatggagagggaagatataaagacgttggtgcagaaatggtgggacatatacaatgacccctctctcgatcacttgggatcaggagacacagttccagatccaatttcagaggctgacggaaaatcaaatgatctgcaacaagtggctgcaaattctttccttgctgagatgccaacatgccccaacttaatgcctgctccgcctgcagcttaa

SEQ ID NO: 140946 - protein, 345 aa, Picea sitchensis
MNPEISPVDLLFGAKAAAAKKNCRAYVTFLAGCGDYVKGVVGLAKGLRNVKSAYPLVVAVLADVPEDHRLQLRRQGCIVRQIQPIDPPDNEVQFSMPYYVLNYSKLRIWEFEEYSKMVYLDADIQVFDNIDHLFDLRDGYFYAVMDCFCEKTWSHTPQYKIGYCQQCPEKVSWPIELGQRPSLYFNAGMFVFEPSQLTFDCLLETLMATVPTPFAEQDFLNMFFEKIYKPIPLAYNLVLAMMWRHPQNVDLDTVKVVHYCAAGSKPWRFSGKEENMEREDIKTLVQKWWDIYNDPSLDHLGSGDTVPDPISEADGKSNDLQQVAANSFLAEMPTCPNLMPAPPAA

SEQ ID NO: 140947 - DNA, 1026 bp, Picea sitchensis
  CDS (1)..(1026)
atggcacctgaggttccttcaggggcgtttggagggtcgaaggtgggtgcccttaccagcgggtataactcgaagagaggatacgttaccttcctggcgggtaatggagactactggaagggcgttgtagggctcgctaaaggccttcgtaaggtcaatagcgcttaccctctcgttgttgccatgttgcctgatgttccagaggagcacagggagattttgaggagccaaggatgtatatgtcgcgagatcgtccctatctaccctcctgaaaatcaagtgcagttcgccatggcctattatgtcatcaactactctaagctacgtatatgggagtttgaagagtacagcaagatggtatacctggacgcagacatccaagtctttgagaacatcgacaatctcttcgacatgccggatggctacttctatgctgtcatggactgtttctgcgagaagacatggagtcacactccacagtataagataggctactgccagcagtgcccagacaaagttcaatggtcctctgaactaggccttcctcctgcgctctatttcaacgctggcatgtttgtcttcgagcctagcaagttaaccttcgacagcctcatcgaaactctcaggattacagctcctactccctttgcagaacaggatttcttaaacatgtatttccagaagatgtacaagcccatccctctcgtttacaacctggttctagcaatgctatggcgacacccagaaaatgtcgatctagacaaagttaaggtcgtccactactgcgcagctggatccaagccctggaggtacacgggcaaggaggcgaacatgcagagggaagatataaaagtattagtgcaaaaatggtgggatgtatatgacgacgagtctctggatttcaaggcagaggattcaattcctgaggccgaaacactttcggacttgcaacaaattacagcgaattcgttattggctgcaattcccacggccgctgccttcattcccactccttctgcagcttga

SEQ ID NO: 140948 - protein, 341 aa, Picea sitchensis
MAPEVPSGAFGGSKVGALTSGYNSKRGYVTFLAGNGDYWKGVVGLAKGLRKVNSAYPLVVAMLPDVPEEHREILRSQGCICREIVPIYPPENQVQFAMAYYVINYSKLRIWEFEEYSKMVYLDADIQVFENIDNLFDMPDGYFYAVMDCFCEKTWSHTPQYKIGYCQQCPDKVQWSSELGLPPALYFNAGMFVFEPSKLTFDSLIETLRITAPTPFAEQDFLNMYFQKMYKPIPLVYNLVLAMLWRHPENVDLDKVKVVHYCAAGSKPWRYTGKEANMQREDIKVLVQKWWDVYDDESLDFKAEDSIPEAETLSDLQQITANSLLAAIPTAAAFIPTPSAA

SEQ ID NO: 140949 - DNA, 1017 bp, Populus trichocarpa
  CDS (1)..(1017)
atggccccaggagtgcctatagatgggaatattttgggtaccgggaaggtttccacagttaacactggctattctaagagggcctacgtgacatttttagccggcaacggggattatgttaaaggggtagttgggttggctaagggtttgcgcaaggtgaagagtgcataccctcttgtcgtagcaatcttgccggatgtgcccgaggaacaccgtgacattttgaggtctcaaggttgcattgttcgtgagatcgagcctatttatccacctgagaaccagattcagtttgccatggcctactacgtgatcaactactccaagctccgaatttggaattttgaggagtacagcaagatgatatatttggatgctgatatccaagtgttcgagaatatagaccatctatttgacacccaagatggctacttctacgccgtgatggactgcttctgtgagaaaacatggagccactcccctcaatactccgtcggctactgccagcagtgcccggaaaagataacatggcctgctgagatgggctctcctcctcccctgtacttcaatgctgggatgtttgtatttgagcctagtcgtttgacttatgagagccttcttgagaggctgcagatcaccccaccaaccccctttgccgagcaagatttcttgaatatgtttttccaaaaaacatacaagccaatccctctgctttacaacctggttttagccatgttatggcgacatcctgagaacgtggaggtcgagaaggttaaagtggttcactactgtgctgctggttcaaaaccttggagatatactggcgaggaagctaacatggatagagaggacatcaagatgttagtggcaaaatggtgggatatatataatgatgagtccctcgatttcaatggcgaaaactcagttccagaagaagaaacaatattctcgaggtcatccatcttgtcttccatgcctgagcctgccatatcctacgtccctgcaccaactgctgcttaa

SEQ ID NO: 140950 - protein, 338 aa, Populus trichocarpa
MAPGVPIDGNILGTGKVSTVNTGYSKRAYVTFLAGNGDYVKGVVGLAKGLRKVKSAYPLVVAILPDVPEEHRDILRSQGCIVREIEPIYPPENQIQFAMAYYVINYSKLRIWNFEEYSKMIYLDADIQVFENIDHLFDTQDGYFYAVMDCFCEKTWSHSPQYSVGYCQQCPEKITWPAEMGSPPPLYFNAGMFVFEPSRLTYESLLERLQITPPTPFAEQDFLNMFFQKTYKPIPLLYNLVLAMLWRHPENVEVEKVKVVHYCAAGSKPWRYTGEEANMDREDIKMLVAKWWDIYNDESLDFNGENSVPEEETIFSRSSILSSMPEPAISYVPAPTAA

SEQ ID NO: 140951 - DNA, 1011 bp, Populus trichocarpa
  CDS (1)..(1011)
atggctccaggagtgcccatggatgtgatttcctgcaccggcaaggtttccacggctagcactggctactctaaaagggcctttgtaacatttttagccggaaatggggattatgttaaaggggtagttgggttggcgaagggtttgcgcaaggtgaagagtgcataccctctggtggtagcaatgttgccagatgtgcctgaggaacaccgtgacattttgaggtctcaaggttgcattgttcgtgagattgagcctatttatccacctgagaaccagattcagtttgccatggcctactacgtgatcaactactccaagctccgcatttggaatttcgaggagtacagcaagatgatgtatttggatgctgatatccaagtgttcgagaatatagaccatctatttgacacccaagatggctacttctatgccgtgatggactgcttctgtgagaaaacctggagccactcaccacaacactctatcggttactgccagcagtgcccggaaaaggtgacatggcctgctgagatgggctctcctcctcccttgtacttcaatgctgggatgtttgtctttgagcctagtcgtttgacttatgagagccttcttgaaactctccagattaccccaccaaccccatttgccgagcaagatttcttaaatatgtttttccaaaaaacatacaagccaatccctctaatgtacaacctggttttagccatgttatggcgacatcctgagaatgtggaggtcgaaaaggttaaagtggttcactactgtgctgctggttcaaaaccttggagatatactggcaaggaagctaacatggacagagaggacatcaagatgctagtggcaagatggtgggacatatataataacgagtccctcgatttcaaggctgagaactcagttccagaagaagaaacattgtcgaggtcatccatcttgtcttccaagcctgagcctgccatttcctacatctctgcgccatctgctgcttaa

SEQ ID NO: 140952 - protein, 336 aa, Populus trichocarpa
MAPGVPMDVISCTGKVSTASTGYSKRAFVTFLAGNGDYVKGVVGLAKGLRKVKSAYPLVVAMLPDVPEEHRDILRSQGCIVREIEPIYPPENQIQFAMAYYVINYSKLRIWNFEEYSKMMYLDADIQVFENIDHLFDTQDGYFYAVMDCFCEKTWSHSPQHSIGYCQQCPEKVTWPAEMGSPPPLYFNAGMFVFEPSRLTYESLLETLQITPPTPFAEQDFLNMFFQKTYKPIPLMYNLVLAMLWRHPENVEVEKVKVVHYCAAGSKPWRYTGKEANMDREDIKMLVARWWDIYNNESLDFKAENSVPEEETLSRSSILSSKPEPAISYISAPSAA

SEQ ID NO: 140953 - DNA, 1005 bp, Arabidopsis thaliana
  CDS (1)..(1005)
atggcccctgagatttccgtaaacccgatgtatttatccgaaaaggcgcatcaagcacctccaaggagagcttatgtgacgtttttggcaggaaatggagactacgtgaagggagtggtgggactagcaaagggtttgcgtaaggtcaaaagtgcgtatcctcttgttgttgctatgttacctgatgtgcctgaggaacatagagagatcttgaggtctcaaggctgtgtcgtgcgtgagatcgaacctgtttatcctcaagacaaccaagttgagtttgccatggcttattacgttctcaactactcaaaacttcgtatttggaactttgaagagtacagcaagatgatataccttgacgcagatattcaagtctttgacaatatcgatcacctctttgatttgtctgatgcatatttctatgccgtgatggactgtttctgtgagaaaacatggagccactcgctgcagtattcaattgggtattgtcaacagtgcccggagaaggtcacgtggccagaagatatggaatctccacctcctcctctgtatttcaacgccggtatgtttgtgtttgagcctagtcctttgacttatgagagtctccttcagaccctggagatcacaccaccttcaccgtttgcagaacaagattttctcaatatgttctttgagaaagtgtacaaaccgatccctttggtatacaatctggttttggctatgctttggcgtcacccggagaacgtggagctggagaaagtcaaagttgttcactactgtgcagctggatccaagccatggagatacacaggagaagaagctaacatggacagagaagacatcaagatgttagttgataaatggtgggatgtctataatgatgaatctctcgatttcaaatcgaaaatccctgcagatgcggaagaaaccgttacaaaatcaagcatcctagcttccgttcttgaaccagaaatgacctactttcctgctccttctgctgcttga

SEQ ID NO: 140954 - protein, 334 aa, Arabidopsis thaliana
MAPEISVNPMYLSEKAHQAPPRRAYVTFLAGNGDYVKGVVGLAKGLRKVKSAYPLVVAMLPDVPEEHREILRSQGCVVREIEPVYPQDNQVEFAMAYYVLNYSKLRIWNFEEYSKMIYLDADIQVFDNIDHLFDLSDAYFYAVMDCFCEKTWSHSLQYSIGYCQQCPEKVTWPEDMESPPPPLYFNAGMFVFEPSPLTYESLLQTLEITPPSPFAEQDFLNMFFEKVYKPIPLVYNLVLAMLWRHPENVELEKVKVVHYCAAGSKPWRYTGEEANMDREDIKMLVDKWWDVYNDESLDFKSKIPADAEETVTKSSILASVLEPEMTYFPAPSAA

SEQ ID NO: 140955 - DNA, 1002 bp, Fagopyrum esculentum
  CDS (1)..(1002)
atggcaccagaactcatcacaatcggagccgatcactcgattttgccagcggaatcgttgattccggttgaccgagcttacgtgacgtttctcgccgggaacggagactatgtcaagggagttgtcggattagcaaagggactgaggaaagtgaaggctgcttatcctcttgttgtagcggttttaccggacgttccgctagagcatcgccgactcctggaggcgcagggttgtatcgtaagggaaatcgagccgatatacccgccggaaaacaattgcgagttcgctcacgcatactatgtcatcaactactccaagcttcgcatctgggagtttgtggagtacagtaagatgatatacttggacggggacatacaggtgtaccagaacattgaccacctgtttgaccagccggacggctacttttacgcggtgatggactgtttttgtgagccatcatggagcaagacgattcagtacaagatcggatactgccaacagtgcccggagaaggtagcgtggccgttggaggctggcccgaagccttctctgtacttcaatgccggattctttgtttacgagccgagccttgagacttacaaggatctcattgacactctcaaagtcacgactcctacctcctttgccgagcaggacttcttgaacatgtacttcaaggacaagttcaagccactccccatagactacaacttagtcttagccttcctgtggaggcatccggagaaagttgaccttaaccgagtgaaggtagttcactactgtgcggcggggtctaagccatggaggtacacgggcaaggaagagaacatggacagagaagacatcaaattgcttgtgaaaaaatggtgggatatctacaacgacgagtcattggacctcaagaaaccggtccatttagtgcagcagcccacggaggtgctcaaggcggcgctctcggaggctaggcctgttaaatatgtggctgctccttccgcagcttaa

SEQ ID NO: 140956 - protein, 333 aa, Fagopyrum esculentum
MAPELITIGADHSILPAESLIPVDRAYVTFLAGNGDYVKGVVGLAKGLRKVKAAYPLVVAVLPDVPLEHRRLLEAQGCIVREIEPIYPPENNCEFAHAYYVINYSKLRIWEFVEYSKMIYLDGDIQVYQNIDHLFDQPDGYFYAVMDCFCEPSWSKTIQYKIGYCQQCPEKVAWPLEAGPKPSLYFNAGFFVYEPSLETYKDLIDTLKVTTPTSFAEQDFLNMYFKDKFKPLPIDYNLVLAFLWRHPEKVDLNRVKVVHYCAAGSKPWRYTGKEENMDREDIKLLVKKWWDIYNDESLDLKKPVHLVQQPTEVLKAALSEARPVKYVAAPSAA

SEQ ID NO: 140957 - DNA, 1065 bp, Fagopyrum esculentum
  CDS (1)..(1065)
atgacttccgagatggcgccacagaacataacgaatgcagaaagaggagccgagcaagtgaagccgtcgagccagccaagccgagcctacgtgacattcttagccgggaacggtgactacgtgaagggagttatagggctcgccaaaggcctgaggaaaactcagagcggttacccgcttgtggtggcggttctccctgacgttccgcaggagcaccgccgtatgctggtggcgcaaggctgtataataaaggaaatccagcccgttaacccgcccgataaccagactcagtttgccatggcttattacgtcatcaactactccaagctccgtatatgggagtttatcgagtatagtaagatgatatatcttgatggagacatccaagtttacgacaacatcgaccacctcttcgacctaccagacgggtacttgtacggtgccatggattgcttttgcgagaagacttggagtcattcgcttccatataagattgggtattgccaacagtgcccggacagggtccagtggcccgaaaggctcggcccaaaaccaacactctacttcaatgcagggatgttcatcttcgagcctagcgtttctacttataatgatctccttcatacactcgagatcacccctcctacaccttttgctgagcaggactttttgaatatgtacttcaaggatgtgtacagaccaattccgaacgtttacaacttggtattggctttgttgtggtatcatcctgggttaatgaagcttgatgaggttaaagtcgttcactattgtgccgatggttcaaaaccatggcggtatacagggaagggggataacatggacagggaagacgttaggatgctagtgaagaagtggtgggagatttacgatgatcagtctctcgaccctcagcctaagatggtcgagggcaagaagttcgacaaattagaggagtacagcgagtccctcgaccacccgcccaaggtggcagaggaagataagctagagaagcccatggcagcgatgacaggcttcagctacgtacacgccccgtctgctgcctga

SEQ ID NO: 140958 - protein, 354 aa, Fagopyrum esculentum
MTSEMAPQNITNAERGAEQVKPSSQPSRAYVTFLAGNGDYVKGVIGLAKGLRKTQSGYPLVVAVLPDVPQEHRRMLVAQGCIIKEIQPVNPPDNQTQFAMAYYVINYSKLRIWEFIEYSKMIYLDGDIQVYDNIDHLFDLPDGYLYGAMDCFCEKTWSHSLPYKIGYCQQCPDRVQWPERLGPKPTLYFNAGMFIFEPSVSTYNDLLHTLEITPPTPFAEQDFLNMYFKDVYRPIPNVYNLVLALLWYHPGLMKLDEVKVVHYCADGSKPWRYTGKGDNMDREDVRMLVKKWWEIYDDQSLDPQPKMVEGKKFDKLEEYSESLDHPPKVAEEDKLEKPMAAMTGFSYVHAPSAA

SEQ ID NO: 140959 - DNA, 987 bp, Glycine max
  CDS (1)..(987)
atggctcctaatatcaccactgtcaaaaccaccatcaccgacgctcaagccaaggtcgccaccgatcatggtcgtgcctacgtcaccttcctcgccggaaacggtgactatgtgaaaggtgtcgttggcttggcaaaaggtctgagaaaagtgaagagcatgtaccctctggtggttgcagtgctacccgatgttccccaagatcaccgcaacattctcacctcccaaggttgcattgttagagagattgagcccgtgtaccccccagagaatcaaacccagtttgccatggcatattacgtcatcaactattccaagctacgtatttgggagtttgtggagtacagcaagatgatatacctagacggtgatatccaagtttttgacaacattgaccacttgtttgacttgcctgataactacttctatgcggtgatggactgtttctgtgagccaacttggggccacactaaacaatatcagatcggttactgccagcagtgcccccataaggttcagtggcccactcactttgggcccaaacctcctctctatttcaatgctggcatgtttgtgtatgagcccaatttggctacttaccgtgacctccttcaaacagtccaagtcacccagcccacttcctttgctgaacaggattttttgaacatttacttcaaggacaaatataggccaattcctaatgtctacaatcttgtgctggccatgctgtggcgtcaccctgagaacgttgagcttgacaaagttaaagtggttcactactgtgctgctgggtctaagccttggaggtacactgggaaggaggagaatatggagagagaagatatcaagatgttagtgaaaaagtggtgggatatatatgaggatgagactttggactacaacaatccactcaatgtggataagttcactgcggcacttatggaggttggtgaagtcaagttcgtccgtgccccatctgctgcttaa

SEQ ID NO: 140960 - protein, 328 aa, Glycine max
MAPNITTVKTTITDAQAKVATDHGRAYVTFLAGNGDYVKGVVGLAKGLRKVKSMYPLVVAVLPDVPQDHRNILTSQGCIVREIEPVYPPENQTQFAMAYYVINYSKLRIWEFVEYSKMIYLDGDIQVFDNIDHLFDLPDNYFYAVMDCFCEPTWGHTKQYQIGYCQQCPHKVQWPTHFGPKPPLYFNAGMFVYEPNLATYRDLLQTVQVTQPTSFAEQDFLNIYFKDKYRPIPNVYNLVLAMLWRHPENVELDKVKVVHYCAAGSKPWRYTGKEENMEREDIKMLVKKWWDIYEDETLDYNNPLNVDKFTAALMEVGEVKFVRAPSAA

SEQ ID NO: 140961 - DNA, 978 bp, Medicago sativa
  CDS (1)..(978)
atgtctcctgatatcataactgctgcaaccaacatcaccaacactcaatctaaggccacaaaacgtgccttcgtcaccttccttgctggaaatggtgattatgtgaagggtgttgttggtttagccaaaggtcttcgtaaggtcaaaaccatgtaccctttagtggttgcagtgttacctgatgttcctcaggaacataggaatattctcacctctcaaggttgtattgttagagagattgtacctgtttaccctcctgagaaccaaacccagtttgctatggcttattatgtcatcaactactccaagctacgtatttgggcttttgaggactatgacaagatgatttaccttgatggtgacatacaagtttttgaaaacattgatcacctatttgacttgccaaacaactatttctatgctgtgatggactgtttctgtgaggcctcttggcgtcacaccaagcagtatgaaattggttactgtcaacagtgccctgacaaggttcaatggcctactaattttggacccaaacctcctctctatttcaatgctggcatgtttgtttatgaaccaaacatggctacttaccatgatcttcttcaaaaacttcaagttactgagccaacttcctttgctgagcaggattttttgaacatgtacttcaatgacaaatacaagccaattccaaatgtttacaatcttgttctggccatgttgtggcgtcaccctgagaatgttgaacttgagaaagtcaaagtggttcattactgtgcagcgggttctaagccatggaggtacacaggtgtggaggagaatatgcagagagaagacataaagatgttggtgaagaaatggtgggatgtgtatgaagatgaaagtttggattacaagcaacctgttaatgcaaatcacttagcttcagcaattttggaagcttatgatttgaaggttgtccccgctccatctgccgcttga

SEQ ID NO: 140962 - protein, 325 aa, Medicago sativa
MSPDIITAATNITNTQSKATKRAFVTFLAGNGDYVKGVVGLAKGLRKVKTMYPLVVAVLPDVPQEHRNILTSQGCIVREIVPVYPPENQTQFAMAYYVINYSKLRIWAFEDYDKMIYLDGDIQVFENIDHLFDLPNNYFYAVMDCFCEASWRHTKQYEIGYCQQCPDKVQWPTNFGPKPPLYFNAGMFVYEPNMATYHDLLQKLQVTEPTSFAEQDFLNMYFNDKYKPIPNVYNLVLAMLWRHPENVELEKVKVVHYCAAGSKPWRYTGVEENMQREDIKMLVKKWWDVYEDESLDYKQPVNANHLASAILEAYDLKVVPAPSAA

SEQ ID NO: 140963 - DNA, 996 bp, Cucumis sativus
  CDS (1)..(996)
atgtctccagcagctgccccagaaagtgccattgagtcaaccgacgctcccaagagggcgtacgtgacgttcttggctggtaatggtgactattggaaaggtgtagttggattggcaaagggtctcagaaaggtcaaagccgcctaccctctcattgtagctgtccttcctgatgttcctgaagatcatcggcaaatcctcgagtatcagggttgtatcgtccgtgagatcgaacctgtttaccctccagcaaaccagacccaatttgccatggcttactatgttatcaactactcaaagcttaggatctgggagtttgtggagtatgagaagctgatatatttggacggagacatccaagtgtttgaaaacatagaccatttgtttgaaatgccaagtggatacttctatgcagtgatggattgcttttgtgagaagacatggagtaactctccacaatacaaaattgggtattgccaacaatgccctgacaaagtgaaatggcctgtggaggaaatgggaaacccaccaccactttacttcaatgctggattctttgtgtatgaacctgatcttttcacttacaaggatcttcttgagacttgcaaggccaccactccaactttgtttgctgagcaggactttttgaacatgtacttcaacgacatatacaagcccattcctccaatttacaacctcgtcatggccatgttgtggcgtcatcccgagaacattgacgtcgacaaagtcaaagttgtccattattgtgcagcgggatcgaaaccatggaggtacacgggaaaagaagagaacatggagagggaagacataaaaatgctggtgaagaaatggtgggaagtttatgaagatgaatctttggattaccaaaatgtcctcaaatctgaaactaaacaagaaactaacctcacacctttgatctctgttctgtccgaggctgaagttgtcaaccacatcacagctccttctgctgcttaa

SEQ ID NO: 140964 - protein, 331 aa, Cucumis sativus
MSPAAAPESAIESTDAPKRAYVTFLAGNGDYWKGVVGLAKGLRKVKAAYPLIVAVLPDVPEDHRQILEYQGCIVREIEPVYPPANQTQFAMAYYVINYSKLRIWEFVEYEKLIYLDGDIQVFENIDHLFEMPSGYFYAVMDCFCEKTWSNSPQYKIGYCQQCPDKVKWPVEEMGNPPPLYFNAGFFVYEPDLFTYKDLLETCKATTPTLFAEQDFLNMYFNDIYKPIPPIYNLVMAMLWRHPENIDVDKVKVVHYCAAGSKPWRYTGKEENMEREDIKMLVKKWWEVYEDESLDYQNVLKSETKQETNLTPLISVLSEAEVVNHITAPSAA

SEQ ID NO: 140965 - DNA, 1014 bp, Thellungiella halophila
  CDS (1)..(1014)
atggcacttgagatcaacaacaaacttaccgaaccggtctttgcagccaccgctaacggcggagaaaagagggcttacgtggcttttctcgccggaaacggagacttcgtgaaaggagtggtggctcttgctaaagggctaaggaaagctaagagcaagtatccacttgtcgtggccgtattaccggacgtcccggaggatcaccagaaacagctggtggagcaaggctgtgtcataaaagagatcgagccggtttatccaccggaaaatcaaaccgattttgccatggcttactatgttatcaactactctaagcttcgtatatggaagtttgtggagtacagcaagatgatatacttggacggggacatacaagtgttcgagaatatagaccacttgtttgatctcccgaacggccacttctacgcagccaaggactgtttctgcgagaagacatggagccacacgccacagtacaagatcggttattgccagcagtgtccagacaaggttacatggccagaggcagagcttggtcctaagccgcctttgtatttcaacgccggtatgttcgtttacgagcctaacctctacacttatcaaaacctcttggagactctcaaagtcgttcctccaacctcatttgctgaacaggatttcttgaacatgtacttcaaggacatatacactccaataccaggagtttataacttagtgatggctatgctttggaggcatcctgagaatgtagagcttgagcaagtcaaagttgttcattattgtgctgctggttctaagccttggagattcactggaaaagaagagaatatggagagagaggatatcaaggtgctggttaaaaagtggtgggacatttacaacgacaagtctctcgattacaagaacgttatcggagaaaagggaggaaatcccgatctccataagaagcagttagtggaagctttgtctgaggccggtgtgcttcagtacgtcaaagctccatctgcagcttag

SEQ ID NO: 140966 - protein, 337 aa, Thellungiella halophila
MALEINNKLTEPVFAATANGGEKRAYVAFLAGNGDFVKGVVALAKGLRKAKSKYPLVVAVLPDVPEDHQKQLVEQGCVIKEIEPVYPPENQTDFAMAYYVINYSKLRIWKFVEYSKMIYLDGDIQVFENIDHLFDLPNGHFYAAKDCFCEKTWSHTPQYKIGYCQQCPDKVTWPEAELGPKPPLYFNAGMFVYEPNLYTYQNLLETLKVVPPTSFAEQDFLNMYFKDIYTPIPGVYNLVMAMLWRHPENVELEQVKVVHYCAAGSKPWRFTGKEENMEREDIKVLVKKWWDIYNDKSLDYKNVIGEKGGNPDLHKKQLVEALSEAGVLQYVKAPSAA

SEQ ID NO: 140967 - DNA, 996 bp, Cucumis melo
  CDS (1)..(996)
atgtctcctgcagctgccccagaaagtgccattgagtcaactgacgctcccaagagggcgtacgtgacgttcttagctggtaatggtgactactggaaaggtgtagttggattggcaaagggtctcagaaaggtcaaagccgcctaccctctcattgtcgctgtccttcctgatgttcctgaagatcatcgccaaatcctcgagtatcagggttgtgtcgtccgtgagatcgaacctgtttaccctccggaaaaccagacccagtttgccatggcttactatgttatcaactattcaaagctcaggatctgggagtttgtggagtacgagaagctgatatatttggatggagacatccaagtgttcgaaaacatagaccatttgtttgcaatgccaagtggatacttctacgcagtgatggattgcttctgtgagaagacatggagtaactctccacaatacaaaattgggtattgccaacaatgcccagacaaagtgaaatggcctgtggaggaaatgggaaacccaccaccactttacttcaatgctggattctttgtgtatgaacctgatcttttcacttacaaggatcttcttgagacttgcaaggccactactccaactttgtttgctgagcaggacttcttgaacatgtacttcaacgacatatacaagcccattcctcccatttacaacctagtcatggccatgttgtggcgtcatcctgagaacattgacgttgacaaagtcaaagttgtccactattgtgcagcgggatcgaaaccatggaggtacacgggaaaagaagagaacatggacagggaagacataaaaatgctggtgaagaaatggtgggaagtttatgaagatgaatctttggattaccaaaatgttctcaaatctgaaactaaacaagaaactaacctcacacctttgatctctgttctgtctgaggctgaagttgtcaaccacatcacagctccttctgctgcttaa

SEQ ID NO: 140968 - protein, 331 aa, Cucumis melo
MSPAAAPESAIESTDAPKRAYVTFLAGNGDYWKGVVGLAKGLRKVKAAYPLIVAVLPDVPEDHRQILEYQGCVVREIEPVYPPENQTQFAMAYYVINYSKLRIWEFVEYEKLIYLDGDIQVFENIDHLFAMPSGYFYAVMDCFCEKTWSNSPQYKIGYCQQCPDKVKWPVEEMGNPPPLYFNAGFFVYEPDLFTYKDLLETCKATTPTLFAEQDFLNMYFNDIYKPIPPIYNLVMAMLWRHPENIDVDKVKVVHYCAAGSKPWRYTGKEENMDREDIKMLVKKWWEVYEDESLDYQNVLKSETKQETNLTPLISVLSEAEVVNHITAPSAA

SEQ ID NO: 140969 - DNA, 999 bp, Cucumis melo
  CDS (1)..(999)
atggctcttgaactttctgagaatgtcctgaccactggtgcaagtacggagagggcgtacgtgacgttcttggctggaaatggtgactacgtaaaaggggtgacaggcttggccaaagggttgcggaaggtggccaccgcataccctcttgtggtggcggtgctaccggacgttccgatagaacatcggaaaattttgaaggctcaaggttgcattattcgagaaatcgaacctatttatcctcctgaaaaccaaatccaattcgccatggcctattatgttatcaactactccaagcttcgaatttggaactttgtggagtacaaaaagatgatatatttagatggagacattcaagtataccaaaacattgaccatttattcgaggaagaagatggccatttctacgccgtaatggactgcttttgtgagaagacttggagccattccccacagtacaagattggttactgccagcaatgcccggaccgagtcaagtggccacccgcctccggttccccgcctccactctacttcaatgctggaatgttcgtgttcgaaccgagtcgtgaaacgtacaagtcgctactggagactctacgtgtaacggcaccaactccgtttgcggagcaggatttcctaaacatgttctttgggaaggtttacaagcccatttctgctacatataatttggttttagctatgctgtggcgccatcccgagaacgttcctgatcttcataatgttaaagttgttcattactgtgctgctggatcgaaaccatggaggtatacagggcaagaagcaaacatggaaagagacgacatcaagatgttggtgtcaaaatggtgggacatttacaacgacacgtcgctggatttgaaggaagtcgttaaggaagatgatgaggcccaaatacaagcacggcccaaattttcgatattgggctccattactgagcccaatattgcgtatgtgccagcaccttcggctgcttga

SEQ ID NO: 140970 - protein, 332 aa, Cucumis melo
MALELSENVLTTGASTERAYVTFLAGNGDYVKGVTGLAKGLRKVATAYPLVVAVLPDVPIEHRKILKAQGCIIREIEPIYPPENQIQFAMAYYVINYSKLRIWNFVEYKKMIYLDGDIQVYQNIDHLFEEEDGHFYAVMDCFCEKTWSHSPQYKIGYCQQCPDRVKWPPASGSPPPLYFNAGMFVFEPSRETYKSLLETLRVTAPTPFAEQDFLNMFFGKVYKPISATYNLVLAMLWRHPENVPDLHNVKVVHYCAAGSKPWRYTGQEANMERDDIKMLVSKWWDIYNDTSLDLKEVVKEDDEAQIQARPKFSILGSITEPNIAYVPAPSAA

SEQ ID NO: 140971 - DNA, 957 bp, Solanum lycopersicum
  CDS (1)..(957)
atggctccagaatttgaaagtggaacaaaaatggctactactattcaaaaatcatcatgtgcttatgtgactttcttagctggtaatggtgattatgtgaaaggtgtggttggtttagcgaagggattgataaaagctaaatctatgtatcctttggttgtggcaattttacctgatgtgcctgaggaacacaggatgatattgacgaggcacggttgcatagtgaaggagatagagccactagctccttcattgcaatcgttggataagtatgcacgatcttattacgtgcttaactactccaaacttcggatatgggagtttgtggagtacagtaagatggtgtatttggatggagatatgcaagtttttgagaatatagaccatctatttgagctgcctgataagtatttatacgcggtggcggactgcatatgcgatatgtatggggagccatgtgatgaggttctgccgtggcccaaagagttggggccaaggccatctgtttacttcaatgcaggcatgtttgtctttcagccaaatccgtctgtctatgttcgtctcttgaacacactcaaagttaccccacccacccaatttgctgaacaggactttctgaacatgtactttaaagacgtgtacaagccaattccttatacatacaatatgttgctggccatgctatggcgccacccggagaaaatagaggtgaacaaggcgaaagcagttcactactgttctccaggggctaaaccgtggaaatacactgggaaggaagaacatatggatcgagaggatataaaaatgctagtgaagaaatggtgggacatttataatgacaccacactggatcacaaggcgcagggttccacagttgaagcaaacagattaaggggagcagccttttcggatacgaacataagtgctttatatattactagcccatcagctgcttaa

SEQ ID NO: 140972 - protein, 318 aa, Solanum lycopersicum
MAPEFESGTKMATTIQKSSCAYVTFLAGNGDYVKGVVGLAKGLIKAKSMYPLVVAILPDVPEEHRMILTRHGCIVKEIEPLAPSLQSLDKYARSYYVLNYSKLRIWEFVEYSKMVYLDGDMQVFENIDHLFELPDKYLYAVADCICDMYGEPCDEVLPWPKELGPRPSVYFNAGMFVFQPNPSVYVRLLNTLKVTPPTQFAEQDFLNMYFKDVYKPIPYTYNMLLAMLWRHPEKIEVNKAKAVHYCSPGAKPWKYTGKEEHMDREDIKMLVKKWWDIYNDTTLDHKAQGSTVEANRLRGAAFSDTNISALYITSPSAA

SEQ ID NO: 140973 - DNA, 1005 bp, Pisum sativum
  CDS (1)..(1005)
atggcaccggagatcgttcagacctctacgaaaccagttaccggtttcacgaaactgaaacgtgcatacgtaacgtttctcgccggcaacggcgactacgtgaaaggcgtaataggtttggcaaaaggtttacgaaaagttaaaacggcgtacccgctggttgttgccgtgcttccagacgtaccggaggagcaccgtgagatgttggaatctcagggatgtatcgtccgtgagattcaaccggtttacccaccggaaaatcaaactcagtttgctatggcctattacgtcatcaattactccaaactccgaatatgggagtttgtggaatacagcaagatgatatatttggatggagacattcaggtatatgaaaacatagatcatctttttgatctaccagacggttatttctacgctgtgatggattgtttctgtgaaaaaacatggagtcatacaccacagtataagatcgggtactgtcagcagtgtccggagaaggtgcaatggccgaaagaaatgggtgaacctccttccctttacttcaatgctggcatgtttctgtttgagccaagtgttgagacttatgatgatcttttgaaaacttgtcaagttactgctcctactccgtttgcagaccaagatttcttgaacatgtattttaaggatatttataggccaattcctttggtttataatcttgttcttgctatgttgtggcgtcatcctgagaatgttgagcttaggaaagtcaaggttgttcactattgtgcagctggttcaaagccttggaggtatactggaaaagaagagaatatgcagagggaggatataaagatgttggtgcagaaatggttggatatatacagtgattcttcacttgactacaagaagaatttgagtggaaattgtgagacacaaaggaatgatgttgaagagccgtttgtacaggcgttgtcggaggttggtcgtgttcgatatgtcacagcaccttcggcagcttaa

SEQ ID NO: 140974 - protein, 334 aa, Pisum sativum
MAPEIVQTSTKPVTGFTKLKRAYVTFLAGNGDYVKGVIGLAKGLRKVKTAYPLVVAVLPDVPEEHREMLESQGCIVREIQPVYPPENQTQFAMAYYVINYSKLRIWEFVEYSKMIYLDGDIQVYENIDHLFDLPDGYFYAVMDCFCEKTWSHTPQYKIGYCQQCPEKVQWPKEMGEPPSLYFNAGMFLFEPSVETYDDLLKTCQVTAPTPFADQDFLNMYFKDIYRPIPLVYNLVLAMLWRHPENVELRKVKVVHYCAAGSKPWRYTGKEENMQREDIKMLVQKWLDIYSDSSLDYKKNLSGNCETQRNDVEEPFVQALSEVGRVRYVTAPSAA

SEQ ID NO: 140975 - DNA, 1002 bp, Ajuga reptans
  CDS (1)..(1002)
atgggcccagtcgtacctgtggaagccttccgaagcgccgggaagatctcggcccttggcgcgaagaaagggtacgtgacattcttggcaggcaacggtgattacgtcaaaggagtggtgggattggctaaggggttgaggaaggtgaagagtgcttaccctcttgtggtggccatcttgcctgacgtacctgaggagcaccgcgagcttttgaggtctcaaggttgcattgtcaaggaaatcgagcccatttatccaccggccaaccagattcagtttgctatggcctactacgtcatcaactactccaagcttcgtatatggaattttgaggagtacagcaagatggtgtaccttgatgcggacatccaagtttacgaaaacattgatcacctcctcgacacacctgacggctacttctatgccgtaatggactgcttctgtgaaaagacatggagccactcacgacagttctcgattgggtactgccaacagtgcccaaacaaggtcacttggcccgctcaaatgggatcgcctcctccactctacttcaatgctggcatgttcgtcttcgagcccagcaagaccacataccaaaccctgcttcatactctgcgcatcactccacctaccccttttgcagagcaggatttcttgaacatgttcttcgaaccaatctacaaaccaatccccctggtgtacaacctcgtacttgctatgctatggcgccaccctgaaaacgttgagctcgaaaaagttcaagttgtccactactgtgctgctggatcgaagccatggaggtatacaggccaagaagccaacatggacagagaagacatcaaaatgctcgtaaagaaatggtgggatgtttacaacgacgaatccctcgatttcaaggccgaagattcgattgcaggggaagagacgttctcaatgccgtcgttcatagcctctctccctgaaccggcagtatcatacatcccggccccttctgctgcttag

SEQ ID NO: 140976 - protein, 333 aa, Ajuga reptans
MGPVVPVEAFRSAGKISALGAKKGYVTFLAGNGDYVKGVVGLAKGLRKVKSAYPLVVAILPDVPEEHRELLRSQGCIVKEIEPIYPPANQIQFAMAYYVINYSKLRIWNFEEYSKMVYLDADIQVYENIDHLLDTPDGYFYAVMDCFCEKTWSHSRQFSIGYCQQCPNKVTWPAQMGSPPPLYFNAGMFVFEPSKTTYQTLLHTLRITPPTPFAEQDFLNMFFEPIYKPIPLVYNLVLAMLWRHPENVELEKVQVVHYCAAGSKPWRYTGQEANMDREDIKMLVKKWWDVYNDESLDFKAEDSIAGEETFSMPSFIASLPEPAVSYIPAPSAA

SEQ ID NO: 140977 - DNA, 1026 bp, Oryza sativa
  CDS (1)..(1026)
atggctcctccccagcttgccggcaagatgaccgccaaggccgccgcggcggtgaagcccgcgacgagggcgtacgtgacgttcctcgcgggcgacggtgactactggaagggcgttgtcgggctggccaagggccttcgcaaggtgggctcggcctacccgctggtggtcgccgtcctccccgacgtgccggagtcccaccgccgcatcctcatctcccagggctgcatcgtccgggagatcgagccggtgtacccgccggagaaccagacgcagttcgccatggcctactacgtcatcaactactccaagctccgcatctgggagttcgtggagtacgagaggatggtgtaccttgacgccgacatccaggtgttcgacaacatcgacgagctgttcgagctgcccaaggggcacttctacgcggtgatggactgcttctgcgagaagacgtggagccacaccccgcagtaccagatcggctactgccagcagtgccccgacaaggtggcgtggccgaccgccgagctcggcccgccgccggcgctctacttcaacgccggcatgttcgtgcacgagcccagcatggccaccgccaagtccctgctcgacactctgcgcgtcaccacgcccactcccttcgcggagcaggatttcctgaacatgttcttcagggagcagtacaagccgatcccactgatctacaaccttgtcctggccatgctctggaggcatccagagaacgtccagctcgagaaggtcaaggtcgtgcactactgcgcagcgggatcgaagccgtggaggtacacgggcaaggaggcgaacatggacagggaggacatcaagatgctggtcaagaagtggtgggacgtctacaacgacggcagcctggacttcaagggcctcccgcccatcgcggccgccgacgacgccgacgaggtcgaggcggcggccaagaagccgctgcgcgccgcgctggcggaggcccgcaccgtcaagtacgtcacggcgccatcggccgcgtga

SEQ ID NO: 140978 - protein, 341 aa, Oryza sativa
MAPPQLAGKMTAKAAAAVKPATRAYVTFLAGDGDYWKGVVGLAKGLRKVGSAYPLVVAVLPDVPESHRRILISQGCIVREIEPVYPPENQTQFAMAYYVINYSKLRIWEFVEYERMVYLDADIQVFDNIDELFELPKGHFYAVMDCFCEKTWSHTPQYQIGYCQQCPDKVAWPTAELGPPPALYFNAGMFVHEPSMATAKSLLDTLRVTTPTPFAEQDFLNMFFREQYKPIPLIYNLVLAMLWRHPENVQLEKVKVVHYCAAGSKPWRYTGKEANMDREDIKMLVKKWWDVYNDGSLDFKGLPPIAAADDADEVEAAAKKPLRAALAEARTVKYVTAPSAA

SEQ ID NO: 140979 - DNA, 987 bp, Oryza sativa
  CDS (1)..(987)
atgatggggccgaacgtgtcgtcggagaagaaggcgttggcggcggcgaagaggagggcgtacgtgacgttcctggccggcgacggcgactactggaagggcgtcgtggggctcgccaaggggctccgccgcgtccgctcggcgtacccgctggtggtcgccgtgctcccggacgtccccggcgagcaccggcggaagctggtcgagcaggggtgcgtggtccgggagattcagccggtgtacccgccggagagccagacgcagttcgccatggcctactacgtgatcaactactcgaagctccgcatctgggagttcgtggagtacgagcggatggtctacctcgacgccgacatacaggtgttcgacaacatcgaccacctgttcgacctcgacaagggcgccttctacgccgtcaaggactgcttctgcgagaagacgtggagccacacgccgcagtacgacatcggctactgccagcagcgccccgacgaggtggcgtggccggagcgcgagctcggccccccgccgccgctctacttcaacgccggcatgttcgtccacgagcccggcctcggcaccgccaaggacctgctcgacgcgctcgtcgtcacgccgcccaccccgttcgccgagcaggacttcctcaacatgttcttccgcgaacagtacaagcccatccccaacgtctacaacctcgttctcgccatgctctggaggcacccggagaacgtcgacctcgaccaggtcaaggtcgtccattactgtgcagcgggttcgaagccatggaggttcaccgggaaggaggagaacatgaacagagaagatataaagatgctggtgaagaggtggtgggacatctacaacgacgagagcctcgactacaaggaggaggaggacaacgccgacgaggccagccagccgatgcggacggcgctcgccgaggccggcgccgtcaagtacttcccggcgccctccgccgcgtag

SEQ ID NO: 140980 - protein, 328 aa, Oryza sativa
MMGPNVSSEKKALAAAKRRAYVTFLAGDGDYWKGVVGLAKGLRRVRSAYPLVVAVLPDVPGEHRRKLVEQGCVVREIQPVYPPESQTQFAMAYYVINYSKLRIWEFVEYERMVYLDADIQVFDNIDHLFDLDKGAFYAVKDCFCEKTWSHTPQYDIGYCQQRPDEVAWPERELGPPPPLYFNAGMFVHEPGLGTAKDLLDALVVTPPTPFAEQDFLNMFFREQYKPIPNVYNLVLAMLWRHPENVDLDQVKVVHYCAAGSKPWRFTGKEENMNREDIKMLVKRWWDIYNDESLDYKEEEDNADEASQPMRTALAEAGAVKYFPAPSAA

SEQ ID NO: 140981 - DNA, 1017 bp, Brassica napus
  CDS (1)..(1017)
atggctccagagctcacacaaaccaccaccgagaaatcagccgtgacgataacaaaaccgtcgtccccagtccacggcggtcgagcctacgtgacgttcctcgccggtaacggtgactacgtgaaaggagtcgttggtttagccaaaggactaagaaaagtcaaatcagcgtatccactcgttgtggcgatactaccagacgtcccggaggagcaccgtcgtatactcgtggaacaaggttgcatcgtccgcgagatcgaaccggtttacccacccgagaaccaaactcagtttgccattgcttattacgtcatcaactattccaaactccgtatctggaagtttgtggagtacagtaaaatgatatatttagatggggacattcaagtttacgagaacattgatcacttgttcgatctccctgatgggtacttttacgcggtgatggactgtttctgtgagaagacatggaaccacacgccgcaatacaagatcgggtactgccaacagtgccctgagaaggtccagtgggcaaaggcggagcttggagagccgccggctctctacttcaacgctggaatgttcgtattcgaacctggcctagatacttacgaggatctgctcaggacccttaaagtcactccccctactcctttcgctgaacaggactttctgaacatgtatttcaagaaaatctacaggccgattcctttggtttacaatcttgtcctagcgatgctatggcgtcatccagaaaatgtagagctcgataaagtcaaggtggttcactactgtgcagcgggttcgaagccatggagatacaccgggaaggaggcgaatatggagagagaagacatcaaaatgttagtgaataaatggtgggacatctacaaggacggttccttggattacaagaaacctgaagcagagtcggatctagtgaatctgaagccgttcatcaacgctcttactgaagctggacgggtcaagtacgtgactgcaccgtccgctgcttga

SEQ ID NO: 140982 - protein, 338 aa, Brassica napus
MAPELTQTTTEKSAVTITKPSSPVHGGRAYVTFLAGNGDYVKGVVGLAKGLRKVKSAYPLVVAILPDVPEEHRRILVEQGCIVREIEPVYPPENQTQFAIAYYVINYSKLRIWKFVEYSKMIYLDGDIQVYENIDHLFDLPDGYFYAVMDCFCEKTWNHTPQYKIGYCQQCPEKVQWAKAELGEPPALYFNAGMFVFEPGLDTYEDLLRTLKVTPPTPFAEQDFLNMYFKKIYRPIPLVYNLVLAMLWRHPENVELDKVKVVHYCAAGSKPWRYTGKEANMEREDIKMLVNKWWDIYKDGSLDYKKPEAESDLVNLKPFINALTEAGRVKYVTAPSAA

SEQ ID NO: 140983 - DNA, 993 bp, Brassica napus
  CDS (1)..(993)
atggcacttgagatcaacaacaaattcaccggaccagtcgctaacggtggagaaaagagagcttacgtgactttcctagctggaaacggagacttcgtgaaaggagtggtgggtcttgctaaagggctaaggaaagttaagagcatgtatccacttgtggtggctgtattgccggacgtaccagaggatcaccggaaacagctggtggagcaaggctgtgtcgttaaagagatcgagccggtttacccaccggagagtcaaaccgagtttgccatggcttattacgttatcaactattctaagcttcgtatttggaagtttgtggagtatagcaagatgatatacttggacggagacatacaagtgttccaaaacatagaccacttgtttgatctcccgagcggccacttctacgcagtcaaagactgtttctgcgagaagacatggagccacaccccacagaacaagataggttattgccaacagtgtccagaaaaggtgacttggccgtcagaacttggtcctcagccacctttgtacttcaacgctggaatgttcgtctacgagcctaatctttacacttatcataatctcttggagactctgaaagttgttcctcccactccttttgcggaacaggatttcttgaatatgtatttcagggacatatacaagccgataccaggaatttataatttggttatggctatgctctggagacatccagagaatgtagagcttgacaaagttaaagttgctcactattgtgctgctgtttctaagccttggaggttcactggaaaagagccgaacatggggagagaagatatcaaaatgttggtcaagaaatggtgggacatatacaacgacgagactcttgattacaagaacatcagtggcgacaaaggaggagacgaccataagaagcagtttgtcaaagctttgtcggaggccggtgtgcttcagtacgtcaaagctccatctgcagcttag

SEQ ID NO: 140984 - protein, 330 aa, Brassica napus
MALEINNKFTGPVANGGEKRAYVTFLAGNGDFVKGVVGLAKGLRKVKSMYPLVVAVLPDVPEDHRKQLVEQGCVVKEIEPVYPPESQTEFAMAYYVINYSKLRIWKFVEYSKMIYLDGDIQVFQNIDHLFDLPSGHFYAVKDCFCEKTWSHTPQNKIGYCQQCPEKVTWPSELGPQPPLYFNAGMFVYEPNLYTYHNLLETLKVVPPTPFAEQDFLNMYFRDIYKPIPGIYNLVMAMLWRHPENVELDKVKVAHYCAAVSKPWRFTGKEPNMGREDIKMLVKKWWDIYNDETLDYKNISGDKGGDDHKKQFVKALSEAGVLQYVKAPSAA

SEQ ID NO: 140985 - DNA, 1023 bp, Triticum aestivum
  CDS (1)..(1023)
atggctcccgagctggccggcaagatggccgccaaggctgccgtggcggcggcgaagcccgcgacgaaggcgtacgtgacgttcttggcgggggcaggggactactggatgggcgtggttgggcttgccaagggcctgcgcaaggttggctcggcctacccactggtggtagccgtgctgcccgacgtgcccgagctccaccgcaagatcctcgtctcccagggctgcatcgtccgcgagatcgcccccgtgtacccgcccgagaaccacacccagtttgccatggcctactacgtcatcaactactccaagctccgcatctgggagtttgtggagtacgagaggatggtgtacctcgacgccgacatccaggtgttcgaaaacatcgacgagctgttcgatctgcccaaggggcacttctacgccgtgatggactgcttctgcgagaagacgtggagccacaccccgcagtaccagatcggctactgccagcagtgtcccgacaaggtgacgtggccggccgccgagatgggcccgccgccggcgctctacttcaacgccggcatgttcgtgcacgagcccagcatggccaccgccaaggcgctccttgacaccctccgcgtgacgccgacgaccccattcgcggagcaggatttcctgaacatgttcttcaaggagcagtacaagccgatcccgctggtctacaaccttgtgctggcgatgctctggaggcacccggagaacgtccagctggagaaggtcaaggtggtgcactactgcgctgcgggatcgaagccatggaggttcacgggcaaagaggagaacatggacagggaggacatcaggatcctcgtcaggaactggtgggacatctacaacgacgacgagagcctcgatttcaagggcctgcccgccctggccgccgacgccgacgagctcgaggcggcggccaagaagccgctccgcgcagcgcttgcggaagccggcaccgtcaagtacgtcgccgcgccctcggctgcgtaa

SEQ ID NO: 140986 - protein, 340 aa, Triticum aestivum
MAPELAGKMAAKAAVAAAKPATKAYVTFLAGAGDYWMGVVGLAKGLRKVGSAYPLVVAVLPDVPELHRKILVSQGCIVREIAPVYPPENHTQFAMAYYVINYSKLRIWEFVEYERMVYLDADIQVFENIDELFDLPKGHFYAVMDCFCEKTWSHTPQYQIGYCQQCPDKVTWPAAEMGPPPALYFNAGMFVHEPSMATAKALLDTLRVTPTTPFAEQDFLNMFFKEQYKPIPLVYNLVLAMLWRHPENVQLEKVKVVHYCAAGSKPWRFTGKEENMDREDIRILVRNWWDIYNDDESLDFKGLPALAADADELEAAAKKPLRAALAEAGTVKYVAAPSAA

SEQ ID NO: 140987 - DNA, 1047 bp, Zea mays
  CDS (1)..(1047)
atggctcccgagctgatgacagccaagatgaccgccaaggccgccgcggcggcggcggcggcggcggcggcgaagcctgccacgagggcgtacgtgacgttcctggcgggcgacggcgactactggaagggcgtggtggggctggccaagggcctccgcaaggtccgctcggcctaccccctggtggtggccgtgctgcccgacgtgcccgagtcccaccgccgcatcctcgtctcgcagggctgcgtcgtccgcgagatcgagcccgtgtacccgcctgagaaccagacgcagttcgccatggcgtactacgtcatcaactactccaagctccgcatctgggagttcgtggagtacgagaggatggtgtacctggacgcggacatccaggtgttcgagaacatcgacggcctgttcgagctcgagaaggggtacttctacgcggtgatggactgcttctgcgagaagacgtggagccacaccccgcagtacaggatcggctactgccagcagtgcccggacaaggtggcgtggccagaggcgaccgccgagctgggccctccgccgtcgctctacttcaacgccggcatgttcgtgcacgagcccagcgtggccaccgccaaggcgctcctcgacaccctccgcgtgactccgcccacccccttcgcagagcaggacttcctgaacatgttcttcagggatcagtacaggccgatccccaacgtgtacaacctcgtgctggccatgctctggaggcaccccgagaacgtgcagctggagaaggtgaaggtcgtgcactactgcgcggcggggtccaagccgtggaggttcacgggcaaggaggcgaacatggacagggaggacatcaacgccctggtgaagaagtggtgggacatctacaacgacgagacgctggacttgaagggcctgccctcgctctcgcccgacgacgacgacgaggtggaggcggtggccaagaagccgcttcgcgcggccctggcggaggccggcacggtcaagtacgtcaccgcgccctcggccgcgtga

SEQ ID NO: 140988 - protein, 348 aa, Zea mays
MAPELMTAKMTAKAAAAAAAAAAAKPATRAYVTFLAGDGDYWKGVVGLAKGLRKVRSAYPLVVAVLPDVPESHRRILVSQGCVVREIEPVYPPENQTQFAMAYYVINYSKLRIWEFVEYERMVYLDADIQVFENIDGLFELEKGYFYAVMDCFCEKTWSHTPQYRIGYCQQCPDKVAWPEATAELGPPPSLYFNAGMFVHEPSVATAKALLDTLRVTPPTPFAEQDFLNMFFRDQYRPIPNVYNLVLAMLWRHPENVQLEKVKVVHYCAAGSKPWRFTGKEANMDREDINALVKKWWDIYNDETLDLKGLPSLSPDDDDEVEAVAKKPLRAALAEAGTVKYVTAPSAA

SEQ ID NO: 140989 - DNA, 993 bp, Brassica napus
  CDS (1)..(993)
atggcacttgagatcgacaacaaattcaccggaccagtcgctaacggtggagaaaagagagcttacgtgactttcctagctggaaacggagacttcgtgaaaggagtggtgggtcttgctaaagggctaaggaaagttaagagcatgtatccacttgtggtggctgtattgccggacgtaccagaggatcaccggaaacagctggtggagcaaggctgtgtcgttaaagagatcgagccggtttacccaccggagagtcaaaccgagtttgccatggcttattacgttatcaactattctaagcttcgtatttggaagtttgtggagtatagcaagatgatatacttggacggagacatacaagtgttccacaacatagaccacttgtttgatctcccaaacggccacttctacgcagtcaaagactgtttctgcgagaagacatggagccacaccccacagaacaagataggttattgccaacagtgtccagaaaaggtgacttggccggcagaacttggtcctaagccacctttgtacttcaacgctggaatgttcgtctacgagcctaatctttacacttatcataatctcttggagactctgaaagttgttcctcccactccttttgcggaacaggatttcttgaatatgtatttcagggacatatacaagccgataccgggaatttataattgggttatggctatgctttggagacatccagagaatgtagagcttgacaaagttaaagttgctcactattgtgctgctggttctaagcctgggaggttcactggaaaagagccgaacatggggagagaggatatcaaaatgttggtcaagaaatggtgggacatatacaacgacgagactcttgattacaagaacatcagtggcgacaaaggaggagacgaccataagaagcagtttgtcaaagctttgtcggaggccggtgtgcttcagtacgtcaaagctccatctgcagcttag

SEQ ID NO: 140990 - protein, 330 aa, Brassica napus
MALEIDNKFTGPVANGGEKRAYVTFLAGNGDFVKGVVGLAKGLRKVKSMYPLVVAVLPDVPEDHRKQLVEQGCVVKEIEPVYPPESQTEFAMAYYVINYSKLRIWKFVEYSKMIYLDGDIQVFHNIDHLFDLPNGHFYAVKDCFCEKTWSHTPQNKIGYCQQCPEKVTWPAELGPKPPLYFNAGMFVYEPNLYTYHNLLETLKVVPPTPFAEQDFLNMYFRDIYKPIPGIYNWVMAMLWRHPENVELDKVKVAHYCAAGSKPGRFTGKEPNMGREDIKMLVKKWWDIYNDETLDYKNISGDKGGDDHKKQFVKALSEAGVLQYVKAPSAA

SEQ ID NO: 140991 - DNA, 1023 bp, Glycine max
  CDS (1)..(1023)
atggctcctgaacttgtccccaccgttgtgaaatccagtgctgcgttcacgaaacccgcaacccttccaaggcgtgcctacgtgacattcctcgccggaaacggtgactacgtgaaaggggtggttggcctcgccaaagggttgcgaaaggtgaaaaccgcgtacccgttggtggtggctgtcctccccgatgtgccggaggagcaccgtaagatcctggagtctcagggctgcatcgttcgcgagatcgaacccgtttacccacccgaaaaccaaacccagtttgccatggcttattacgtcatcaactactccaagctccgtatatgggagtttgtggagtacagcaagatgatatacttggacggagacattgaggtatatgagaacatagaccacctatttgacctacctgatggtaacttttacgctgtgatggattgtttctgcgagaagacatggagtcacacccctcagtacaaggtgggttactgccagcaatgcccggagaaggtgcggtggcccaccgaattgggtcagcccccttctctttacttcaaccctggcatgttcgtgttcgaacccaacatcgccacctatcatgacctattgaaaacggtgcaagtcaccactcccacttcgttcgcagaacaagatttcttgaacatgtacttcaaggatatttacaagccaatccctttaaattacaatcttgtcctcgccatgctctggcgccacccagaaaacgttaaattagaccaagtcaaggttgttcactattgcgcagcggggtcgaaaccgtggagatatacggggaaggaagagaacatgcagagggaggacataaagatgctggtgaaaaaatggtgggatatctacaatgatgcttcgcttgactacaagccattgatgagtgcaagtgaagctccagcaccggatggtgttgacaatattgaaccattcgtgcaggctctgtcagaggttggtcatgttcaatatgtcactgcgccctcagcagcttaa

SEQ ID NO: 140992 - protein, 340 aa, Glycine max
MAPELVPTVVKSSAAFTKPATLPRRAYVTFLAGNGDYVKGVVGLAKGLRKVKTAYPLVVAVLPDVPEEHRKILESQGCIVREIEPVYPPENQTQFAMAYYVINYSKLRIWEFVEYSKMIYLDGDIEVYENIDHLFDLPDGNFYAVMDCFCEKTWSHTPQYKVGYCQQCPEKVRWPTELGQPPSLYFNPGMFVFEPNIATYHDLLKTVQVTTPTSFAEQDFLNMYFKDIYKPIPLNYNLVLAMLWRHPENVKLDQVKVVHYCAAGSKPWRYTGKEENMQREDIKMLVKKWWDIYNDASLDYKPLMSASEAPAPDGVDNIEPFVQALSEVGHVQYVTAPSAA

SEQ ID NO: 140993 - DNA, 975 bp, Glycine max
  CDS (1)..(975)
atggctcctaatatcaccaccgtcaccgacgctcaagccaaggccgccggcgggcgtggccgtgcctacgtcaccttcctcgccggaaacggtgactatgtgaaaggtgtcgttggcttggccaaaggtctgaggaaggtgaaaagcatgtaccctctggtggttgcagtgttacccgatgttccagaacatcaccgaaacattctcacctcccaaggttgcattgctagagaaattgaacccgtgtaccctcctgagaatcagacgcagttcgccatggcatattacgtcatcaactattccaagctacgtatttgggagtttgtggagttcagcaagatgatatacctagacggtgatatacaagtgtttgacaatattgaccacttgtttgacttgcctgataactacttttatgcggtgatggactgtttttgtgagcccacttggggccacactctgcagtatcaaatcggatactgccagcagtgccctcataaggttcagtggcccactcactttgggcccaagcctcctctctatttcaatgctggcatgtttgtttatgagcccaatctggatacctaccgtgacctccttcaaactgtccaagtcactaagcccacttcctttgctgaacaggattttttgaacatgtacttcaaggacaaatataggccaattcctaatgtctataatcttgtgttggccatgctgtggcgtcaccctgagaacgttgagcttgaaaaagttaaagtggttcactactgtgctgctggatctaagccttggaggtacacagggaaggaggaaaatatggagagagaagatatcaagatgttggtgaagaagtggtgggatatatatgaggatgagactttggactacaacaatccattcaacgtggataggttcactgcggcacttttggaggttggtgaagtcaagttcgtccgtgccccatctgctgcttag

SEQ ID NO: 140994 - protein, 324 aa, Glycine max
MAPNITTVTDAQAKAAGGRGRAYVTFLAGNGDYVKGVVGLAKGLRKVKSMYPLVVAVLPDVPEHHRNILTSQGCIAREIEPVYPPENQTQFAMAYYVINYSKLRIWEFVEFSKMIYLDGDIQVFDNIDHLFDLPDNYFYAVMDCFCEPTWGHTLQYQIGYCQQCPHKVQWPTHFGPKPPLYFNAGMFVYEPNLDTYRDLLQTVQVTKPTSFAEQDFLNMYFKDKYRPIPNVYNLVLAMLWRHPENVELEKVKVVHYCAAGSKPWRYTGKEENMEREDIKMLVKKWWDIYEDETLDYNNPFNVDRFTAALLEVGEVKFVRAPSAA

SEQ ID NO: 140995 - DNA, 975 bp, Triticum aestivum
  CDS (1)..(975)
atggctcccatgctcaaggggatcgtggaggacgcgccgaagagggcggcgtacgtgaccttcctcgccggctccggcgactactggaagggcgtggtgggcctggccaagggcctccgcgccgtcaactccgcctacccactcgtggtggccgtgctccccgacgtccccgaggaccaccgccgcaagctgctcgaccagggctgcctcgtccgcgagatcgtgcccgtgtacccgccggagagccagacccagttcgccatggcctactacgtcatcaactactccaagctccgcatctgggagttcgtggagtacgagaggatggtgtacctggacgcagacatccaggtgttcgacaacatcgaccacctcttcgacctcgacaagggcagcttctacgccgtcatggactgcttctgcgagaagacgtggagccacaccccgcagcacaagatcggctactgccagcagtgcccggaccgggtggcgtggccggagcgcgagctcggcgtgcccccgccgccgctctacttcaacgctggcatgttcgtgcacgagcccagcctcgccaccgccaaggccctcctcgacaagctcgtcgtcaccgaccccacgcccttcgccgagcaggactttctcaacatgttcttcaagggacgtgtacaaccccatcccgcccgttgtacaacctcgttgctcgccatgctctggaggcaccccgagaacgtcgagctccagaaggtcaaggccgtccactactgcccagcgggctccaagcccggggaggtacaccgggcgaggaaggccaacatggacagggacgaaatcaagatgcttgtgaagaaatggtgggacatctacaacgacgagggcctagactacaaggccggcgaggataccgccaacctgctacgtggagctctggttgaggccggcgccgtgaagtacttcccggcgccctcggccgcgtag

SEQ ID NO: 140996 - protein, 324 aa, Triticum aestivum
MAPMLKGIVEDAPKRAAYVTFLAGSGDYWKGVVGLAKGLRAVNSAYPLVVAVLPDVPEDHRRKLLDQGCLVREIVPVYPPESQTQFAMAYYVINYSKLRIWEFVEYERMVYLDADIQVFDNIDHLFDLDKGSFYAVMDCFCEKTWSHTPQHKIGYCQQCPDRVAWPERELGVPPPPLYFNAGMFVHEPSLATAKALLDKLVVTDPTPFAEQDFLNMFFKGRVQPHPARCTTSLLAMLWRHPENVELQKVKAVHYCPAGSKPGEVHRARKANMDRDEIKMLVKKWWDIYNDEGLDYKAGEDTANLLRGALVEAGAVKYFPAPSAA

SEQ ID NO: 140997 - DNA, 1038 bp, Zea mays
  CDS (1)..(1038)
atggctcccgagctgatgacagccaagatgaccgccaaagccgcggcggcggcggcggcggcgaagcctgccacgagggcgtacgtgacgttcctggcgggcgacggcgactactggaagggcgtggtggggctggccaagggcctccgcaaggtccgctcggcctaccccctggtggtggccgtgctgcccgacgtgcccgagtcccaccgccgcatcctcgtctcgcagggctgcgtcgtccgcgagatcgagcccgtgtacccgcctgagaaccagacgcagttcgccatggcgtactacgtcatcaactactccaagctccgcatctgggagttcgtggagtacgagaggatggtgtacctggacgcggacatccaggtgttcgagaacatcgacggcctgttcgagctcgagaaggggtacttctacgcggtgatggactgcttctgcgagaagacgtggagccacaccccgcagtacaggatcggctactgccagcagtgcccggacaaggtggcgtggccagcggcgaccgccgagctgggccctccgccgtcgctctacttcaacgccggcatgttcgtgcacgagcccagcgtggccaccgccaaggcgctcctcgacaccctccgcgtgactccgcccacccccttcgcagagcaggacttcctgaacatgttcttcagggatcagtacaggccgatccccaacgtgtacaacctcgtgctggccatgctctggaggcaccccgagaacgtgcagctggagaaggtgaaggtcgtgcactactgcgcggcggggtccaagccgtggaggttcacgggcaaggaggcgaacatggacagggaggacatcaacgccctggtgaagaagtggtgggacatctacaacgacgagacgctggacttgaagggcctgccctcgctctcgcccgacgacgacgacgaggtggaggcggtggccaagaagccgcttcgcgcggccctggcggaggccggcacggtcaagtacgtcaccgcgccctcggccgcgtga

SEQ ID NO: 140998 - protein, 345 aa, Zea mays
MAPELMTAKMTAKAAAAAAAAKPATRAYVTFLAGDGDYWKGVVGLAKGLRKVRSAYPLVVAVLPDVPESHRRILVSQGCVVREIEPVYPPENQTQFAMAYYVINYSKLRIWEFVEYERMVYLDADIQVFENIDGLFELEKGYFYAVMDCFCEKTWSHTPQYRIGYCQQCPDKVAWPAATAELGPPPSLYFNAGMFVHEPSVATAKALLDTLRVTPPTPFAEQDFLNMFFRDQYRPIPNVYNLVLAMLWRHPENVQLEKVKVVHYCAAGSKPWRFTGKEANMDREDINALVKKWWDIYNDETLDLKGLPSLSPDDDDEVEAVAKKPLRAALAEAGTVKYVTAPSAA

SEQ ID NO: 140999 - DNA, 1029 bp, Zea mays
  CDS (1)..(1029)
atgtctcccgagctgaccggcaagatggccgccaaggccgccgccgccgctgcggcggtgaagcccgcgacgagggcgtacgtgacgttcctggcgggcaacggcgactactggaagggcgtggtgggcctggccaagggcctgcgcaaggtcggctcggcctatcccctggtggtggcccttctgcccgacgtgccggagtcccaccgccgcatcctcgtctcgcagggctgcatcctccgcgagatcgagcccgtgtacccgcctgagaaccagacgcagttcgccatggcgtactacgtcatcaactactccaagctccgcatctgggagttcgtggagtacgagaagatggtgtacctggacgcggacatccaggtgttcgagaacatcgacgagctgttcgagctcgagaaagggtacttctacgcggtgatggactgcttctgcgaaaagacgtggagccacaccccgcagtacaagatcgggtactgccaacagtgcccggacaaggtgacgtggccgaccaccgagctgggccctccgcccccgctctacttcaatgccggcatgttcgcgcacgagcccagcatggccaccgccaaggcactcctcgacaccctccgcgtcactccgcccacccccttcgcagagcaggacttcctgaacatgttcttcagggaccagtacaggccgatccctaacgtgtacaacctcgtgctcgccatgctctggaggcaccccgagaacgtgcagctggagaaggtgaaggtcgtgcactactgcgcggcggggtccaagccgtggaggttcacgggcaaggaggccaacatggacagggaggacatcaagacgctggtgaacaagtggtgggacatctacaacgacgaggcgctggacttcaagggcctgcccctctcgcccgccgacgccgacgacgaggtggaggcggtggccaagaagccgctccgcgcggcgctggcggaggccggcacggtcaagtacgtcaccgcgccctcggccgcgtga

SEQ ID NO: 141000 - protein, 342 aa, Zea mays
MSPELTGKMAAKAAAAAAAVKPATRAYVTFLAGNGDYWKGVVGLAKGLRKVGSAYPLVVALLPDVPESHRRILVSQGCILREIEPVYPPENQTQFAMAYYVINYSKLRIWEFVEYEKMVYLDADIQVFENIDELFELEKGYFYAVMDCFCEKTWSHTPQYKIGYCQQCPDKVTWPTTELGPPPPLYFNAGMFAHEPSMATAKALLDTLRVTPPTPFAEQDFLNMFFRDQYRPIPNVYNLVLAMLWRHPENVQLEKVKVVHYCAAGSKPWRFTGKEANMDREDIKTLVNKWWDIYNDEALDFKGLPLSPADADDEVEAVAKKPLRAALAEAGTVKYVTAPSAA

SEQ ID NO: 141001 - DNA, 1035 bp, Zea mays
  CDS (1)..(1035)
atgtctcccgagctgaccggcaagatggccgccaaggccgccgccgccgctgcggcggtgaagcccgcgacgagggcgtacgtgacgttcctggcgggcgacggcgactactggaagggcgtggtgggcctggccaagggcctgcgcaaggtcggctcggcctatcccctggtggtggcccttctgcccgacgtgccggagtcccaccgccgcatcctcgtctcgcagggctgcatcctccgcgagatcgagcccgtgtacccgcccgagaaccagacgcagttcgccatggcgtactacgtcatcaactactccaagctccgcatctgggagttcgtggagtacgagaggatggtgtacctggacgcggacatccaggtgttcgagaacatcgacgagctgttcgagctcgagaaggggtacttctacgcggtgatggactgcttctgcgagaagacgtggagccacaccccgcagtacaggatcggctactgccaacagtgcccggacaaggtggcgtggccgaccaccgagctgggccctccgcccccgctctacttcaacgccggcatgttcgcgcacgagcccagcatggccaccgccaaggcactcctcgacaccctccgcgtcactccgcccacccccttcgcagagcaggacttcctgaacatgttcttcagggaccagtacaggccgatccctaacgtgtacaacctcgtgctcgccatgctctggaggcaccccgagaacgtgcagctggagaaggtgaaggtcgtgcactactgcgcggcggggtccaagccgtggaggttcacgggaaaggaggccaacatggacagggaggacatcaagacgctggtgaacaagtggtgggacatctacaacgacgaggcgctggacttcaagggcctgcccctctcgcccgccgacgccgacgccgacgacgaggtggaggctgtggccaagaagccgctccgcgcggcgctggcggaagccggcacggtcaagtacgtcaccgcgccctcggccgcgtga

SEQ ID NO: 141002 - protein, 344 aa, Zea mays
MSPELTGKMAAKAAAAAAAVKPATRAYVTFLAGDGDYWKGVVGLAKGLRKVGSAYPLVVALLPDVPESHRRILVSQGCILREIEPVYPPENQTQFAMAYYVINYSKLRIWEFVEYERMVYLDADIQVFENIDELFELEKGYFYAVMDCFCEKTWSHTPQYRIGYCQQCPDKVAWPTTELGPPPPLYFNAGMFAHEPSMATAKALLDTLRVTPPTPFAEQDFLNMFFRDQYRPIPNVYNLVLAMLWRHPENVQLEKVKVVHYCAAGSKPWRFTGKEANMDREDIKTLVNKWWDIYNDEALDFKGLPLSPADADADDEVEAVAKKPLRAALAEAGTVKYVTAPSAA

SEQ ID NO: 141003 - DNA, 25 bp, Artificial sequence
  primer
atggcccctgagatttccgtaaacc

SEQ ID NO: 141004 - DNA, 25 bp, Artificial sequence
  primer
tcaagcagcagaaggagcaggaaag

SEQ ID NO: 141005 - protein, 372 aa, Artificial sequence
  consensus sequence
  Variant (2)..(2): Xaa in position 2 is any amino acid
  Variant (4)..(6): Xaa in position 4 to 6 is any amino acid
  Variant (7)..(29): Xaa in position 7 to 29 is any or no amino acid
  Variant (39)..(39): Xaa in position 39 is any amino acid
  Variant (43)..(43): Xaa in position 43 is any amino acid
  Variant (57)..(59): Xaa in position 57 to 59 is any amino acid
  Variant (66)..(66): Xaa in position 66 is any amino acid
  Variant (72)..(73): Xaa in position 72 to 73 is any amino acid
  Variant (76)..(77): Xaa in position 76 to 77 is any amino acid
  Variant (79)..(80): Xaa in position 79 to 80 is any amino acid
  Variant (84)..(84): Xaa in position 84 is any amino acid
  Variant (89)..(89): Xaa in position 89 is any amino acid
  Variant (94)..(94): Xaa in position 94 is any amino acid
  Variant (117)..(117): Xaa in position 117 is any amino acid
  Variant (122)..(123): Xaa in position 122 to 123 is any amino acid
  Variant (125)..(125): Xaa in position 125 is any amino acid
  Variant (129)..(129): Xaa in position 129 is any amino acid
  Variant (134)..(135): Xaa in position 134 to 135 is any amino acid
  Variant (139)..(139): Xaa in position 139 is any amino acid
  Variant (142)..(145): Xaa in position 142 to 145 is any amino acid
  Variant (147)..(147): Xaa in position 147 is any amino acid
  Variant (162)..(163): Xaa in position 162 to 163 is any amino acid
  Variant (167)..(167): Xaa in position 167 is any amino acid
  Variant (176)..(176): Xaa in position 176 is any amino acid
  Variant (179)..(179): Xaa in position 179 is any amino acid
  Variant (182)..(184): Xaa in position 182 to 184 is any amino acid
  Variant (185)..(187): Xaa in position 185 to 187 is any or no amino acid
  Variant (189)..(190): Xaa in position 189 to 190 is any amino acid
  Variant (191)..(191): Xaa in position 191 is any or no amino acid
  Variant (193)..(193): Xaa in position 193 is any amino acid
  Variant (203)..(203): Xaa in position 203 is any amino acid
  Variant (206)..(208): Xaa in position 206 to 208 is any amino acid
  Variant (210)..(211): Xaa in position 210 to 211 is any amino acid
  Variant (212)..(212): Xaa in position 212 is any or no amino acid
  Variant (215)..(215): Xaa in position 215 is any amino acid
  Variant (217)..(219): Xaa in position 217 to 219 is any amino acid
  Variant (221)..(221): Xaa in position 221 is any amino acid
  Variant (224)..(224): Xaa in position 224 is any amino acid
  Variant (234)..(234): Xaa in position 234 is any amino acid
  Variant (236)..(237): Xaa in position 236 to 237 is any amino acid
  Variant (238)..(238): Xaa in position 238 is any or no amino acid
  Variant (240)..(240): Xaa in position 240 is any amino acid
  Variant (244)..(245): Xaa in position 244 to 245 is any amino acid
  Variant (246)..(246): Xaa in position 246 is any or no amino acid
  Variant (261)..(262): Xaa in position 261 to 262 is any amino acid
  Variant (263)..(263): Xaa in position 263 is any or no amino acid
  Variant (265)..(266): Xaa in position 265 to 266 is any amino acid
  Variant (280)..(280): Xaa in position 280 is any amino acid
  Variant (283)..(283): Xaa in position 283 is any amino acid
  Variant (286)..(286): Xaa in position 286 is any amino acid
  Variant (288)..(288): Xaa in position 288 is any amino acid
  Variant (291)..(291): Xaa in position 291 is any amino acid
  Variant (297)..(297): Xaa in position 297 is any amino acid
  Variant (300)..(300): Xaa in position 300 is any amino acid
  Variant (307)..(307): Xaa in position 307 is any amino acid
  Variant (309)..(310): Xaa in position 309 to 310 is any amino acid
  Variant (311)..(318): Xaa in position 311 to 318 is any or no amino acid
  Variant (321)..(333): Xaa in position 321 to 333 is any amino acid
  Variant (334)..(358): Xaa in position 334 to 358 is any or no amino acid
  Variant (360)..(366): Xaa in position 360 to 366 is any amino acid
  Variant (367)..(367): Xaa in position 367 is any or no amino acid
MXPXXXXXXXXXXXXXXXXXXXXXXXXXXRAYVTFLAGXGDYXKGVVGLAKGLRKVXXXYPLVVAXLPDVPXXHRXXLXXQGCXVREIXPVYPXPENQTQFAMAYYVINYSKLRIWXFVEYXXMXYLDXDIQVXXNIDXLFXXXXGXFYAVMDCFCEKTWSXXPQYXIGYCQQCPXKVXWPXXXXXXGXXXPXLYFNAGMFVXEPXXXTXXXLLXTXXXTXPTXFAEQDFLNMXFXXXYXPIPXXXYNLVLAMLWRHPENXXXLXXVKVVHYCAAGSKPXWRXTGXEXNMXREDIKXLVXKWWDIYXDXXXXXXXXXXLDXXXXXXXXXXXXXXXXXXXXXXXXXXXXXXXXXXXXXXEXXXXXXXXAPSAA

SEQ ID NO: 141006 - protein, 61 aa, Artificial sequence
  protein pattern
  Variant (2)..(2): Xaa in position 2 is Ala or Pro
  Variant (4)..(4): Xaa in position 4 is Phe or Tyr
  Variant (6)..(6): Xaa in position 6 is Ile or Leu
  Variant (15)..(16): Xaa in position 15 to 16 is any or no amino acid
  Variant (18)..(19): Xaa in position 18 to 19 is any or no amino acid
  Variant (21)..(21): Xaa in position 21 is Phe or Tyr
  Variant (22)..(22): Xaa in position 22 is any amino acid
  Variant (23)..(23): Xaa in position 23 is Lys or Arg
  Variant (24)..(24): Xaa in position 24 is any amino acid
  Variant (25)..(25): Xaa in position 25 is Ile, Met or Val
  Variant (29)..(29): Xaa in position 29 is Ala or Gly
  Variant (32)..(32): Xaa in position 32 is Glu or Gln
  Variant (34)..(34): Xaa in position 34 is Phe or Tyr
  Variant (35)..(35): Xaa in position 35 is any amino acid
  Variant (37)..(37): Xaa in position 37 is Ile or Val
  Variant (39)..(39): Xaa in position 39 is any amino acid
  Variant (41)..(41): Xaa in position 41 is Phe, Leu or Met
  Variant (42)..(42): Xaa in position 42 is Ala, Asp or Glu
  Variant (43)..(45): Xaa in position 43 to 45 is any amino acid
  Variant (46)..(46): Xaa in position 46 is Ala, Gly or Asn
  Variant (47)..(47): Xaa in position 47 is any amino acid
  Variant (48)..(48): Xaa in position 48 is Phe or Leu
  Variant (50)..(50): Xaa in position 50 is Ala or Gly
  Variant (51)..(51): Xaa in position 51 is Ala or Val
  Variant (52)..(52): Xaa in position 52 is any amino acid
  Variant (53)..(53): Xaa in position 53 is Ala or Asp
  Variant (54)..(54): Xaa in position 54 is Cys or Gly
  Variant (58)..(58): Xaa in position 58 is any amino acid
  Variant (59)..(59): Xaa in position 59 is Ser or Thr
  Variant (61)..(61): Xaa in position 61 is Gly, Ser or Thr
MXYXVXNYSKLRIWXXEXXEXXXXXYLDXDIXVXXNXDXLXXXXXXXXYXXXXXFCEXXWX

SEQ ID NO: 141007 - protein, 23 aa, Artificial sequence
  protein pattern
  Variant (3)..(3): Xaa in position 3 is any amino acid
  Variant (5)..(6): Xaa in position 5 to 6 is any amino acid
  Variant (8)..(8): Xaa in position 8 is Asp, Glu, Gly, Asn or Gln
  Variant (10)..(10): Xaa in position 10 is Ala, Asp or Glu
  Variant (12)..(12): Xaa in position 12 is Ile or Val
  Variant (14)..(14): Xaa in position 14 is any amino acid
  Variant (16)..(16): Xaa in position 16 is Ala, Ile or Val
  Variant (17)..(18): Xaa in position 17 to 18 is any amino acid
  Variant (21)..(21): Xaa in position 21 is Ala, Asp or Glu
  Variant (22)..(22): Xaa in position 22 is any amino acid
TGXEXXMXRXDXKXLXXXWWXXY

SEQ ID NO: 141008 - protein, 60 aa, Artificial sequence
  protein pattern
  Variant (2)..(2): Xaa in position 2 is Phe or Tyr
  Variant (9)..(10): Xaa in position 9 to 10 is any or no amino acid
  Variant (12)..(13): Xaa in position 12 to 13 is any or no amino acid
  Variant (15)..(16): Xaa in position 15 to 16 is any amino acid
  Variant (27)..(27): Xaa in position 27 is any amino acid
  Variant (28)..(28): Xaa in position 28 is Ala, Thr or Val
  Variant (29)..(29): Xaa in position 29 is any amino acid
  Variant (30)..(30): Xaa in position 30 is Ala, Ser or Thr
  Variant (31)..(31): Xaa in position 31 is any amino acid
  Variant (32)..(32): Xaa in position 32 is His or Tyr
  Variant (35)..(35): Xaa in position 35 is Ile or Val
  Variant (37)..(37): Xaa in position 37 is Ala or Pro
  Variant (38)..(38): Xaa in position 38 is Ile, Leu, Met or Val
  Variant (40)..(40): Xaa in position 40 is Ala or Pro
  Variant (44)..(45): Xaa in position 44 to 45 is any amino acid
  Variant (48)..(49): Xaa in position 48 to 49 is any amino acid
  Variant (51)..(52): Xaa in position 51 to 52 is any amino acid
  Variant (56)..(56): Xaa in position 56 is Ile, Leu or Val
  Variant (57)..(57): Xaa in position 57 is Ala, Ile, Leu or Val
  Variant (58)..(58): Xaa in position 58 is Lys or Arg
  Variant (59)..(59): Xaa in position 59 is Glu or Gln
AXVTFLAGXXDXXYXXGVVGLAKGLRXXXXXXPLXVXXLXDVPXXHRXXLXXQGCXXXXI

SEQ ID NO: 141009 - protein, 22 aa, Artificial sequence
  protein pattern
  Variant (2)..(2): Xaa in position 2 is any amino acid
  Variant (5)..(5): Xaa in position 5 is Pro or Ser
  Variant (6)..(7): Xaa in position 6 to 7 is any amino acid
  Variant (10)..(10): Xaa in position 10 is any amino acid
  Variant (12)..(12): Xaa in position 12 is Leu or Met
  Variant (22)..(22): Xaa in position 22 is Ile or Val
YXPIXXXYNXVXAMLWRHPENX

SEQ ID NO: 141010 - protein, 16 aa, Artificial sequence
  protein pattern
  Variant (2)..(2): Xaa in position 2 is Phe, His or Tyr
  Variant (3)..(3): Xaa in position 3 is any amino acid
  Variant (10)..(10): Xaa in position 10 is any amino acid
  Variant (12)..(12): Xaa in position 12 is any amino acid
  Variant (13)..(13): Xaa in position 13 is Glu, Lys or Arg
  Variant (15)..(15): Xaa in position 15 is any amino acid
QXXIGYCQQXPXXVXW

SEQ ID NO: 141011 - protein, 20 aa, Artificial sequence
  protein pattern
  Variant (2)..(4): Xaa in position 2 to 4 is any amino acid
  Variant (5)..(6): Xaa in position 5 to 6 is any or no amino acid
  Variant (8)..(9): Xaa in position 8 to 9 is any or no amino acid
  Variant (15)..(15): Xaa in position 15 is Phe or Tyr
  Variant (19)..(19): Xaa in position 19 is Phe or Tyr
TXXXXXPXXFAEQDXLNMXF

SEQ ID NO: 141012 - protein, 13 aa, Artificial sequence
  protein pattern
VVHYCAAGSKPWR

SEQ ID NO: 141013 - DNA, 852 bp, Arabidopsis thaliana
  CDS (1)..(852)
atgcccaagatctgctgctctcgttccgctacacaagttgtggtagcacaaaaatcaaactcgggtaaaggaagaaacggtgaaggaggaatcaagtatggatttagtttgataaaagggaaatctaaccattcaatggaggattatcatgttgctaagtttaccaatttcaatggcaatgaattggggctttttgcaatctttgatggtcataaaggtgatcatgttgctgcttatctgcagaaacatctcttctctaatatccttaaagatggagagttcttggttgatcctcgaagagcaattgcgaaagcttatgagaatacagatcaaaagattttagcagataatagaacggatttagagagtggtggttcgactgctgtgactgcgattttgatcaatgggaaagctttgtggatagctaatgttggtgattcacgagctattgtttctagtcgaggtaaagcaaaacagatgagtgttgatcatgatcctgatgatgatactgagaggagtatgattgagagtaaaggtggatttgtgaccaacagaccaggtgatgttcctcgagtgaacggtttgttagcggtctctcgtgtctttggagataaaaaccttaaagcatatttgaactcagagcctgagattaaggacgtaaccattgatagtcacacagattttcttattctggctagtgacggtatttcgaaggtgatgtcaaaccaagaagcagttgatgtagctaagaagttgaaagatccaaaggaagcggcgaggcaagtagttgctgaagcattgaaaagaaacagcaaggatgacatatcttgcattgttgtccggtttagatga

SEQ ID NO: 141014 - protein, 283 aa, Arabidopsis thaliana
MPKICCSRSATQVVVAQKSNSGKGRNGEGGIKYGFSLIKGKSNHSMEDYHVAKFTNFNGNELGLFAIFDGHKGDHVAAYLQKHLFSNILKDGEFLVDPRRAIAKAYENTDQKILADNRTDLESGGSTAVTAILINGKALWIANVGDSRAIVSSRGKAKQMSVDHDPDDDTERSMIESKGGFVTNRPGDVPRVNGLLAVSRVFGDKNLKAYLNSEPEIKDVTIDSHTDFLILASDGISKVMSNQEAVDVAKKLKDPKEAARQVVAEALKRNSKDDISCIVVRFR

SEQ ID NO: 141015 - DNA, 1470 bp, Glycine max
  CDS (440)..(1384)
ctcgagccgattcggctcgagataccctctctctctctctcttcctctttgtcatggcatttctcttctcttccctttcgtaggttctttctctctctctcttttttgtaatataattcttcccgaattccaatcttgttcaaccatggattcagcatctttatgcctttagctgtattatcaatagcaatatttatgtacaaagtttatgtctttttgtgcaaattctgctttagtctcgtgaaattaataaactttcttggggtgttctgtatttatgcaggttaaaacttggaactttgtgatttttgaatgacccaacaactaaggttatgatcagttggaagcgttggcaaaaaagaatacgcaatagtggtgttgtttgttcattttggtcaaagaaatagtatctgggtacccaggatattgtagttttaagatgggttatctcaattcagttttgtcatcttcaagcgaggttcatgctgcaggtgatgcaattgcgagtggtggggggctaagtcacaatagaaaattcagctatgggtatgctagctctcctggcaagagatcttcaatgggagacttttatgagacaagaattgatggtgttgatggtgaagtcgttggccttttcggagtttttgatggtcatggtggtgctcgtgctgctgagtatgtcaagaaaaacctgtttagtaatttaatcagtcacccaaaattcatttctgacaccaaatcagcaataactgatgcatataatcataccgattctgagttgctgaaatcagaaaatatccataatagagatgctggatcaactgcttccactgctattttagttggtgaccgcttgcttgttgcaaatgttggggattccagagctgttatatgcagggttggtaatgccattgctgtttctcgagatcacaagcctgaccaaactgatgagaggcaaaggattgaagaagcaggaggctttgttatgtgggctggaacttggagagttggaggtgttcttgctgtttctcgtgcgtttggtgatagactcctgaagcagtatgttgttgctgatccagaaattcaggaagaaaaaattgacagctcccttgagtttcttattctggccagtgacgggctatgggatgttgtcacaaatgaggaagctgttgctatgattaaatcaattgaggatgctgaggaggcagcaaagaggctgatgcaagaagcatatcagagaggtagtgctgacaatatcacatgtgttgtcgttcgtttcttgatgaaccaaggtggatccaaagacaaagaggtagtagctcctcctcataatagtagctctgccagtaggaatccttcagtagaaggtttgtgtgataggtgagttgtggatccaaaagatgctgagacttggtaaaaaatcggtttatagtttggttccgtgataagcaatcttagtagttgtgttgg

SEQ ID NO: 141016 - protein, 314 aa, Glycine max; identical to SEQ ID NO: 1555

SEQ ID NO: 141017 - DNA, 1739 bp, Glycine max
  CDS (239)..(1255)
atccactccatcctgttttctcaccctagtaactatgtctcctcctttcgcctcttcaactttctctctctctccctagttgcatgttttcccatgttcaataataataataattctcactaatctcaaccttgttcagtattcaatttgattaatgacaccaagatccaagcacaaaattaaaacttgggagtgtgtgattattattccaaaatgaccccaccccacacttagtgttatgataacttggaaccttttgcacgcaagaataagctgtacacacgcaagaatagcgctattattatttcttcattttttgttgttgtgggtcaaagaagtagcacctggaagccctgaatattcagcctgtgatatggggtacctcaattcagttttgtcctcttcaagccaggttcatgctgcagaagattcacctgtcagtggagggggcctcagtcagaatggaaaattcagctatgggtatgctagctcccctggcaagagatcttcaatggaagatttttatgagacaaaaattgatggtgttgatggtgaaattgttggcctttttggagtttttgatggccatggtggtgctcgtgctgctgagtatgtcaagcaaaacctatttagcaatttgatcagtcatccaaaattcatttctgacaccaaatctgcaatagctgatgcatataaccataccgactctgaatttctgaaatctgaaaataatcaaaacagagatgctggatcaactgcttccactgccattcttgttggcgaccgtttgcttgttgcaaatgttggggactccagagctgttatatgcaggggtggaaatgccattgctgtttctcgggatcacaagccagatcaaactgatgagaggcgaaggattgaagatgcaggtggctttgttatgtgggctggaacttggagagttggtggagttcttgctgtttcacgtgcatttggtgatagactcctgaagcagtatgttgttgctgatccagaaatccaggaagaaaaggttgatagctctcttgagtttcttatattggctagtgatgggctatgggatgttgtctcaaatgaggaagctgttgctatgattaaaccaattgaggatgccgaggaggcagcaaagaggctaatgcaagaagcatatcagcgaggtagttctgacaacattacgtgcgttgtcgttcgttttttgtcaaaccaaggtgcatcttctcatagtaactctggctaagtgtccttcactcgaaggctagtgtatatctggtgatggataaaaaaaagacgggatgtggcaaaatcagtttattatagtaggtcataggcattccttgtagctatgtaccatgcaagaatagaaatcaaatttgaactcactatggccctctagcatagagctattcacaccatccccacatccataattgagtcctacttgtagctacgaaaaatagttgtgcaaagagtttacaatgttttaattatttcacacacatgctatttgtacatgtggtgttgatcttattaatcccctcactccaaaacaaaattctcgtgtgcttggttgaagttaagttccccctttcattgtcaatctggttttacagtgttagtcccgtcccatgtaacagtttgttctactttaattatggcttttatcaagtgtataataatataaatctaataagaaacaatgtgctttctctttcttcttttgt

SEQ ID NO: 141018 - protein, 338 aa, Glycine max; identical to SEQ ID NO: 1503

SEQ ID NO: 141019 - DNA, 849 bp, Glycine max; identical to SEQ ID NO: 1552
  CDS (1)..(849)

SEQ ID NO: 141020 - protein, 282 aa, Glycine max; identical to SEQ ID NO: 1553

SEQ ID NO: 141021 - DNA, 1345 bp, Sorghum bicolor
  CDS (179)..(1033)
ctactgggctgtcctagaaatgtgccaaacccgtcgtctcgtcttcccctcccggctcccggttccggccccgctcctcccaaaatcccccaaaacctgacgcgctggagggccgatccgcggctccccgctgcctgatccgagccggctcctcgcccccgccggggatccaagtgggatggggtacttgagctccgtgatcggccaccccaccgatggatcctccgtcagcggcggcggcctcagccagaatggtaaatttagctatggctatgcaagctcccctggtaaaagggcatccatggaagacttctatgagacgaaaattgactgtgttgacggtcagataattggtctttttggagtttttgacggtcatggtggtgctaaagtagcagagtatgttaaagaaaacttgttcaacaatcttgttagtcatccaaagttcatgagtgatactaaggttgctatagatgatgcttataaaagcaccgacagtgaattcttagaatctgacagtagtcaaaatcaatgtgggtcgactgcatcaactgctgtacttgttggtgatcgtctctttgtcgcaaatgttggtgactctagggctatcatatgcagggaaggaaatgctatccctgtttcaaaggatcacaagcctgatcaaactgatgagcggcagcgtattgaagaggctggaggtttcgtgatgtgggcaggaacatggcgtgttggtggtgtacttgctgtttcgcgagcttttggtgacaaactcttaaagcaatatgtagttgtggatccggagatccgagaggaagctgtcgatgacacacttgagtttctcatccttgcaagcgatgggctgtgggatgttgtctctaacgaggaagctgtcgcgatgaccagatccattcaggacccagaagaggctgcaaagaagctcttgcaagaggcctacaagagggagagcagtgacaacataacttgtgtcgttgtgcgcttcttgcgcgggcaaggtagtagcggatacgcttaaagcatagcaataaaattactgtacgcagtggtgtgagctatgatatacatgcctcgattgattttccaaggttgaatggagaaaggtaggatacttgtattatgacgatgggttgaactgggaaatgtgtgtaccctatatatatgttaggttagacactaagtttgctggccgtgtttcaccctagtttgattttgatgtttgggtcagaagatagtgttgtattgttgtggatggaaaaaaacacgataaaattgtcccttggtttgaaatgtatctgtcagtatactactttccccttgcttgactctc

SEQ ID NO: 141022 - protein, 284 aa, Sorghum bicolor
MGYLSSVIGHPTDGSSVSGGGLSQNGKFSYGYASSPGKRASMEDFYETKIDCVDGQIIGLFGVFDGHGGAKVAEYVKENLFNNLVSHPKFMSDTKVAIDDAYKSTDSEFLESDSSQNQCGSTASTAVLVGDRLFVANVGDSRAIICREGNAIPVSKDHKPDQTDERQRIEEAGGFVMWAGTWRVGGVLAVSRAFGDKLLKQYVVVDPEIREEAVDDTLEFLILASDGLWDVVSNEEAVAMTRSIQDPEEAAKKLLQEAYKRESSDNITCVVVRFLRGQGSSGYA

SEQ ID NO: 141023 - DNA, 1490 bp, Zea mays
  CDS (148)..(1104)
tcagaatcggatcaaagagcaagcgacggggatgagagagaagagaggaccgtcgtctccccttcctccctcacaagtcacaactcacacgccagacggagacgcggccgcagccgagcttacccccgccggcgagttcacccccacatggtcggccggatggagcggcagaccgcgtcgtcgccagcttcgtgctcctcctcctcctcctcctcctcttcctcctcggtctgcggcggcaagaagcgccctgatatcctcaacatgatccggaatgcagcctgtcttaattcgtcatctactgataccggcaagggaaggagtaaattgtcgaccaacaaagttacacatggattccacctggtggaaggcaagtccggccatgacatggaagactaccatgtggcagagtacaagtatgtgaagaatcatgagcttggtctctttgccatttttgatggccatttaggagataaggtgccaagttacttgaaagctaacctttttagcaacataatgaaagagcctctcttctggtctagccctcaagaagcaataaagaatgcatactgctctacaaacaagtatattctagaaaataccaaacaacttggaccaggtggttcgacagcagttactgctattgtagttgatggtaaggacatgtggatagcaaatgtaggcgactctagagctgttgtgtgtgaaagaggctctgctaagcagctcactgttgaccatgagccccatgaaactaatgaaagacagaggattgaaaagcacggtggctttgtgacgacatttcctggtgatgttcctcgggtgaatggtcagcttgctgttgctagggcatttggtgaccaaagcctcaaggcccacttgagctctgaacctgatattagtcatgtaccaataaactcaagtatagagtttgtcatacttgccagtgatggattgtggaaggtaatgaagaaccaggaagccgtcgatctcgtgaagtcaatcaaggatcccaaggcagcagcgaagcgattgaccactgaagcgttggcaaggaagagcaaagatgacatctcttgcattgtcatccgtttccgctgctgacttaccccctcaacagcacttttttatttccgatccacgcctcatgatatggattgagacaatctgtctgtaatcatctgccttgccgattttttttctggtagaatctgctctacctaccgtagttgtggacagacctggaactaattaggacagtgaagacttgagagctggtaggtgagtgtgtgcagggtgtccattccattcgcctgtgcatatatacacccagcgtggactgtgcatccgttgaccgggacttgggggtctgtcaggacctaagtgcttgtgtgcttgtgatgctaatttacttaatggtgcgaaggaacttgtcgatatctgatttggttaatttagttttttctttaataaaaataacaagatcacag

SEQ ID NO: 141024 - protein, 318 aa, Zea mays
MVGRMERQTASSPASCSSSSSSSSSSSVCGGKKRPDILNMIRNAACLNSSSTDTGKGRSKLSTNKVTHGFHLVEGKSGHDMEDYHVAEYKYVKNHELGLFAIFDGHLGDKVPSYLKANLFSNIMKEPLFWSSPQEAIKNAYCSTNKYILENTKQLGPGGSTAVTAIVVDGKDMWIANVGDSRAVVCERGSAKQLTVDHEPHETNERQRIEKHGGFVTTFPGDVPRVNGQLAVARAFGDQSLKAHLSSEPDISHVPINSSIEFVILASDGLWKVMKNQEAVDLVKSIKDPKAAAKRLTTEALARKSKDDISCIVIRFRC

SEQ ID NO: 141025 - DNA, 1415 bp, Triticum aestivum
  CDS (264)..(1166)
attaaaccgagcgccagtggatctctcctcgggcatcggcatcggagcggagagagagagagagagagccacccagccatgagatggtatgcatcggtaggctgagggcgctggtgcttcgtgcggcggcgggcgcgggcgcgggcaggcgccggtgggccagggtcctgtgcggtcgggcggtcgatgtgtgcgtgacaccccgtccgcgcgggcacggttggcgtggattccgggcggtggctggcgccaggacgaagatgatgctcgattcctccgactctgactccggcgctccggcggggcagctgcagctgcagcgccgcgcggttgctgctgggacccagccgcaggatggagggtacgccagtgcggggtggcagagggaagatggtaaactgaaatgtgggtattcaagttttagagggaaaagggctacaatggaggatttctatgatgtaaaactaactgaaattgatggacacgctgttagcctatttggtgtattcgatggtcatggggggtcacgtgctgctgagtatttgaaggagcatttgttcgagaaccttatgaaacaccccaagttcttgactgatacaaagcttgctataagtgaaacatatcagaagacagatgcagatttcttagaatcagaatcaagtgctttcagggatgatggttccacagcttcgactgcggttttagtgggtggccatctatatgtagcaaatgttggtgactcccgtgctgttatttcaaaagccgggaaagctagggcactctcagtagatcacaaacctaacaggtctgatgaacgcaagagaattgaaaatgctggaggtgttgtcatctgggctggtacttggagggtaggtggcgtactggcaatgtcccgtgcgtttggtaatcgtctactgaagccatttgtggtggcagaacctgaaattcaggaagaattgattaatggagaattggagagcctggttcttgccagtgatgggctttgggatgccgtagaaaatgaggaagctgtgtcccttgcaaaaacagaagatgtgccagagtctgcggccaggaaactgacggagattgcctactctcgtggcagcgctgacaatattacatgcatcgtggtgcaattccaccatgataaaattacaggatgagatggactacagctgatttaaggtttctctgcttcaggcctctttttatcctgcaagcggagtggggtttctcccacatctatttttgcctctgtggcaactgctcaggacttcctctattgattctttcctttgtgtggcagaccttttctcttttgagaattgtaatgggaatttttgagtttgatgtatccatgtctatgtctgtactaatacttgttatatttaatataaaaagagtgagttacg

SEQ ID NO: 141026 - protein, 300 aa, Triticum aestivum
MLDSSDSDSGAPAGQLQLQRRAVAAGTQPQDGGYASAGWQREDGKLKCGYSSFRGKRATMEDFYDVKLTEIDGHAVSLFGVFDGHGGSRAAEYLKEHLFENLMKHPKFLTDTKLAISETYQKTDADFLESESSAFRDDGSTASTAVLVGGHLYVANVGDSRAVISKAGKARALSVDHKPNRSDERKRIENAGGVVIWAGTWRVGGVLAMSRAFGNRLLKPFVVAEPEIQEELINGELESLVLASDGLWDAVENEEAVSLAKTEDVPESAARKLTEIAYSRGSADNITCIVVQFHHDKITG

SEQ ID NO: 141027 - DNA, 1210 bp, Zea mays subsp. mays
  CDS (2)..(910)
gatgctggactcctctgactgtgcctctgctgccgccgccgcggagacggggcaggtgcagccgcagcgccgcgcggtgggggccgtgcccctggcgcacgacggcggctacgccagcggcggatgggagagagaagatggcaaactgagttgtggatactcaagttttagaggcaagagagctacgatggaagatttctatgatgtaaaactaactgaaattgatggacaagctgttagcctgtttggtgttttcgacggtcatggaggatcacgtgctgctgagtatttgagggagcacttgtttgataaccttctcaagcaccctgatttcttgacagatacaaagcttgcgataagtgaaacatatcagaaaacagatacagatttcttggaatcagaagcaagcgctttcagggatgatggttcaacagcttcaactgcacttttggtgggtgaccatttatatgttgcaaatgttggtgattctcgtgccgttatttcaaaagctggcaaagctatggcgctttcagaagatcacaaacctaacagaattgatgagcgaaagagaattgaaaatgctggtggtattgtcatttgggctggcacttggagggtgggtggtgtattggcaatgtcccgtgcatttggcaatcgtttactgaagccatatgtggtggcagaacctgaaattcaggaagaacaggtcagtggtgggctggaatgcctggttcttgctagtgatgggctttgggatgttgtggaaaatgaggaagctgttttccttgggagatcggaggacacgccagagtctgcagctaggaaattgacagagattgcttactctcgcggcagcgctgacaatatcacatgcatcgtggtccaatttcaccatgacaaaaccggatgagccgtatggctgccaatttcagttgtaccctgcttcagtctattattatcctgcaagctgggtggtgggcttctcccagatttaccctgcttcatgctattattatcctgcaagccgggcggtggggtttctcagatctatcgctcatgtagcaactttcaagcactcgtccattgattcttttgttgtcttgtaggaaacatttgttccgacaggtgtagtagacacttttaaactgataattcaataaacgtatgtttacgattactgtttagtggaaaatggttttcattttgcctt

SEQ ID NO: 141028 - protein, 302 aa, Zea mays subsp. mays
MLDSSDCASAAAAAETGQVQPQRRAVGAVPLAHDGGYASGGWEREDGKLSCGYSSFRGKRATMEDFYDVKLTEIDGQAVSLFGVFDGHGGSRAAEYLREHLFDNLLKHPDFLTDTKLAISETYQKTDTDFLESEASAFRDDGSTASTALLVGDHLYVANVGDSRAVISKAGKAMALSEDHKPNRIDERKRIENAGGIVIWAGTWRVGGVLAMSRAFGNRLLKPYVVAEPEIQEEQVSGGLECLVLASDGLWDVVENEEAVFLGRSEDTPESAARKLTEIAYSRGSADNITCIVVQFHHDKTG

SEQ ID NO: 141029 - DNA, 1558 bp, Zea mays subsp. mays
  CDS (372)..(1211)
aagcaaccggggccgagagagacgagatgaggcctgcctcttctccctccgtcacacgcgagacggagacgcgtctgaagctgaggcctgtataaaagcgctaaagatccctcgctctcttcccccccgtgcgctgtgtcccgtctctgcagcaagttctgtcttcgtccatccatccgtccccgtctcactgcctgtggcccgtgggtagcggttgtcgatcagcttacccacgccggcgtgttctccctgacatggtcggccggatggagcggcagaccgcgtcgtcgtcagcgtcatgctcccccgccgccgccgccaccacctcctcctcgtcctgcggcggcaagaagcggcctgatatcctcaacatgatccggaatgcatcctgtcttaattcgtcgtctgctgataccggcaagggaaggagtaaattgtcgaccaacaaagttacacatggattccacctggtggaaggcaagtccggccatgacatggaagactaccatgtggcagagtacaagtatgtgaagaatcatgagcttggtctctttgccatttttgatggccatttaggagataaggtgccaagttacttgaaagctaacctttttagcaacataatgaaagagcctctcttctggtctagccctcaagaagcaataaagaatgcatactgctctacaaacaagtatattctagaaaataccaaacaacttggaccaggtggttcgacagcagttactgctattgtagttgatggtaaggacatgtggatagcaaatgtaggcgactctagagctgttgtgtgtgaaagaggctctgctaagcagctcactgttgaccatgagccccatgaaactaatgaaagacagaggattgaaaagcacggtggctttgtgacgacatttcctggtgatgttcctcgggtgaatggtcagctcgctgttgctagggcatttggtgaccaaagcctcaaggcccacttgagctctgaacctgatattagtcatgtaccaataaactcaagtatagagtttgtcatacttgccagtgatggattgtggaaggtaatgaagaaccaggaagccgtcgatctcgtgaagtcaatcaaggatccacaggcagcagcgaaacgattgaccactgaagcgttggcaaggaagagcaaggatgatatctcttgcattgtcatccgtttccgctgctgagttaccctctctccacggcactgatatccagtcttcacctcatgatttagattgagacaatttgtctttgccgaattttctgatagaatatgctgtacctatcatagctgtcgacaggcctggaactaattagggtagtgaagacttgagagctggttggtgagtgtgtgcagggtgcctattcgcctgtgcatatgttgactctgcatccgttgatccggacttgggcgactgtcaggaccttagtgcttgtgtgcttgtgatggtaatggacctaatggctaatggtggtaagggaacttgttgataccaaatttggttaatttagttttttttcatggctcgcc

SEQ ID NO: 141030 - protein, 279 aa, Zea mays subsp. mays
MIRNASCLNSSSADTGKGRSKLSTNKVTHGFHLVEGKSGHDMEDYHVAEYKYVKNHELGLFAIFDGHLGDKVPSYLKANLFSNIMKEPLFWSSPQEAIKNAYCSTNKYILENTKQLGPGGSTAVTAIVVDGKDMWIANVGDSRAVVCERGSAKQLTVDHEPHETNERQRIEKHGGFVTTFPGDVPRVNGQLAVARAFGDQSLKAHLSSEPDISHVPINSSIEFVILASDGLWKVMKNQEAVDLVKSIKDPQAAAKRLTTEALARKSKDDISCIVIRFRC

SEQ ID NO: 141031 - DNA, 1188 bp, Glycine max
  CDS (96)..(944)
aaaataaaacacaccctctacgtgtccacactctctgatcacaacacacccgcttaattaaatctctatatataaaccccttcaggcactccactatgacgggcaaagaaatttttcataagatgaaggaaaaagttttgggatcatctgatcccgattcaggtaaaggaaagagcaagatgaagaagcacataactcatggctttcacttggtaaagggaagatcaggtcatgccatggaagactatcttgttgctcaatttaagcaagttgacaacaaagagttgggtttatttgcaatatttgatggccactctggtcacagtgtacctgattacttgaagtctcatttgtttgataatatcttgaaagagcctaacttctggacagaacctgctgaggctgttaagagagcatatagtataactgattctactattttagacaaatcaggtgaattgggtagagggggttcaactgcggttacagcaatattgatcaactgttacaagctactagtggccaatattggggattcccgggctgtcttatgtaagaatggcgtagccaaacaactatcggtggatcatgaaccaagcatagaaagtgaagatataaaaaacagaggtggttttgtgtcaaacttcccaggggatgtgccacgtgtcgatggtcagttggcagtgtcaagggcatttggtgacaaaagcctgaagatacatttgagctcagaaccatatgtaactgtggagatgatagaagatgatgcagagtttcttatactagccagtgatgggttatggaaggtaatgtcaaatcaagaagcagttagtgctatcagagatgttaaggatgctagatctgcagcaaaggtgcttactgaagaagcaaagaacaggaaaagctcagatgatatctcttgcgttgttgtgaaatttcagtgatcagtaaactcacatagtatatttttatctacgaacttgaaagtgtaacatatactttagtgtaatgttgataccttttaggtgttattatgtcatgccattcagtgtgtgatatttaatcttctttaatttcatacaaatgaaactgctgagaacgtgttgtttgatgtaccaatgttcaaaaggatttagttttggattgtgtagaccaaaataattcgtatgaatgcaaggaagtttggtc

SEQ ID NO: 141032 - protein, 282 aa, Glycine max; identical to SEQ ID NO: 22122

SEQ ID NO: 141033 - DNA, 1188 bp, Glycine max; identical to SEQ ID NO: 141031
  CDS (123)..(944)

SEQ ID NO: 141034 - protein, 273 aa, Glycine max
MKEKVLGSSDPDSGKGKSKMKKHITHGFHLVKGRSGHAMEDYLVAQFKQVDNKELGLFAIFDGHSGHSVPDYLKSHLFDNILKEPNFWTEPAEAVKRAYSITDSTILDKSGELGRGGSTAVTAILINCYKLLVANIGDSRAVLCKNGVAKQLSVDHEPSIESEDIKNRGGFVSNFPGDVPRVDGQLAVSRAFGDKSLKIHLSSEPYVTVEMIEDDAEFLILASDGLWKVMSNQEAVSAIRDVKDARSAAKVLTEEAKNRKSSDDISCVVVKFQ

SEQ ID NO: 141035 - DNA, 1188 bp, Glycine max; identical to SEQ ID NO: 141031
  CDS (180)..(944)

SEQ ID NO: 141036 - protein, 254 aa, Glycine max
MKKHITHGFHLVKGRSGHAMEDYLVAQFKQVDNKELGLFAIFDGHSGHSVPDYLKSHLFDNILKEPNFWTEPAEAVKRAYSITDSTILDKSGELGRGGSTAVTAILINCYKLLVANIGDSRAVLCKNGVAKQLSVDHEPSIESEDIKNRGGFVSNFPGDVPRVDGQLAVSRAFGDKSLKIHLSSEPYVTVEMIEDDAEFLILASDGLWKVMSNQEAVSAIRDVKDARSAAKVLTEEAKNRKSSDDISCVVVKFQ

SEQ ID NO: 141037 - DNA, 1665 bp, Glycine max
  CDS (309)..(1379)
caaatctcgctatgcttctcttctaacctctcaccctcgctctctttctctctagggtttcgttctcattctagattcccacatagaaactgtttctgcgttatttgattcttctcccaacctttccttgatccggattaagattcctggcacgtttttgaaccgatccacttcatatcggatccgaattcgaacattcaacatctgattccgcaattctctccgaattttgctttgaatttgcttttcgaatagatgattacagttccttagacagttcaattattaaaaaaaggtacatcatttagatggtatgccgcagttgtgtaaggtctttggttgttcaagctggaaccttcgccaacagagtgagaatcaacggatttgggaggagtttgcaggcagttcagagtttttctcattggccaattcgtgaatacaagacaaccacaaggatgatggttgatacgggttctatgtcaagggctggaccccttgttgatacgatgccagagaaagatgatgatggtcggtttgccagtggagggtggaaaagtgacgatggaagacttagctgtgggtattcaagttttaggggaaagagagtgacaatggaggatttttatgatattaagacattgaagattggtggccaatcaatatgcttatttggaatatttgatggtcacggtggttctcgtgctgctgagtatttaaaggagcatctttttgataatctcttgaagcatccaaaatttttgacagatgccaaattggctataagtgaaacatatcaacagactgatgctaattttctggattctgaaaaggacaccttcagggatgatggatctacagcttcgacagcagttttggttgataaccatctttatgtagcaaatgttggagattctaggactataatatcaaaagctggtaaagcaaatgctctctctgaggatcataaaccaaatagaagtgatgagcggaagagaatcgagaatgctggtggtgttgtcatgtgggcaggtacttggagggttggaggggtgctagcaatgtctcgtgcctttggtaaccgtatgctgaagcagtttgtagtagcagaacctgagatccaggaccaggagatagatgaacaaattgaactgattattcttgcaagtgatggactctgggatgtagtacagaatgatgatgctgtttctcttgcccgcacggaagaggagcctgaggcagctgcacgaaagttaacagaagcagcattttctcgtgggagtgcagataacattacatgcattgtggtgcaattccaccatgagaaagcagaactagctaatcctgacaaagcagaagcagctagtgctcagcatgagtagatgatgtgaaagcacaaaatgcatgtgttggttatattcgcgtcaaattgaatgaattgaggtcagcatatgcatgatggctcactctgcatgtcaaggcaatttgtttattcattagttttcttatgtaagtcactcttgttcttgtattgggatttttgcatcgtgttcttctgatgatttcagcgtgtgtccgtatatatttaaagttttcctgtttgtagagaaatcaagttggtatttttgttctgatctaataaatgcaatatgcatttttttttatcat

SEQ ID NO: 141038 - protein, 356 aa, Glycine max
MVCRSCVRSLVVQAGTFANRVRINGFGRSLQAVQSFSHWPIREYKTTTRMMVDTGSMSRAGPLVDTMPEKDDDGRFASGGWKSDDGRLSCGYSSFRGKRVTMEDFYDIKTLKIGGQSICLFGIFDGHGGSRAAEYLKEHLFDNLLKHPKFLTDAKLAISETYQQTDANFLDSEKDTFRDDGSTASTAVLVDNHLYVANVGDSRTIISKAGKANALSEDHKPNRSDERKRIENAGGVVMWAGTWRVGGVLAMSRAFGNRMLKQFVVAEPEIQDQEIDEQIELIILASDGLWDVVQNDDAVSLARTEEEPEAAARKLTEAAFSRGSADNITCIVVQFHHEKAELANPDKAEAASAQHE

SEQ ID NO: 141039 - DNA, 1396 bp, Triticum aestivum
  CDS (281)..(1153)
ggccaaagctgaccacctccacccgcacctccctccctccctccctcaattattacaagccccttagcatgttaatcacttcagaccgatccatccgaccatcagctgtattgtatttgttcggtggatgacagcggggagaggtgcgattctgacttcccgaggggcggctggattccaagaaaccatattcttgtgctgctagtgctagctagctaggggcgaccgagtttcagccagggacttgtaaaccggtggtctcgaggaggtacccgatcccatggccggcaaggaaatctaccacaagatgaaggacaaggtgaaagatgcttttagttcatcagggccagaaacagggaaaggcaagacaaaattgtcaggcaggcgtgtcaagcatggttaccatcttgtgaaggggaaatcaaatcatccaatggaggactacttggtggcggagtacaggcaagttggggagcatgatttgggtttgtttgcaatatttgatggccacctgggccacactgttccagactttctgcgtgcacatctctttgataacatcttgagcgagccagaattcttgagtgacacgaaaaatgctatcagaaaagcatatctacttaccgatgagaaaatattggaaaaagcagctgagttgggaagaggaggctccacggctgttaccgccatcttaataagcagtaacgatagtgtgaagctagtggtcgcgaatattggagattcacgagcagttattagcaagaatggtaaagcagagcagctttcagttgatcacgagcctagcatggagcgagaaattattgaggaaaaaggcggatttgtttcgaacctaccaggagatgtgccacgagttgatgggcagctggctgttgcaagagcattcggagaccggagcttgaaaaagcacctcagctctgagccacacgtggctgaggaagttatcgatgagagttcagattttctaattctagcaagtgatggcttatggaaggtgatgaccaaccaagaggctgttgatgagatcaaggacatcagggacgcacaggcagctgcaaagcatctgacggagcaggcggtgaacaggaagagcaaagacgacatctcctgcgtcgtcgtaaacttccactgctagcagagcttgaagctgctgctagcttctcaagtgtacaatttcttttgtgtcggattggttttacggtttgctgttgatggtcggatattgtgtttaatcttttcttgttgggaataatccaccacccaaggggatcaaggtttgtagcacccaggggtttcaacaaaggttgaatattgttgtttgttcaaaggctataataaaaagtgtttctctttttactaaaaaaaaaaaaaaaaaaaa

SEQ ID NO: 141040 - protein, 290 aa, Triticum aestivum
MAGKEIYHKMKDKVKDAFSSSGPETGKGKTKLSGRRVKHGYHLVKGKSNHPMEDYLVAEYRQVGEHDLGLFAIFDGHLGHTVPDFLRAHLFDNILSEPEFLSDTKNAIRKAYLLTDEKILEKAAELGRGGSTAVTAILISSNDSVKLVVANIGDSRAVISKNGKAEQLSVDHEPSMEREIIEEKGGFVSNLPGDVPRVDGQLAVARAFGDRSLKKHLSSEPHVAEEVIDESSDFLILASDGLWKVMTNQEAVDEIKDIRDAQAAAKHLTEQAVNRKSKDDISCVVVNFHC

SEQ ID NO: 141041 - DNA, 1567 bp, Triticum aestivum
  CDS (362)..(1216)
gacccacgcgtccgcccacgcgtccgcacgcgcaaacctgacgaaagaaaaaatacccaaaaccggagcccctcctgaccctgagcgagagcagctcagctccttcgcctccatcgctcaaggcctcgagctctcctccatctcccctgcgaatctccgagctcgtccaccgctggatcgatcgggtgcagagttccatgaaagaggcgcggttttgggaggccgttgtaaccgaagccgagccccgtggtgtcccgagacgggtctcgctggcggcgggggcttcgtattcttcttctccctccggctgctctatcttgttttagttcacgggttggaactggttgggagtttacgagatatggccaggttttgctgcttcggcgctggttgctccgagttgacagggcatgcatcaaccacctctggtaaagggaaaggctgtcagggccaagtcaaggttagctacgggtttagccttgtaagaggaaagacaaaccatccgatggaggattttcatgtcgcagaacttgctgaagtgaaaggaaacgagcttggtctttttgctatttatgatggtcatttaggcgatactgttcctgcatacctacagaaaaatttgtttcctaatattttgaacgaggaagagttttggacacatccggacagagcaatcacaaaggcttatgaaaagacggacaaggctattctgtcacatactccagatttgggacaaggtggctccactgccgtaactgccatccttataaacggcagtaagttgtgggtagctaatgttggggattcgcgagctgttcttctgaaaggaggtgaggccatacagatgtcaattgaccacgacccgaatgctgagcgcggcgctattgaaaataagggtggttttgtttcaaatatgccaggagatgttcccagagtctgtggtcagttggccgtgtccagagcgtttggggacaggaatctaaaatcacttttgaaatcagagcctgatgtgaaagttgaagatatcgatcacactgctgagctagttgtccttgcgagcgatggagtttggaaggtaatgaacaatcaggaagccgttgatgtggtgaaaaggtacaaggacccacaaacagctgccaagcaattagtcgccgaagcagtgaaaagagacagtaaagatgatatatcatgcgtggtcgttcggttcaagatgtaaatttgttgcaggcaactcgtgaagaattgtcaccgagaggagagcacaaggaattataacagcaaaacatagcctgcttgacaaggatagtggtaatgcaaaagaataattctctggaatgctggctgtaaaggatgtgttagcttgattgtaagttcatatataaatatgctagaattctttgtttggtgattccagggtacatgcgagtgggtccaaatagccttcttctgtaaataatgcttttcagatattcaaagctcagggtgctccgttgtgagagctctttgggtgggttgtcttcatcttccaacttggagtttaccccaaattgggtaaaattgattttaa

SEQ ID NO: 141042 - protein, 284 aa, Triticum aestivum
MARFCCFGAGCSELTGHASTTSGKGKGCQGQVKVSYGFSLVRGKTNHPMEDFHVAELAEVKGNELGLFAIYDGHLGDTVPAYLQKNLFPNILNEEEFWTHPDRAITKAYEKTDKAILSHTPDLGQGGSTAVTAILINGSKLWVANVGDSRAVLLKGGEAIQMSIDHDPNAERGAIENKGGFVSNMPGDVPRVCGQLAVSRAFGDRNLKSLLKSEPDVKVEDIDHTAELVVLASDGVWKVMNNQEAVDVVKRYKDPQTAAKQLVAEAVKRDSKDDISCVVVRFKM

SEQ ID NO: 141043 - DNA, 1178 bp, Triticum aestivum
  CDS (103)..(1002)
ctgcctcgccgccggggccccgcttcagccgctacggaaggttggaaaccatgacgacggcctccatggcgccgagcaggaggcggtgcgagcaaagcaaagatgccctctgtacaggtgcaacggaaggttggaaaccaagacgacggcctccatggcgccgagcaggaggcggtgcgcgccacggggagaggcaagagcaaggcgtcggcgcggaaggtaacctacggcttccacctggtggagggcaagatgccgcacggcatggaggaccgccacgtggccgagttccggcgcctggacgacggcaacgaggtgggcctcttcggcgtcttcgacggccactcgggcgccgacgtcgccacctacctccggaaccacctcttcgacaacatcctcggcgagccagacttctgggaggacaccatgggggcgatacggcgcgcctaccaccgcaccgacaggaaggtgctcaagaagaagaaggtgaccgccgacggcgaggagatagtaaggccacgccgcggcgggtccacggcggtgacggtcatcctcctcaacggggagaccctggtggtggcaaacgtgggggactcccgcgccgtcgtgtgcgagagcggcagggcgaggcagctctccgtggaccacgagccgcttcgggagcgcgacgccatcgagagcaggggaggcttcgttaccgagatgcatggggacgtgcctcgcgtggacgcgtcgctggcgatgtcgcgggcgttcggtgaccggaaactcaaggagcacatcagctccgacccggacgtggccatcgagcacgtcggggacgatacggagttcgtcgtcgtcgccagcgacgggctctggaaggtgatgtccaaccaggaggtggtggacgaggtgaggagcacgcgcgacgcccggaaggcggcggtgaagctcgtggatgcggctgtggaccggggtagcaaggacgacatcgcttgcgttgtcgtgcgcatccattgacctgcaacgatgatatacgatcatgtgtttgttctgtggtgcgtagaaccagtttgtagaagggaggtgagctgaagtgtttgctgtgaacttacagaaaggaaatgcactggactgtttgatgtcaaaataaaaatgaaaacccgcgcccagtagccttcaccgcaccttcttct

SEQ ID NO: 141044 - protein, 299 aa, Triticum aestivum
MPSVQVQRKVGNQDDGLHGAEQEAVRATGRGKSKASARKVTYGFHLVEGKMPHGMEDRHVAEFRRLDDGNEVGLFGVFDGHSGADVATYLRNHLFDNILGEPDFWEDTMGAIRRAYHRTDRKVLKKKKVTADGEEIVRPRRGGSTAVTVILLNGETLVVANVGDSRAVVCESGRARQLSVDHEPLRERDAIESRGGFVTEMHGDVPRVDASLAMSRAFGDRKLKEHISSDPDVAIEHVGDDTEFVVVASDGLWKVMSNQEVVDEVRSTRDARKAAVKLVDAAVDRGSKDDIACVVVRIH

SEQ ID NO: 141045 - DNA, 1500 bp, Triticum aestivum
  CDS (138)..(1097)
  misc_feature (705)..(705): n is a, g, c or t
aactcgtgtgccgctgcctcgtctcgtctcgtcttctcgaccaagtttctccctttctcctctctctctttctctccgcgttgtggctgtggcctgcggggcgcgggccggcggcggttgctcgttcttcttggcgtatggtcggccggatggagcggcagacggtgtcgacgtcctccgcgtcctgctccccctccgccgcctcctcatcctcttcctcgtcatgcggcggacggaagcggcccgacatactcaacatgatccggagtgcagcatgtctgaattcatcatctactgatactggcaaggggcggagtaagcaatcaagcaccaaggtgacacacggattccacctggttgaagggaaatctggccatgacatggaggactaccatgtagcagagtacaagtgcgataagaaccatgagcttggcctctttgccattttcgacggccatctgggggaccgtgtgcccagttacttgagagctaaccttttctccaacatactcaaagagcctctcttctggactgaccctcaggaagcgattaaaaatgcatatggctctacaaacaaatatattctggaaaatgccaagcaacttgggccaggcggttcaacagcagttactgctattgtagttgatggcaaggatatgtggatagcaaacgtaggcgactcgagggccgttttatgtgaacggngtgctgctaatcagatcaccgtggaccatgaaccccatatatccaatgaaaggcagaggattgaacagcagggtggctttgtcacaacatttcctggcgatgtccctcgcgtaaatggccaactcgctgtcgcaagggcgttcggtgaccatagcctcaagacgcacttgagttcggaacctgacattaggcatgtacccataaactcaagtatagagttcgtcatacttgccagcgatggattatggaaggtgatgaagaaccaggaagctgtggacctcgtgaagtcgacaaaggacccccaggcagcagcaaagcggctgacgaccgaggcgctcgcgaggaagagcaaggacgacatctcctgcatcgtcatccgcttccgctgctgaatcgacctcattctccgatcatttcaatttctcgatccatgactgagatggcgtcgtgatctgattctctgctccgattgaaattatgtagtggctgttattgtttgtacctatagtagctgtgaacaggcttgaggttagaacatttcatgggaagacggtggagagtctgaggcttggggctagtagtgagtagtggctagtgtgtgcagggtgtgtcattcatctgtgcatatgttacaccgccataagttccccgccaatctgtggaacatctcgtttgtgtacttggttgattgtgatggtaaattggtaatggaccaatcatgttaaggttgcgctttgaacttatttaaaaagattgtttaaaaaaccagaaggttgtgtgcaaaaaaaaaaaaaa

SEQ ID NO: 141046 - protein, 319 aa, Triticum aestivum
  misc_feature (190)..(190): The Xaa at location 190 stands for Arg, Cys, Gly, or Ser.
MVGRMERQTVSTSSASCSPSAASSSSSSSCGGRKRPDILNMIRSAACLNSSSTDTGKGRSKQSSTKVTHGFHLVEGKSGHDMEDYHVAEYKCDKNHELGLFAIFDGHLGDRVPSYLRANLFSNILKEPLFWTDPQEAIKNAYGSTNKYILENAKQLGPGGSTAVTAIVVDGKDMWIANVGDSRAVLCERXAANQITVDHEPHISNERQRIEQQGGFVTTFPGDVPRVNGQLAVARAFGDHSLKTHLSSEPDIRHVPINSSIEFVILASDGLWKVMKNQEAVDLVKSTKDPQAAAKRLTTEALARKSKDDISCIVIRFRC

SEQ ID NO: 141047 - DNA, 1391 bp, Triticum aestivum
  CDS (140)..(1099)
cgtccgcccacgcgtccggccgctccctcgtctcgtcttctcgaccaagtttctccctttctcctctctctttctctccgcgttgtggctgtggcctgcggggcgcgggcaggcggcggttgctcgttctgcttggcgtatggtcggccggatggagcggcagacggtgtcgacgtcctccgcgtcctgctccccctccggcgcctcgtcctcatcctcctcctcctgcggcggacggaagcggcccgacatactcaacatgatccggagtgcagcatgtcttaattcatcatctactgatactggcaaggggcggagtaagcaatcaagcaccaaggtgacgcatggattccacttggttgaagggaaatctggccatgacatggaggactaccatgtagcagagtacaagtgtgataagaatcatgagcttggcctcttcgccatattcgacggccatctgggtgatcgtgtgcccagttacttgagagctaaccttttctccaacatactcaaagagcctctcttctggaccgaccctcaagaagcgattaaaaatgcatatggctctacaaacaaatatattctggaaaatgccaagcaacttggaccaggcggctcaacagcagttactgctattgtggttgatggcaaggatatgtggatagcaaacgtaggtgactcgagggccgttttatgtgaacggggtgctgctaatcagatcaccgtggaccatgaaccccatatatctaatgaaaggcagaggattgaacagcagggcggctttgtcacaacatttcctggcgatgtccctcgcgtaaatggccaactcgctgtcgcaagggcgttcggtgaccatagcctcaagacgcacttgagttcagaacctgacattaggcatgtacctataaactcaagtatagagttcgtcatacttgccagcgatggattatggaaggtgatgaagaaccaggaagccgtggacctcgtgaagtcgacaaaggacccccaggcagcagcaaagcggctgacgaccgaggcgctcgcgaggaagagcaaggatgacatctcctgcattgtcatccgcttccgctgctgaatcgatcccattctccgatcatttcaatttctcgatccatgactgatgtggcgtcgtgacctgattctcgctgctccagattgaaattatgtagttgctgttattgtttgtacctatagtagctgtgaacatgcttgagattagaacattgcatgggaagacggtggagagtctgaggcttggggctagtagtgagtagtggctagtgtgtgcagggtgtgtcattcatctgtgcatatgttacaccgccataagttccccgccaatctgtggaacatctcgtttgtgtact

SEQ ID NO: 141048 - protein, 319 aa, Triticum aestivum
MVGRMERQTVSTSSASCSPSGASSSSSSSCGGRKRPDILNMIRSAACLNSSSTDTGKGRSKQSSTKVTHGFHLVEGKSGHDMEDYHVAEYKCDKNHELGLFAIFDGHLGDRVPSYLRANLFSNILKEPLFWTDPQEAIKNAYGSTNKYILENAKQLGPGGSTAVTAIVVDGKDMWIANVGDSRAVLCERGAANQITVDHEPHISNERQRIEQQGGFVTTFPGDVPRVNGQLAVARAFGDHSLKTHLSSEPDIRHVPINSSIEFVILASDGLWKVMKNQEAVDLVKSTKDPQAAAKRLTTEALARKSKDDISCIVIRFRC

SEQ ID NO: 141049 - DNA, 1711 bp, Gossypium hirsutum
  CDS (150)..(1160)
tgtaagtctcgtttctctttttcctttccccctttaaaaaccgccttttaagcgctttgctttctctctctttttatggatgggatcatctcctttccttctccttcatgaaggctacgatttgaagactgtttttgatttccattagcatgcgaattaggccttttcgttataattcatcgcctgaaatatctgttatcgaatacgcttctacttttttttgtttcctgattttgattttagtgataacaactggaaattttgaatgctcgagctgtaatatgggatatttgaattcggttttgcaatcttcaagtcaggttcatgctgaatatggaccggttagcggcggaggccttagccagaatggaaagtttagctacggctgtgcaagctctcctggaaagaggtcttcaatggaagatttttatgaaacaaggattgacggtgttgatggagagatagttggtctttttggagtttttgatggtcatggaggtgcacgggcagccgaatatgtgaagcaaaaccttttcagtaatttgatcaggcatccaaagctcatatctgataccaaatctgctatagccgatgcatacaaccatacagattctgaatttttaaaatcagaaaataaccagaatagggatgctggatcaactgcttctactgctatacttgttggagatcgtttgctagttgcaaatgttggagattcccgagctgttatctgcagaggaggcaatgcttttgctgtgtcccgtgaccacaagccagatcaaagtgatgagcgacaacggattgaggatgctggaggatttgtcatgtgggctggaacttggagagtgggaggtgtccttgctgtttctcgtgcatttggtgacaggctcttgaagcagtatgttgttgctgatccagaaattcaggaggaaaaaattgacagctcacttgagttccttattcttgcaagtgatggactatgggatgttgttacaaacgaggaggctgtggcaatggtaaagccaatacaggatcctgagcaggcagccaagcggcttatgcaggaggcatgccagagaggcagtgcagataatatcacttgtgttgtcgtccgtttcttggccaatcaaggtggttcctcacgtactgttcctgcataatccatccattctcagtatggttttaggttttggttcttctagccgatgaaacaaagtaagtcaaaataaactccatggtaatagctagtcatagaaaacgaaactataaacagcacattattgtgcgaagcatagaagcaatgaacaaatgtgtcagcctgctgatctgtatttttacatcttctaagcctcaagaaaagatatgcatctgagttagcttctccacgattccagtcatgcacatagaacgggtatgcacgtgtgaatttgtgtaaagaaatgttgagacttaagtcctcctgtatgttgtaaattgtagtaaaacatgtcttcttttctagttagttcactttcggataattcgtatgtcgtgtgatgtcctctttcagaaaaatagtagttatgcccgttttgtaggatgcaaatgcgaagcttcgctgttaacacttgcttgttaatgcagctttgaagtttgaatgcattatgatcacagtaatacagtatctgtttgattataataattaatggaaaatcgtttatatgtggatgtg

SEQ ID NO: 141050 - protein, 336 aa, Gossypium hirsutum
MRIRPFRYNSSPEISVIEYASTFFCFLILILVITTGNFECSSCNMGYLNSVLQSSSQVHAEYGPVSGGGLSQNGKFSYGCASSPGKRSSMEDFYETRIDGVDGEIVGLFGVFDGHGGARAAEYVKQNLFSNLIRHPKLISDTKSAIADAYNHTDSEFLKSENNQNRDAGSTASTAILVGDRLLVANVGDSRAVICRGGNAFAVSRDHKPDQSDERQRIEDAGGFVMWAGTWRVGGVLAVSRAFGDRLLKQYVVADPEIQEEKIDSSLEFLILASDGLWDVVTNEEAVAMVKPIQDPEQAAKRLMQEACQRGSADNITCVVVRFLANQGGSSRTVPA

SEQ ID NO: 141051 - DNA, 1062 bp, Zea mays subsp. mays
  CDS (43)..(885)
atttcaaatttcatacacataaactaaagtctcatcctcagaatgacaggcagagaaattctccataagatgaagctgaaggctggattctgcggatctgaaacgggcagaggtaaaagcaggacgtggaagaacatctcccacggttttcactttgtcaagggcaaatcaaaccatccaatggaggactacgttgtgtctgagttcaaaaaagtggacaatcacgatttgggtttgtttgccatctttgacggtcacttgggacatgacgtggccaagtacttgcagaccaatctttttgacaacatactcaaagagaaggattttcggactgatatggacaaggctataaggaatgcatacatatcaacagatgcttttatattagagcagtcacttaaacttggcaaaggcggatcaactgctgtaactggaattctgattgatgggcaaaagctagtggttgctaacgttggagactcacgggcggtgatgtcaaagaatggtgttgcgtctcagctctcggttgatcacgaaccaagcaaggagcaaaaggaaatagagagccgtggcggctttgtgtccaatattccaggggacgttccaagagttgatggacaactagcggttgcgagggcgttcggagataagagcttaaagatacatctgagctcagaaccagacataacacaccagacaatcgatgatgagaccgagttcattgttttcgcgagtgatgggatttggaaggtgatgtcaaaccaagaagctgtggacgcgatcagaagcataaaagatccacatgaggcagccaaggagttgatagaagaagcaatctctaggaaaagcaaagatgacatctcctgtatcgttgtaagattctagtataaatttttcaccaatcaagtgtctaagagagataaaaagacatgtaaaagctcaagctatatgtgctatatatgtgaccaatataaagtctggtctcttgtaaaaccattgatgataaaatttcgccaaaatgtaaaagaaatttcgtgcaaatggttgttggtccattagtct

SEQ ID NO: 141052 - protein, 280 aa, Zea mays subsp. mays
MTGREILHKMKLKAGFCGSETGRGKSRTWKNISHGFHFVKGKSNHPMEDYVVSEFKKVDNHDLGLFAIFDGHLGHDVAKYLQTNLFDNILKEKDFRTDMDKAIRNAYISTDAFILEQSLKLGKGGSTAVTGILIDGQKLVVANVGDSRAVMSKNGVASQLSVDHEPSKEQKEIESRGGFVSNIPGDVPRVDGQLAVARAFGDKSLKIHLSSEPDITHQTIDDETEFIVFASDGIWKVMSNQEAVDAIRSIKDPHEAAKELIEEAISRKSKDDISCIVVRF

SEQ ID NO: 141053 - DNA, 1461 bp, Zea mays subsp. mays
  CDS (320)..(1252)
gcggaatctggcaccggccatcacgtcccctcccgccgcttcctcctccctgccctacctttccccagatccgaatccattaaaccagcggatcttgcatcggggcgcgtccacggcatccgggcaagcgagtggtggagccagcagccatgagatggtatgcatcggtagcctcctgagggcgctggtgctgcgtgcggcgtcgtctgcgggcaggcgccgggggcccaggattctgtgtggccgcgcgacggatgtgcgcgtgacgccacggcacggacacggctggcgcgggttccgggcggtcacgggaaggatgatgctggactcctctgagtctgcctcttccgccgccgccgccgccgcggaggcgggagctggggcggtggcaggccaggcgcagccgcagcgccgcgcggtgggggccgtgccccaggcgcacgatggtggctacgccagcggcggatgggagagagaagatggtaaactgagttgtggatactcaagttttagagggaagagagctacaatggaggatttctatgatgtaaaactaactgaaattgatggacaagctattagcctgttcggtgtttttgacggtcatggtggatcacgtgctgctgagtatttgagggagcacttgtttgagaaccttctcaagcaccctgatttcttgacggatacaaagcttgctataagcgaaacatatcagaaaaccgatacagatttcttggaatcggaagcaagtgctttcagagatgatggttcaacagcttcaactgcaattttggtgggtgaccgtctgtatgttgcaaatgttggtgattctcgtgctgttatttcaaaagctggcaaagctatggcactttcagaagatcacaaacctaacaggattgatgagcgaaagagaatagaaaatgctggtggtattgtcatttgggctggtacttggagggtaggtggtgtattggcgatgtctcgtgcatttggcaatcgtttactgaagccatatgtggtggcggaacctgaaattcaggaagaacagttcagtgatgagctggaatgcctggttctcgctagtgacgggctttgggatgttgtggaaaatgaggaagccgtttcccttggcaaatcagaggacacgccagagtctgcagctcggaaattgacagagatcgcttattctcgtggcagcgctgacaatatcacgtgtatcgtggttcaatttcaccatgacaaaaccggatgagccatgtggcggccaatttcagttgtaccctgcttcaggctattattatcctgcaagccgggtggtggggcttctctcagatttatcgctcttgtagcaacttccaagaactcgtccattgattcttttgttgtcttgtaggaaacatttgttccaacaggtgtaatagatattttcaatgggttaatttctaataaaactatgtttac

SEQ ID NO: 141054 - protein, 310 aa, Zea mays subsp. mays
MLDSSESASSAAAAAAEAGAGAVAGQAQPQRRAVGAVPQAHDGGYASGGWEREDGKLSCGYSSFRGKRATMEDFYDVKLTEIDGQAISLFGVFDGHGGSRAAEYLREHLFENLLKHPDFLTDTKLAISETYQKTDTDFLESEASAFRDDGSTASTAILVGDRLYVANVGDSRAVISKAGKAMALSEDHKPNRIDERKRIENAGGIVIWAGTWRVGGVLAMSRAFGNRLLKPYVVAEPEIQEEQFSDELECLVLASDGLWDVVENEEAVSLGKSEDTPESAARKLTEIAYSRGSADNITCIVVQFHHDKTG

SEQ ID NO: 141055 - DNA, 1165 bp, Zea mays subsp. mays
  CDS (131)..(985)
ctctccttccggcttccggccccgctcctccccaaaatcccccaaaacctgacgagctggagggccgatccgcggctccccgccgcctgatccgagcagtctactcggcccagccggggatccaagcgggatggggtacttgagctccgtgatcggccaccccaccgatggatcctccgtcagcggcggcggcctcagccagaatggtagatttagctatggctatgcaagctcccctggtaaaagggcatccatggaagacttctatgagacaaaaattgattgtgttgatggtcagatagttggtctttttggagtttttgatggtcatggtggtgctaaggtagcagagtatgttaaagaaaacctgttcaacaatcttgttagtcatccaaagttcatcagtgatactaaagtcgctatagatgatgcttataaaagcaccgacagtgaattcttagaatctgacagtagtcaaaatcaatgcgggtcaactgcatcaactgctgtacttgttggtgatcgtctcttcgtcgcaaatgttggtgactctagggctatcatatgcagggaaggaaatgctattgctgtttcaaaggatcacaagcctgatcaaactgatgagcggcagcgtattgaagatgctggaggttttgtgatgtgggcaggaacatggcgcgttggtggtgtacttgctgtttcgcgtgcttttggtgacaaactcttaaagcaatatgtggttgtggatccggagatccgagaggaagttgttgatgacacactcgagtttcttatccttgcaagtgatgggctgtgggatgtggtctctaacgaggaagctgttgcgatgactagatccattaaggacccagaagaggctgcaaagatgctcttgcaagaggcgtacaagagggagagcagtgacaacataacttgcgtcgtcgtgcacttcttgcatgggcaaggtagcagcggatacgcttaaagcgtagcagtaaaattattttacgcagtggtgtgctctgatgtacatgcgtcgattgatttcccgatgttaaatggagaaacgtaactacgtaaggtaggaaacgtgtattatgatgggttgaactgggaaatgcgtgtaccctatactatatatatatactgtagtgtggtcgcggac

SEQ ID NO: 141056 - protein, 284 aa, Zea mays subsp. mays; identical to SEQ ID NO: 1573

SEQ ID NO: 141057 - DNA, 1177 bp, Glycine max
  CDS (152)..(1021)
cgatttctcctcttccttccttatttacgagcgccgaggccgcctgggaccattggttcttcttcttccctcgtcgctgcctgccatcaccggccgtgctgcgcttgcgcgttgaagaggaatccggccggccgtcgtcctcgaccgatacatggggcaccggggggacaccaagcctgtcagtggcggcgggttcagtgagaatggcaagtttagctatggttatgcgagcagtctagggaaaagatcttccatggaggacttccacgagacgagaatcgatggcgtcgatggagagaccgtcggattgttcggtgttttcgacggccatggtggagctcgagccgcggagttcgtcaagcagaaccttttcagcaacttaatcaagcacccaaagttcttcaccgataccaagtctgctattgctgaaactttcacccatacggattcagagctcctgaaggccgataccacccacaaccgagatgcagggtcgacggcctccacggccattctcgttggcgatcgcctggtggtggcaaacgttggggactctagggcggtcatttgtaggggtggtgatgccatagccgtgtcaagggaccataagcctgaccagacagatgaaaggcagaggatagaggacgccggaggtttcgtgatgtgggcaggtacatggcgtgggggcggcgtgcttgctgtttctcgggcatttggtgacaaactgttgaagcagtacgtggttgccgatccagagatcaaggaggaggtagtcgacagctccctggagttcctcatcctggcgagcgacgggctgtgggacgtcgtctccaacgaggaagccgtggccatggtgaagccgatcgtggactcgcaggaggcggccaagaagctcctcgtcgaggcaacgcggaggggaagcgccgacaacatcacctgcgtcgtcgtccgtttcctggaccagcagcccccggcggcggccaccaacggatccccagcccctgccgcagcgagcaagtgaacatttcctcctcgaagcgcgtaggtgttcacagggcaatgtgttgtgcaagcaatgtgtctgatgacgttgcccttcgcatgcgtgtttatttgcttcactccagtttacccatgcctgtactgatcatgtatgttctcagctgttctcatttcg

SEQ ID NO: 141058 - protein, 289 aa, Glycine max
MGHRGDTKPVSGGGFSENGKFSYGYASSLGKRSSMEDFHETRIDGVDGETVGLFGVFDGHGGARAAEFVKQNLFSNLIKHPKFFTDTKSAIAETFTHTDSELLKADTTHNRDAGSTASTAILVGDRLVVANVGDSRAVICRGGDAIAVSRDHKPDQTDERQRIEDAGGFVMWAGTWRGGGVLAVSRAFGDKLLKQYVVADPEIKEEVVDSSLEFLILASDGLWDVVSNEEAVAMVKPIVDSQEAAKKLLVEATRRGSADNITCVVVRFLDQQPPAAATNGSPAPAAASK

SEQ ID NO: 141059 - DNA, 1338 bp, Glycine max
  CDS (59)..(910)
ttttttttttttgccttcttttcattcctttcttttcttcaaatcaaggaactcagctatgactaccagagaaatccttcaaaagatgaaggtaaaagttggtttgggttcatcagaccctgactcagggaaaggaaagagcaagatgtcaaagaacataactcatggttatcatttggtgaaaggaaaatcatatcatgacatggaggattacgttgtggctcaatttaagcaaatagataacaatgaattgggtttgtttgcaatattcgacggccatgcgggtcagaacgtacctaattacttgcggtcccatttgtttgataatatcttacatgagcctgacttctggaaagaacctgcagatgctgtgaagagagcatacagtaaaactgattctaatattttagatatgtcgggtgaattaggtagagggggttcaactgcagttacagcaatattagtcaattgtcagaagttaatagtagccaacattggggattctagggccgtcttatgcaagaagggtgtggccaagcaactatcagtggatcatgagccaaccgcagaacatgaggatattaaaaatagaggtggttttgtatcaaactttccaggggatgttcctcgtgttgatggacggctggcagtgtcaagggcatttggtgacaaaagcttgaagaaacacttgagttcagagccatttgtgactgtggagaatataggtgatgatgcagagtttgttatattagccagtgatggattatggaaggtaatgtcaaatcaagaagcagctaattgtataaaaaatataaaggatgctcggtcttcagcaaagcgccttactgaagaagcagttaacaggaaaagcaccgatgatatctcctgcatcgttgtgaaatttcagtgatctcaaggctcgcatgatagactttgatccagcaacttgcaagtgtaacataaacttcggtgtaatgaataaaacgataatgcttcatagccatcaggtggtgttattatgttgagtcattcatgcaaattaaatgggacaactgtgttatttaaagtaataatgtgggaaagatgtagattctgattatgtatagaccaaactttaatatgtgagtttgcaaggaagtttgtcagtgatcttgaaagcttgctttcagatcactgcctaggcccataagattttagattaagttattcgattgtattattggccaacactcctacctttgttggataattagagtctagagtgtgtgggaagctttctcacaatttcttgtaatttttcagaacgaacctgggaatgaccttcaacgatatcttttc

SEQ ID NO: 141060 - protein, 283 aa, Glycine max
MTTREILQKMKVKVGLGSSDPDSGKGKSKMSKNITHGYHLVKGKSYHDMEDYVVAQFKQIDNNELGLFAIFDGHAGQNVPNYLRSHLFDNILHEPDFWKEPADAVKRAYSKTDSNILDMSGELGRGGSTAVTAILVNCQKLIVANIGDSRAVLCKKGVAKQLSVDHEPTAEHEDIKNRGGFVSNFPGDVPRVDGRLAVSRAFGDKSLKKHLSSEPFVTVENIGDDAEFVILASDGLWKVMSNQEAANCIKNIKDARSSAKRLTEEAVNRKSTDDISCIVVKFQ

SEQ ID NO: 141061 - DNA, 1338 bp, Glycine max; identical to SEQ ID NO: 141059
  CDS (86)..(910)

SEQ ID NO: 141062 - protein, 274 aa, Glycine max
MKVKVGLGSSDPDSGKGKSKMSKNITHGYHLVKGKSYHDMEDYVVAQFKQIDNNELGLFAIFDGHAGQNVPNYLRSHLFDNILHEPDFWKEPADAVKRAYSKTDSNILDMSGELGRGGSTAVTAILVNCQKLIVANIGDSRAVLCKKGVAKQLSVDHEPTAEHEDIKNRGGFVSNFPGDVPRVDGRLAVSRAFGDKSLKKHLSSEPFVTVENIGDDAEFVILASDGLWKVMSNQEAANCIKNIKDARSSAKRLTEEAVNRKSTDDISCIVVKFQ

SEQ ID NO: 141063 - DNA, 1310 bp, Glycine max
  CDS (262)..(1110)
tcgtctttctcttcttcctaagatcccttctcacttctatagttctattctcttctctttctccacctcttcacctcttctctcccctgtcttcttcttaattagcctctctcattgcgtgcaccaccccaaaaaaaatatacatatacatatatacataaaaaaaacaaccccccccctctacgtggccacactcgctcacaacacaacacaccctcttaattaaatctctatataaaaccccttcagggtctctccactatgacgggcagggaaatttttcataagatgaaggaaaaagttttgggctcatctgatcctgattctggtaaaggaaagagcaagatgaagaagaacataactcatggctttcacttggtaaaggggagatcaggtcatgccatggaagactatcttgttgctcaattcaagcaagttgacgacaatgaattgggtttatttgcaatatttgatggccactcaggtcacagtgtacctgattacttgaagtctcatttgtttgataatatcttgaaagagcctaacttctggacagaacctgctgaggctgttaagagagcatatggtataactgattctactattttagacaaatcaggtgaattgggtagagggggttcaactgcggttactgcaatattgatcaactgtcaggagctgctagtggccaatattggggattcccgggctgtcttatgcaagaatggcgtggccaaacaactatcagtggatcatgaaccaagcatagaaagtgaagatataagaaacagaggtggttttgtgtcaaacttcccaggggatgttccacgtgtcgatggtcagttggcggtgtcaagggcatttggtgacaaaagcctgaagatacatttgagctcagaaccatatgtaactttggagatgatagaagatgatgcagagtttcttatactagccagtgatgggttatggaaggtaatgtcaaatcaagaagcagttagtgctatcaaagatgttaaggatgccaggtccgcagctaaggtgcttaccgaagaagcaaagatcaggaaaagttctgatgatatctcttgcgttgttgtgaaatttcagtgatcactgaactcacatagtagatttttatcttcgaacttgaaaatgtaacatatactttagtgtatatggattaatgttgattccctttaggtgttattatgttgtggcattctgtttgtgatattttatctgctttcgtacaaatcaactgtctgagaacgtgttgtttgatgtaacagtgtaaaaaaggatttagtttc

SEQ ID NO: 141064 - protein, 282 aa, Glycine max
MTGREIFHKMKEKVLGSSDPDSGKGKSKMKKNITHGFHLVKGRSGHAMEDYLVAQFKQVDDNELGLFAIFDGHSGHSVPDYLKSHLFDNILKEPNFWTEPAEAVKRAYGITDSTILDKSGELGRGGSTAVTAILINCQELLVANIGDSRAVLCKNGVAKQLSVDHEPSIESEDIRNRGGFVSNFPGDVPRVDGQLAVSRAFGDKSLKIHLSSEPYVTLEMIEDDAEFLILASDGLWKVMSNQEAVSAIKDVKDARSAAKVLTEEAKIRKSSDDISCVVVKFQ

SEQ ID NO: 141065 - DNA, 1310 bp, Glycine max; identical to SEQ ID NO: 141063
  CDS (289)..(1110)

SEQ ID NO: 141066 - protein, 273 aa, Glycine max
MKEKVLGSSDPDSGKGKSKMKKNITHGFHLVKGRSGHAMEDYLVAQFKQVDDNELGLFAIFDGHSGHSVPDYLKSHLFDNILKEPNFWTEPAEAVKRAYGITDSTILDKSGELGRGGSTAVTAILINCQELLVANIGDSRAVLCKNGVAKQLSVDHEPSIESEDIRNRGGFVSNFPGDVPRVDGQLAVSRAFGDKSLKIHLSSEPYVTLEMIEDDAEFLILASDGLWKVMSNQEAVSAIKDVKDARSAAKVLTEEAKIRKSSDDISCVVVKFQ

SEQ ID NO: 141067 - DNA, 1310 bp, Glycine max; identical to SEQ ID NO: 141063
  CDS (346)..(1110)

SEQ ID NO: 141068 - protein, 254 aa, Glycine max
MKKNITHGFHLVKGRSGHAMEDYLVAQFKQVDDNELGLFAIFDGHSGHSVPDYLKSHLFDNILKEPNFWTEPAEAVKRAYGITDSTILDKSGELGRGGSTAVTAILINCQELLVANIGDSRAVLCKNGVAKQLSVDHEPSIESEDIRNRGGFVSNFPGDVPRVDGQLAVSRAFGDKSLKIHLSSEPYVTLEMIEDDAEFLILASDGLWKVMSNQEAVSAIKDVKDARSAAKVLTEEAKIRKSSDDISCVVVKFQ

SEQ ID NO: 141069 - DNA, 1402 bp, Glycine max
  CDS (179)..(1117)
gatagattatttctcttctcttccctttcttaggttaaaagttggaactgagtgattacccaactaatgttatgatcagttggaagcgttggcaagaaagaatatgtaatagtggtgttgtttgttcattttggtcaaagaaatagtatctgggtacccaggatattgtagttgtaagatgggttatctcaattcagttttgtcatcttcaagccaggttcatgttgcagatgatgcaattgtgagcggcgggggtctaagtcacaatggaaaattcagctacgggtatgctagctctcctggcaagagatcttcaatggaagatttttatgagacaagaattgatggtgttgaaggtgaaattgttggccttttcggagtttttgatggtcatggtggtgctcgtgctgctgagtatgtcaagaaaaacctgtttagtaatttgatcagtcacccaaaattcatttctgacaccaaatcagcaataactgatgcatacaatcatactgacactgagttgctgaaatcagaaaatagccataacagagatgcaggatcaactgcttccactgctattttagttggtgaccgcttgcttgttgcaaatgttggggattccagagctgttatatgcaggggtggtaatgccattgctgtttctcgagatcacaaaccagaccaaactgatgagaggcaaaggattgaagaagcaggaggctttgttatgtgggcaggaacttggagagttggaggtgttcttgctgtttctcgtgcatttggtgatagactcctgaagcagtatgttgttgctgatccagaaattcaggaagaaaaagttgacagctcccttgagtttcttattctggccagtgacgggctatgggatgttgtctctaatgaggaagctgttgctatgataaagccaattgaggatgcagaggaggcagcaaagaggctgatgcaagaagcatatcagagaggtagtgctgacaatatcacatgtgttgttgttcgtttcttgatgaaccaaggtggatccaaagagttagtagcttatcctcataatagtagctctgcgggtaagaatccttcagtagaaggtttgtgtgatatataggtataggtgagttgtggatccaaaagatgctgagacttggtaaaaatcggtttatagttgggttcctgataagcaatctagtagttgtgttgtactacgtcatgcaagaatttatggtcctcttgcataaaactattcattatttgttagctaggaaatgtatgtaaggagtgtgaccagagttctcattgcacctgctctgcatgtaaacatggttcttttattagtccatttaatttccttagggttattagtttattcagtactatttgtctattgtgaatt

SEQ ID NO: 141070 - protein, 312 aa, Glycine max; identical to SEQ ID NO: 1449

SEQ ID NO: 141071 - DNA, 1402 bp, Glycine max; identical to SEQ ID NO: 141069
  CDS (317)..(1117)

SEQ ID NO: 141072 - protein, 266 aa, Glycine max
MEDFYETRIDGVEGEIVGLFGVFDGHGGARAAEYVKKNLFSNLISHPKFISDTKSAITDAYNHTDTELLKSENSHNRDAGSTASTAILVGDRLLVANVGDSRAVICRGGNAIAVSRDHKPDQTDERQRIEEAGGFVMWAGTWRVGGVLAVSRAFGDRLLKQYVVADPEIQEEKVDSSLEFLILASDGLWDVVSNEEAVAMIKPIEDAEEAAKRLMQEAYQRGSADNITCVVVRFLMNQGGSKELVAYPHNSSSAGKNPSVEGLCDI

SEQ ID NO: 141073 - DNA, 1308 bp, Triticum aestivum
  CDS (93)..(947)
cccaaatcccccgaatttgacccgtttctccgccgattcgcgtcaccccccctttctgctcgggtcggtgagtggtctcaacccccggagggatggggtacctgagcaccgtcatcggccaccccacggacggatcgccggtcagcggcggcggcctcagccagaatggtaagtttagctatggttatgcgagctccctgggtaaaagggcttccatggaagacttctatgagacaagaattgaaagtgtcgatgggcagcttattggtttattcggagtttttgatggtcatggtggtgctaaagtagctgagtatgtcaaacacaacctcttcagccatcttcttaggcatccaaagttcatgagcgacacaaaagtggctatagatgattcttataaaagtaccgacagtgagttcttggaatctgacagtactcaaaaccagtgtgggtcaacagcatcaactgctgtacttgttggtaatcgtctctttgtcgcaaatgttggagactccagggctatcatatgcagggcaggaaatgctgtacctgtttcgaaagatcacaagcctgatcagacagatgagcggcaacgtattgaagaagctggaggttttgttatgtgggcaggaacatggcgtgttggtggtgtacttgctgtttctcgcgcttttggtgacaagctcttaaagcagtatgtagttgtggatccagagatccgggaggaaatcgttgacgagtccctggagtttctcatccttgcaagcgatgggctgtgggatgtggtctctaacgaggaggctgtcgatatgacccggtcaatacaagacccagaggaagctgctaagaggctcttgcaggaggcctacaagcgggagagcagtgacaacataacctgcgtcgtcgtgcgcttctttcacgggcaagggagtagtgggcctgcttaaagcaggtgcgaagagttactctcaacttctcaagtcgacgttgtactgtgatgacacgcgtacatgccttgattgattcttaaggtttaaacgaagagaaactggaagtaggaaaagtgtactctgatatgagaacaaaagtttaggaacgaagtgtgccctaggccttagatttaacaataaatttgctggtgatgaactgatgaccgttcatcgtggtttagttgtggatggtgttgggtctgatgagtgtgttgtatcttgttgtggattgccaaaccatgtgtgagtgtgatgtaagcgattattgttgtactgaaattgagcaatgacaagtataattgagttgttggatggatct

SEQ ID NO: 141074 - protein, 284 aa, Triticum aestivum
MGYLSTVIGHPTDGSPVSGGGLSQNGKFSYGYASSLGKRASMEDFYETRIESVDGQLIGLFGVFDGHGGAKVAEYVKHNLFSHLLRHPKFMSDTKVAIDDSYKSTDSEFLESDSTQNQCGSTASTAVLVGNRLFVANVGDSRAIICRAGNAVPVSKDHKPDQTDERQRIEEAGGFVMWAGTWRVGGVLAVSRAFGDKLLKQYVVVDPEIREEIVDESLEFLILASDGLWDVVSNEEAVDMTRSIQDPEEAAKRLLQEAYKRESSDNITCVVVRFFHGQGSSGPA

SEQ ID NO: 141075 - DNA, 1308 bp, Triticum aestivum; identical to SEQ ID NO: 141073
  CDS (216)..(947)

SEQ ID NO: 141076 - protein, 243 aa, Triticum aestivum
MEDFYETRIESVDGQLIGLFGVFDGHGGAKVAEYVKHNLFSHLLRHPKFMSDTKVAIDDSYKSTDSEFLESDSTQNQCGSTASTAVLVGNRLFVANVGDSRAIICRAGNAVPVSKDHKPDQTDERQRIEEAGGFVMWAGTWRVGGVLAVSRAFGDKLLKQYVVVDPEIREEIVDESLEFLILASDGLWDVVSNEEAVDMTRSIQDPEEAAKRLLQEAYKRESSDNITCVVVRFFHGQGSSGPA

SEQ ID NO: 141077 - DNA, 1454 bp, Zea mays subsp. mays
  CDS (400)..(1272)
acgacgctttttctccatggtttggtgtgcatttcctctctcctgtccccacttgacacatccatgtcccaatctcccccaacctcaggtcaaccgccgctacccaagatccagtctccgttctccctctcctctcgcttcatacacaccagggcggcagcggcagcggcaggggcccgccatcaccaacccacctcccttcaattataaacctataaaatatcatcattgacccaagctgaggcgactagtgggtattgatttttggtggggcagatcaaggagggggggagggggttaacttccaaggaaccagttcattgctggttctgctagcaggaggttggatttcagaggcagaagctttcagccaggcgggctcagggcgcgggcacatcaatggctggcaaggaaatcctccacaaggtgaaggacaaggtgaaagatgcatttagttcatcaggaccagaaacagggaaaggcaagacaaagttatcaggcaagcgtgtcaagcatggttaccatctggtgaagggcaaatctaatcatccaatggaggattatctagtggcagagtaccggcaagttggtgaacatgatttgggattgtttgctatattcgatggtcacctgggccacactgttccagactttttgagctcccatcttttcaataacatcttgagtgagccagaattcttgagtgatccagaaactgctatccgaaacgcataccaacttacggatcagaagatattggaaaacgcagcagagttgggaagaggtggctccacagctgttactgccatcttaataggaagtgacaagttcgtgaaactagttgttgcaaatgttggggattcacgggcagttattagcaagaacggtgtagcgaagcagctttcagttgaccatgaaccaaacatggagcgacaaacgatcgagcagaagggtggctttgtatcaaacctaccgggtgatgtgccacgtgttgatgggcagctggcagttgcaagggcatttggagaccggagcttgaagaagcacctcagctctgatccatatgtggtcgagcaaactatcgatgaaaatactgagtttttaattctagcaagtgatggcttgtggaaggtgatgtccaaccaggaggctgtcgacgagatcaaggattgcaaggacgcgcaggcagctgccaagcacctgacggagcaggccgtgaatcggaagagcaaagacgacatttcagttatcgtagtcaagttcatgtgctagcacatcgtcaggttaaatggtctcccgattgtataccgtgttaaattatcttttaagtcttgtgctcgctggtgtcggacattttgtttaccttctttggttttgggaccccacaaagagggtcaaggcttgtaacatattgttgtttgtttaaggctccaaataaagcatggtaccaccat

SEQ ID NO: 141078 - protein, 290 aa, Zea mays subsp. mays
MAGKEILHKVKDKVKDAFSSSGPETGKGKTKLSGKRVKHGYHLVKGKSNHPMEDYLVAEYRQVGEHDLGLFAIFDGHLGHTVPDFLSSHLFNNILSEPEFLSDPETAIRNAYQLTDQKILENAAELGRGGSTAVTAILIGSDKFVKLVVANVGDSRAVISKNGVAKQLSVDHEPNMERQTIEQKGGFVSNLPGDVPRVDGQLAVARAFGDRSLKKHLSSDPYVVEQTIDENTEFLILASDGLWKVMSNQEAVDEIKDCKDAQAAAKHLTEQAVNRKSKDDISVIVVKFMC

SEQ ID NO: 141079 - DNA, 1415 bp, Triticum aestivum; identical to SEQ ID NO: 141025
  CDS (261)..(1166)

SEQ ID NO: 141080 - protein, 301 aa, Triticum aestivum
MMLDSSDSDSGAPAGQLQLQRRAVAAGTQPQDGGYASAGWQREDGKLKCGYSSFRGKRATMEDFYDVKLTEIDGHAVSLFGVFDGHGGSRAAEYLKEHLFENLMKHPKFLTDTKLAISETYQKTDADFLESESSAFRDDGSTASTAVLVGGHLYVANVGDSRAVISKAGKARALSVDHKPNRSDERKRIENAGGVVIWAGTWRVGGVLAMSRAFGNRLLKPFVVAEPEIQEELINGELESLVLASDGLWDAVENEEAVSLAKTEDVPESAARKLTEIAYSRGSADNITCIVVQFHHDKITG

SEQ ID NO: 141081 - DNA, 864 bp, Oryza sativa Japonica Group; identical to SEQ ID NO: 842
  CDS (1)..(864)

SEQ ID NO: 141082 - protein, 287 aa, Oryza sativa Japonica Group; identical to SEQ ID NO: 843

SEQ ID NO: 141083 - DNA, 1143 bp, Arabidopsis thaliana; identical to SEQ ID NO: 846
  CDS (1)..(1143)

SEQ ID NO: 141084 - protein, 380 aa, Arabidopsis thaliana; identical to SEQ ID NO: 847

SEQ ID NO: 141085 - DNA, 849 bp, Arabidopsis thaliana
  CDS (1)..(849)
atggcgaagttatgttgcttcggttcttcagactacgatcttgtggttgggagggcatcgactagttctggaaaagggagaaataacgacggcgagattaaattcggttacagcttagtgaaagggaaagctaatcatccaatggaggattatcatgtgtctaaattcgtgaaaatagacggtaacgagctcggtttgtttgcaatctacgatggtcatttgggtgaacgtgttcctgcttatctacagaagcatttgttctccaatatcctcaaagaggagcagtttaggtatgatcctcagagatcaataattgctgcctatgagaagacagaccaagccattctgtcacattcttctgacttaggccgtggtggctcaacggctgtaaccgctattctgatgaatggacggcgtttatgggtggcaaatgtgggtgattctcgggcggttctatctcaaggaggtcaggcaatacagatgactattgatcatgagccgcacactgaaaggttgagcatcgagggtaaaggaggctttgtatccaacatgccaggagatgtccctcgggttaacgggcagctagcggtttctcgtgcttttggagacaaaagcctcaaaacacatctacggtcagatcctgacgttaaagattcatcgatcgatgatcacacagatgttcttgttcttgctagtgacggtctatggaaggtgatggctaaccaagaggcgattgatattgcgagaagaatcaaagatccattgaaagcagcgaaagaactaacaaccgaagcgcttagaagagacagtaaagatgatatttcttgcattgtcgtcagattaaggtga

SEQ ID NO: 141086 - protein, 282 aa, Arabidopsis thaliana
MAKLCCFGSSDYDLVVGRASTSSGKGRNNDGEIKFGYSLVKGKANHPMEDYHVSKFVKIDGNELGLFAIYDGHLGERVPAYLQKHLFSNILKEEQFRYDPQRSIIAAYEKTDQAILSHSSDLGRGGSTAVTAILMNGRRLWVANVGDSRAVLSQGGQAIQMTIDHEPHTERLSIEGKGGFVSNMPGDVPRVNGQLAVSRAFGDKSLKTHLRSDPDVKDSSIDDHTDVLVLASDGLWKVMANQEAIDIARRIKDPLKAAKELTTEALRRDSKDDISCIVVRLR

SEQ ID NO: 141087 - DNA, 1116 bp, Arabidopsis thaliana; identical to SEQ ID NO: 1330
  CDS (1)..(1116)

SEQ ID NO: 141088 - protein, 371 aa, Arabidopsis thaliana; identical to SEQ ID NO: 1331

SEQ ID NO: 141089 - DNA, 720 bp, Arabidopsis thaliana
  CDS (1)..(720)
atggaagacttcatcgtggctgacaccaaaaccgttaaaggccacaatcttgggttatacgctatattcgacggccactcaggcagtgatgttgcggattatctgcagaaccatctctttgataacatcttgagtcagccggatttttggagaaaccctaagaaggcaatcaaaagagcgtataaatctacggacgactacattcttcaaaacgtggttggtccacgaggtggctccacggctgtgacggctatagtaattgatgggaagaaaattgtggttgcaaacgttggagattcaagagcaatcttgtgtcgtgaaagtgatgtagtcaaacaaattacggttgatcacgaacctgacaaagagagagatcttgtcaagagcaaaggcggctttgtctcccaaaagccaggcaatgttccgagagtggatggacaactagcgatgacgcgtgcgtttggagacggaggccttaaagagcatataagtgtgatcccgaacatagagattgccgagatccacgatgacacaaagttcttgatcttggctagcgatggactctggaaggtgatgtcgaacgacgaggtttgggatcaaatcaaaaagagagggaatgcagaagaagctgcgaaaatgctaattgataaagccttggctagaggaagtaaagatgatatctcttgtgttgttgtttctttccttcaatggatcgattaa

SEQ ID NO: 141090 - protein, 239 aa, Arabidopsis thaliana
MEDFIVADTKTVKGHNLGLYAIFDGHSGSDVADYLQNHLFDNILSQPDFWRNPKKAIKRAYKSTDDYILQNVVGPRGGSTAVTAIVIDGKKIVVANVGDSRAILCRESDVVKQITVDHEPDKERDLVKSKGGFVSQKPGNVPRVDGQLAMTRAFGDGGLKEHISVIPNIEIAEIHDDTKFLILASDGLWKVMSNDEVWDQIKKRGNAEEAAKMLIDKALARGSKDDISCVVVSFLQWID

SEQ ID NO: 141091 - DNA, 870 bp, Arabidopsis thaliana
  CDS (1)..(870)
atgaccggtagagaaatcctccacaagatgaaggaatccgtcaaggagaaagttgggcttggtgcatctgcttcatctgcagattcagggaaaggtaagagcaagatgttgaagcagatcacacatggttttcatttggtgaaagggaaagcttttcacgagatggaagattatgtggttgccaaattcaaggaagttgatgataatgagcttggtctgtttgctatcttcgatggccatcttagccacgagattccggactacttgtgctcccatttgtttgagaacatcttgaaagagccgaatttctggcaagaacctgagaaagcgataaagaaagcttactatataacggatacaacgattctagacaaggcagatgatttgggaaaaggaggttctactgctgtgactgcgatattgatcaattgccagaagctggtggttgctaatgttggtgactctcgagctgttatttgccaaaatggtgttgcgaagccactctcagttgatcatgagccgaacatggagaaggatgaaatcgagaacagaggaggattcgtttctaactttcctggggatgttcctcgagttgatggtcaactggctgtggcaagggcatttggtgataagagtttaaagatgcatttgagttcagaaccatatgttacggtggagataattgatgatgatgcagaatttcttatcctagcaagtgatggactatggaaggtcatgtcaaaccaagaagccgttgactcaatcaagggaataaaagatgcgaaggctgcagcaaagcaccttgcagaggaggctgttgcaaggaaaagctcagacgatatctcagtcgtcgtcgtgaaatttcagtga

SEQ ID NO: 141092 - protein, 289 aa, Arabidopsis thaliana
MTGREILHKMKESVKEKVGLGASASSADSGKGKSKMLKQITHGFHLVKGKAFHEMEDYVVAKFKEVDDNELGLFAIFDGHLSHEIPDYLCSHLFENILKEPNFWQEPEKAIKKAYYITDTTILDKADDLGKGGSTAVTAILINCQKLVVANVGDSRAVICQNGVAKPLSVDHEPNMEKDEIENRGGFVSNFPGDVPRVDGQLAVARAFGDKSLKMHLSSEPYVTVEIIDDDAEFLILASDGLWKVMSNQEAVDSIKGIKDAKAAAKHLAEEAVARKSSDDISVVVVKFQ

SEQ ID NO: 141093 - DNA, 936 bp, Arabidopsis thaliana
  CDS (1)..(936)
atgggatatctgaattctgttttgtcatcttcgagccaggttcactccgacgatggacctgttagcggtggtggcctcagtcagaacgggaagttcagctatggatatgcaagctctcccggtaaaagatcttctatggaggacttctatgaaactaggatcgacggcgttgaaggggaaatagttggtctatttggagtctttgatggacatggaggtgcacgtgcagctgaatatgtgaagcaaaatctcttcagtaacctgatcaggcatccaaagttcatctctgataccacagctgcaatagctgatgcatacaaccaaacagactcagagtttcttaaatcagaaaatagtcagaacagagatgctggttcaacggcgtcaacagccatcttagttggtgaccgtttacttgttgcaaatgtaggggactctagagctgtaatatgcagaggtggcaatgctattgctgtatcccgagatcacaagcctgatcaaagtgacgagcgccaaagaattgaggatgcaggaggatttgtcatgtgggctggaacatggagagttggaggagttcttgctgtttctcgtgcatttggcgataggttgttgaagcagtatgttgttgctgatccggagatacaggaggaaaaagttgatagctctctcgagtttctcattcttgcaagtgatggtctctgggacgttgtatctaacgaggaagccgtaggcatgatcaaggcgatagaagatcccgaggaaggtgcaaagagactgatgatggaagcttaccaaagaggaagtgcagacaacataacttgtgtcgtcgtacgtttcttttcagaccaagcaggaggaataggttccagcagcaccaatatcccaatagatcatggtatcgtacctgaccgaatctccggtgactcatcaacctag

SEQ ID NO: 141094 - protein, 311 aa, Arabidopsis thaliana
MGYLNSVLSSSSQVHSDDGPVSGGGLSQNGKFSYGYASSPGKRSSMEDFYETRIDGVEGEIVGLFGVFDGHGGARAAEYVKQNLFSNLIRHPKFISDTTAAIADAYNQTDSEFLKSENSQNRDAGSTASTAILVGDRLLVANVGDSRAVICRGGNAIAVSRDHKPDQSDERQRIEDAGGFVMWAGTWRVGGVLAVSRAFGDRLLKQYVVADPEIQEEKVDSSLEFLILASDGLWDVVSNEEAVGMIKAIEDPEEGAKRLMMEAYQRGSADNITCVVVRFFSDQAGGIGSSSTNIPIDHGIVPDRISGDSST

SEQ ID NO: 141095 - DNA, 1344 bp, Arabidopsis thaliana; identical to SEQ ID NO: 5346
  CDS (1)..(1344)

SEQ ID NO: 141096 - protein, 447 aa, Arabidopsis thaliana; identical to SEQ ID NO: 5347

SEQ ID NO: 141097 - DNA, 846 bp, Arabidopsis thaliana
  CDS (1)..(846)
atgggaaaattttgttgcttcacttccgcttctgaggttgtgggaggacaatcatcatcacgatcaggtaaaggaagaagtgatgaagggatgatcaagtatggttttagtctagtgaaaggaaaagctaaccatccaatggaagattatcatgttgctaactttatcaacatccaagaccatgaattgggtctttttgctatttatgatggtcatatgggtgatagtgtccctgcttacttgcagaaacgtctcttctccaatatccttaaggagggagagttttgggttgatcctcgaaggtctattgcaaaagcttatgagaagacggaccaagcgattctatcgaatagttctgacttgggtcgtggtggttctactgctgtgactgctatattgattaatgggagaaagttgtggatagctaatgttggtgattcacgagctgttctttctcatggtggcgctataacgcagatgagtacagatcatgagcctcgtactgaaaggtcgagtattgaagatagaggtggatttgtatccaatctaccaggtgatgttcctcgggtgaatggtcaattagctgtgtctcgtgcttttggagataagggacttaagacacacttgagttcagagcctgacataaaagaagctactgtagatagccagacagatgttcttctcttggctagtgatggcatctggaaggtgatgacaaatgaagaggcaatggagatagcgagaagagtgaaagatccacagaaagcggcaaaggaattaacagctgaagcattgagaagagagagtaaagacgacatatcttgtgtcgtggtccgattcagatga

SEQ ID NO: 141098 - protein, 281 aa, Arabidopsis thaliana
MGKFCCFTSASEVVGGQSSSRSGKGRSDEGMIKYGFSLVKGKANHPMEDYHVANFINIQDHELGLFAIYDGHMGDSVPAYLQKRLFSNILKEGEFWVDPRRSIAKAYEKTDQAILSNSSDLGRGGSTAVTAILINGRKLWIANVGDSRAVLSHGGAITQMSTDHEPRTERSSIEDRGGFVSNLPGDVPRVNGQLAVSRAFGDKGLKTHLSSEPDIKEATVDSQTDVLLLASDGIWKVMTNEEAMEIARRVKDPQKAAKELTAEALRRESKDDISCVVVRFR

SEQ ID NO: 141099 - DNA, 840 bp, Arabidopsis thaliana
  CDS (1)..(840)
atggcaggcagagagattctccataagatgaaggttggattatgcggatctgacacaggcagaggtaaaaccaaggtgtggaagaacatcgcacacggttatgactttgtgaaaggcaaagcgggccatccgatggaggactatgttgtgtctgagttcaagaaagtagacggccatgatttgggtttgtttgctatctttgatggtcacttagggcatgatgtagccaagtacttgcaaaccaatctctttgataacatactcaaagagaaggatttttggactgatacgaaaaacgctataaggaatgcatacatatcaaccgatgctgtgatattagagcagtcacttaaacttggcaaaggtggatcaacggctgtaacaggcattctgatagatgggaaaacgctagtgattgctaacgttggagactcacgtgcagtgatgtcaaagaacggtgttgcttctcaactctctgttgatcatgaaccaagcaaggaacaaaaggaaatagaaagccgtggtggctttgtatcaaatattccaggggatgttccaagagttgatggacaactagcggttgctagggcgtttggagataagagcttaaagatacatctgagctcagatccagacataagagacgagaatatcgatcatgagactgagtttatccttttcgcaagtgatggagtttggaaggtgatgtcgaaccaagaagcggtggatttgatcaaaagcataaaagatccacaagcggcagccaaggagttgatagaagaagcagtctctaagcaaagcacagacgacatttcttgtatagttgtaaggttccagtga

SEQ ID NO: 141100 - protein, 279 aa, Arabidopsis thaliana
MAGREILHKMKVGLCGSDTGRGKTKVWKNIAHGYDFVKGKAGHPMEDYVVSEFKKVDGHDLGLFAIFDGHLGHDVAKYLQTNLFDNILKEKDFWTDTKNAIRNAYISTDAVILEQSLKLGKGGSTAVTGILIDGKTLVIANVGDSRAVMSKNGVASQLSVDHEPSKEQKEIESRGGFVSNIPGDVPRVDGQLAVARAFGDKSLKIHLSSDPDIRDENIDHETEFILFASDGVWKVMSNQEAVDLIKSIKDPQAAAKELIEEAVSKQSTDDISCIVVRFQ

SEQ ID NO: 141101 - DNA, 852 bp, Arabidopsis thaliana
  CDS (1)..(852)
atggcaggcagtaatattctccataagattaagttgaaggctgggttctgtggatctgctcctgacatgggaagaggcaaaagcaagatgtggaagaacatcacccacggttttcactgtgtgaagggcaagtccagccatccgatggaggactatgtagtgtctgaattcaagaaacttgaaggtcatgaattgggtttgtttgctatctttgatggtcacttggggcatgatgtggctaaatacttgcagactaatctctttgacaacattcttaaagagaaggatttttggactgacacagagaatgctataaggaatgcctacagatcaacagatgccgtgatattgcagcagtcccttaagcttggtaaaggcggatcaacagctgtaacgggaattctaattgatggtaaaaagctagttgttgctaatgttggagactccagagcagtgatgtctaagaatggtgttgcgcatcagctatctgtcgatcatgaaccaagcaaggagaaaaaagaaatagagagccgaggtggctttgtgtcaaatattccaggggatgttccacgagtggatggacagttagcggttgcaagagcatttggagataagagcttaaagttacatctgagctcagaaccggacataacacaccagacaattgatgatcacactgaattcatccttttcgcaagcgatggtatttggaaagtattatcaaaccaagaagcggttgatgctatcaagagtatcaaagatcctcatgcagctgcaaagcacttgatagaggaagctatatctaggaagagcaaagatgacatctcatgtatcgttgtaaagttccactaa

SEQ ID NO: 141102 - protein, 283 aa, Arabidopsis thaliana
MAGSNILHKIKLKAGFCGSAPDMGRGKSKMWKNITHGFHCVKGKSSHPMEDYVVSEFKKLEGHELGLFAIFDGHLGHDVAKYLQTNLFDNILKEKDFWTDTENAIRNAYRSTDAVILQQSLKLGKGGSTAVTGILIDGKKLVVANVGDSRAVMSKNGVAHQLSVDHEPSKEKKEIESRGGFVSNIPGDVPRVDGQLAVARAFGDKSLKLHLSSEPDITHQTIDDHTEFILFASDGIWKVLSNQEAVDAIKSIKDPHAAAKHLIEEAISRKSKDDISCIVVKFH

SEQ ID NO: 141103 - DNA, 1065 bp, Arabidopsis thaliana; identical to SEQ ID NO: 1344
  CDS (1)..(1065)

SEQ ID NO: 141104 - protein, 354 aa, Arabidopsis thaliana; identical to SEQ ID NO: 1345

SEQ ID NO: 141105 - DNA, 1263 bp, Arabidopsis thaliana
  CDS (1)..(1263)
atggtatgcagcagtttcataaggagtttcattgttcaagctggttgtcgtattggggtgttggctcaaggaagacatcagtttattcatattaagaagactttgagtgtgggttttggatttagaactagtgtgattggatttagaacaaccagtggaattggatttagaactagtgcgaagatgatggttgatacttctgctggagagaaacgtatatccttagttgatatgccgcctgagaaagttgatgatggtggatacatcggtggtgggtggaaaaatgatgatggaagcttgagctgtgggtactgtagtttcagagggaaaagatctacgatggaagatttctatgatatcaaagcttccactattgaaggccaagcagtttgcatgtttggaatatttgatggccatggtggttcacgtgctgctgaatacctgaaggaacacctgtttaacaatctcatgaagcatccacaatttttgacagacaccaagctggcattaaatgaaacatataaacaaactgatgtagcattcctcgagtccgaaaaggatacttacagagatgatggctccacagcatctgctgctgtgttggtggggaaccatttgtatgttgcaaatgttggagactcgaggacaatagtttctaaagctgggaaagcgatcgcgctatctgatgaccataagccaaatagaagcgatgaaagaaagcgaattgaaagtgctggtggtgttatcatgtgggcaggaacatggagagtaggtggggtgttggctatgtcccgggcctttggtaacagaatgctgaagcaattcgttgttgctgaacccgagatacaagatctagagatagatcatgaggccgagttgcttgtgcttgcaagtgacggtttatgggatgtggtaccaaatgaggatgcggtagcccttgctcagagcgaggaagagcccgaagcagctgcccgcaagttaactgacactgccttcagccgtggcagtgcagacaacatcacgtgcattgttgttaaattccgtcatgataagacagaatctcctaaaatcgaaacaaacgccatggctgaatcggaacctgaactgaaccccacaactgaactggaacctgaatcaaaccccagtactgcattggaaactgaatcaatccccaaagctgaactggaatccgaacctgatgctatacctgatccaaaacctgaaaccgaaccagagaccaagggtgagaaagctggtgagtaa

SEQ ID NO: 141106 - protein, 420 aa, Arabidopsis thaliana
MVCSSFIRSFIVQAGCRIGVLAQGRHQFIHIKKTLSVGFGFRTSVIGFRTTSGIGFRTSAKMMVDTSAGEKRISLVDMPPEKVDDGGYIGGGWKNDDGSLSCGYCSFRGKRSTMEDFYDIKASTIEGQAVCMFGIFDGHGGSRAAEYLKEHLFNNLMKHPQFLTDTKLALNETYKQTDVAFLESEKDTYRDDGSTASAAVLVGNHLYVANVGDSRTIVSKAGKAIALSDDHKPNRSDERKRIESAGGVIMWAGTWRVGGVLAMSRAFGNRMLKQFVVAEPEIQDLEIDHEAELLVLASDGLWDVVPNEDAVALAQSEEEPEAAARKLTDTAFSRGSADNITCIVVKFRHDKTESPKIETNAMAESEPELNPTTELEPESNPSTALETESIPKAELESEPDAIPDPKPETEPETKGEKAGE

SEQ ID NO: 141107 - DNA, 1059 bp, Drosophila melanogaster; identical to SEQ ID NO: 1348
  CDS (1)..(1059)

SEQ ID NO: 141108 - protein, 352 aa, Drosophila melanogaster; identical to SEQ ID NO: 1349

SEQ ID NO: 141109 - DNA, 1116 bp, Drosophila melanogaster
  CDS (1)..(1116)
atgggtcataaaatgggtggcttcttggaaaaaccagaaactgaaaagcaggctcaagagggtcatgggaatgggctgcgatactgcgtaagttctatgcaaggttggcgattggaaatggaggatagccactcggctgcttgccggctgaaggatcccttcgcaacgtggtcatattttgcggtgttcgatggtcacgctggcagtcaaatatcactgcattgcgctgaacatctaatgagtactatattggaatccgaatctttttcgaagcacaaatacgaggctggcatacgagaggggttcctgcagttggatgaggatatgaggaagctgtatcacgaccagcaaggcggctcgacggccatttgtgtttttgtatcaccggacaaaatatatctggtcaattgtggtgactcgcgtgcagtgatatcgcgaaatggagcagctgtcatcagtacaattgatcacaagccgttttctcccaaagaacaagaacgcattcaaaatgccggaggcagtgtaatgattaaaaggataaatggcactctggcagtttcccgggccttcggtgactatgatttcaagaatgatggctcaaagtctcctgtcgatcagatggtgtctccggaacctgatataatagtttgcaatcggtccgaacacgatgaattcatagttgtagcctgcgatggcatttgggatgtgatgactagcagcgaggtttgtgaatttattaggtcacggcttttggtgacctatgacctgccgatgattgttaacagcgtattggatatttgcctgcataaaggcagcagggacaatatgacactgctcctcctacttttgcctggagcaccgaaggtcgatatggatgctgttaaggccgaaaggagtcttgatcaaactattgtgcaaataaccaaggaagtgattgagaagcacgaaatacacgactttgaaacacttatacgactgatgaaaagaatggccattaacattccaaatctaccacctggcggtggtctgtatgcaaaatattatattatagagcaagctttccacgagaaatttccagatactccggctgaaatatatgattatttttccatgtag

SEQ ID NO: 141110 - protein, 371 aa, Drosophila melanogaster
MGHKMGGFLEKPETEKQAQEGHGNGLRYCVSSMQGWRLEMEDSHSAACRLKDPFATWSYFAVFDGHAGSQISLHCAEHLMSTILESESFSKHKYEAGIREGFLQLDEDMRKLYHDQQGGSTAICVFVSPDKIYLVNCGDSRAVISRNGAAVISTIDHKPFSPKEQERIQNAGGSVMIKRINGTLAVSRAFGDYDFKNDGSKSPVDQMVSPEPDIIVCNRSEHDEFIVVACDGIWDVMTSSEVCEFIRSRLLVTYDLPMIVNSVLDICLHKGSRDNMTLLLLLLPGAPKVDMDAVKAERSLDQTIVQITKEVIEKHEIHDFETLIRLMKRMAINIPNLPPGGGLYAKYYIIEQAFHEKFPDTPAEIYDYFSM

SEQ ID NO: 141111 - DNA, 1125 bp, Drosophila melanogaster; identical to SEQ ID NO: 1352
  CDS (1)..(1125)

SEQ ID NO: 141112 - protein, 374 aa, Drosophila melanogaster; identical to SEQ ID NO: 1353

SEQ ID NO: 141113 - DNA, 1107 bp, Drosophila melanogaster; identical to SEQ ID NO: 1354
  CDS (1)..(1107)

SEQ ID NO: 141114 - protein, 368 aa, Drosophila melanogaster; identical to SEQ ID NO: 1355

SEQ ID NO: 141115 - DNA, 1116 bp, Drosophila melanogaster; identical to SEQ ID NO: 1356
  CDS (1)..(1116)

SEQ ID NO: 141116 - protein, 371 aa, Drosophila melanogaster; identical to SEQ ID NO: 1357

SEQ ID NO: 141117 - DNA, 1483 bp, Arabidopsis thaliana
  CDS (188)..(1060)
aaatataaagaagaaaagtcgtcggcggaggaagtcagtagccaataatgataagaatcaccggctgttcacatgtggattgattacctcacattcatatttattacataaactcatctctctgtttttctttcttagaatcattcatatttcagacacaaaggcagagaaacaaattcttgtaacaatggcaggcagagagattctccataagatgaaggttggattatgcggatctgacacaggcagaggtaaaaccaaggtgtggaagaacatcgcacacggttatgactttgtgaaaggcaaagcgggccatccgatggaggactatgttgtgtctgagttcaagaaagtagacggccatgatttgggtttgtttgctatctttgatggtcacttagggcatgatgtagccaagtacttgcaaaccaatctctttgataacatactcaaagagaaggatttttggactgatacgaaaaacgctataaggaatgcatacatatcaaccgatgctgtgatattagagcagtcacttaaacttggcaaaggtggatcaacggctgtaacaggcattctgatagatgggaaaacgctagtgattgctaacgttggagactcacgtgcagtgatgtcaaagaacggtgttgcttctcaactctctgttgatcatgaaccaagcaaggaacaaaaggaaatagaaagccgtggtggctttgtatcaaatattccaggggatgttccaagagttgatggacaactagcggttgctagggcgtttggagataagagcttaaagatacatctgagctcagatccagacataagagacgagaatatcgatcatgagactgagtttatccttttcgcaagtgatggagtttggaaggtgatgtcgaaccaagaagcggtggatttgatcaaaagcataaaagatccacaagcggcagccaaggagttgatagaagaagcagtctctaagcaaagcacagacgacatttcttgtatagttccgtgcttcttgcgacgagaggctctctcagaaaggtattgtagatgatttggatgatgaagctgattctgttgacaaagacgtgtcagtgccaatggtagagaaacagacacaaactcaaaatggaagttcaaaagcaaaaaaaaaggcgtaaagagaaagatatggttgttgaagcttatgtaaagcagactgaagctcttgagaagaagaatagaatagtggaactgatgttggagcgggagcatgcatctagcgttaagagtgtactagagacgcttaatggattgcctggagttaggatgtggtctccatttcacaagacatcaattgaccatcttatagctgatgaagcgagtcggcagggttttatagcgtttcctagggctgaacataagagtagatttttggagtttatgactagaaggaaccttgatgattgtagtgttgcttgatgatatttccactact

SEQ ID NO: 141118 - protein, 290 aa, Arabidopsis thaliana [sequence omitted]

SEQ ID NO: 141119 - DNA, 1134 bp, Nasonia vitripennis; identical to SEQ ID NO: 870
  CDS (1)..(1134)

SEQ ID NO: 141120 - protein, 377 aa, Nasonia vitripennis; identical to SEQ ID NO: 871

SEQ ID NO: 141121 - DNA, 2172 bp, Aedes aegypti
  CDS (469)..(1635)
cagaacgagactctcaaatcgaatcgcgtcgcgacgagagcaaaacggtagaaaaggtgttatccatttttcagtgcgattttggtgcaatcaatcggattaattcaaagttcgtggtcgtggccatcgtacgtaatctcgtaacaacccatcagtggaacacagagaagcgaaaaaaggcagggtagtgggaccagaacaaggaactgcgaaaaaacaacagagtgggattcctcccaagtcccaacaccgcagactgcagcgggccatttgctgtatcggaatcggaaaggatttgccatcggaacacagggagattgtacgcctttctagatagattacgattcccggtagcgaacgtttctttttgggaaaggtgtgacccacaaccgccagaatcaatggtaattgcagtgtgaggagaggaccgaacagcatcgttttgaactactcacaagaagctacgagatgggtgcgtttctggagaaaccgatgacggctaagcacaacgagcatggcgagggaaacggacttcgatacggtgtgggatcgatgcaaggatggcgatgcgagatggaagatgcccactacgccaaaaccggacttggcgaaggattagacgattggaactactttgccgtgttcgatggacatgcgggacacaaagtggcagatcactgtgcgaagaatctgctacagtcgatcgttcggacacaggaatttagcaataacgatatcacaaaaggtattcacgctgggtttctcaaactggacgaaaccatgcgagacattccggagctggcatccggagcggataaatccggtaccaccgcagtctgtgcattcatttccagccagaacatctacatagcaaattgtggtgattcgcgagcgatcctgtgtcgtaattgtgcaccgatattctccacccaagatcacaaaccgatactgcccggcgaaaagcagcgaattcagaatgctggtggctccgttatgatacagagggtaaacggaagcctggcagtgtcacgagcgctaggggattacgattttaagaacgccaaggaattgggccagtgcgaacaactggtttcacctgagccggaaatcttctgccaagatcgggatcctgcggatgagttcctggtgcttgcctgcgacggtgtgtgggatgtgatgagcaatgccaatctgtgccagtttgtgcacagccggatgcagatctccgacagtctcgaagacattgctaaccaggtcatcgatacctgtctacacaaaggaagccgcgacaatatgagcataatcatcattgcattccccggcgctccggtgcccaacgaagaagctatcaaaaaggaagagaagctggaagcgacgctgtaccagatgatcgaggccattatcgccgatatgggttcgaacgtgaagtacagtgtgctgttaaagcaactgagcgaggaggacattccggatttaccaccgggcggagggctcgacgccaagtgttcatacgtgtcgaaagttttcaaggagctgtgcccgaagctggccgaatcttgcgagattgacgcagcaaatcacccgtcctccgatgcagtgtcgctgattccagagttgttcgagggaacgaattaaataggtttatgtcgttaaattgtggttttgtattttgctcaaaatatatgatcgaagcgttctattccaatctattgtacagcctcttaaaataaaatgataaatcaagcagccaaaaaccgccaacaaagtacatcatcatcaatgtctgtataaactcacacatagaagaaacccaagtaacgctcggcagataatacgaaacgtaaagaacattaacttttggataaatcatgttagctcgttcatacaaagagtaccacacgctaatgaatgacgaaaaataattggaaaaatgaagaaaagaagaagtaatgcagcataactatgaacattgtgaaaacattgagtaaaattgccacataggaacattatcctcatcaacaagccaacaaaagcaaaagtagcattcaatttcatggaatgtgtaagaattttattttttcgtagaacacgtgtaaaatttgatggatttgatcgcgtttacttaataaggataaagagaaagagagatagaatatatgatgatgaaattaa

SEQ ID NO: 141122 - protein, 388 aa, Aedes aegypti
MGAFLEKPMTAKHNEHGEGNGLRYGVGSMQGWRCEMEDAHYAKTGLGEGLDDWNYFAVFDGHAGHKVADHCAKNLLQSIVRTQEFSNNDITKGIHAGFLKLDETMRDIPELASGADKSGTTAVCAFISSQNIYIANCGDSRAILCRNCAPIFSTQDHKPILPGEKQRIQNAGGSVMIQRVNGSLAVSRALGDYDFKNAKELGQCEQLVSPEPEIFCQDRDPADEFLVLACDGVWDVMSNANLCQFVHSRMQISDSLEDIANQVIDTCLHKGSRDNMSIIIIAFPGAPVPNEEAIKKEEKLEATLYQMIEAIIADMGSNVKYSVLLKQLSEEDIPDLPPGGGLDAKCSYVSKVFKELCPKLAESCEIDAANHPSSDAVSLIPELFEGTN

SEQ ID NO: 141123 - DNA, 1158 bp, Anopheles gambiae str. PEST
  CDS (1)..(1158)
atgggacagtcactgtcggagccggaaacctccaagcagtcggcattttgccagaacgactactacaaggtcggctcgagctgcatgcagggctggcggatgcacatggaggactcgcacacgcacatactctccctgcccgacgatcccgggacgtccttctttgccgtgtacgacgggcacgggggcgccaaggtggccgagtacgcgggcaagcatctgcacaagtacgtaacccgccggccagagtacgggaacgacgtgaagcatgcgctgcagcagggatttctcgacctggacgaagcgatgctgaacaacgaagcgctgcgcgaacagatgtccggctcgacggcggtggtggtgctgatcaaggacaaccggctgtactgcgcaaatgcgggcgattcgcgtgcgatcgcctgcgtcgacgggcggctggatgtgctgtcgttcgaccacaaaccgacgaacgaaaaggagcgggagcggataagcagcgcgggcggatacgtagagtacaaccgggtcaatggctacctggccctgtcgcgtgcgctcggcgactttgggctgaagcgcaacaagcagatcgaggcgaaggagcagatggtgaccgcgtacccggacgtggaggagcgggaggtgtcggagggctgggactttctggtgattgcttgcgacggcatctgggacgtgctgtccagccaggcggtgctcgagttcgtgcaggaggaaattgctcaaggcatctatccgcagcagatctgcgagaatctgatgatgcgctgcctggcgcccgactgccagatgggcggcatcgggggcgacaacatgacggtgattgtggtgtgctttctgcacggccagccgtacgaggagctggtcaatcggtgcaaggaagcggtctctaagcgacaggagcagcggaggaagcgccgcagccattcgaaccgatcgcacgaagggccgaatgggagtgatggggcggcgcgggacgacgcacccagcaatggtggcgaactaccggcgccggtgaagccgtcgtcgtcatcctccgcacccgaaaaagcgcgcgacacaaagaacaaacagacggaacaatcggacagtaataacgaaagtgcagaagaaagcagcgaagagatggatctgaagtag

SEQ ID NO: 141124 - protein, 385 aa, Anopheles gambiae str. PEST
MGQSLSEPETSKQSAFCQNDYYKVGSSCMQGWRMHMEDSHTHILSLPDDPGTSFFAVYDGHGGAKVAEYAGKHLHKYVTRRPEYGNDVKHALQQGFLDLDEAMLNNEALREQMSGSTAVVVLIKDNRLYCANAGDSRAIACVDGRLDVLSFDHKPTNEKERERISSAGGYVEYNRVNGYLALSRALGDFGLKRNKQIEAKEQMVTAYPDVEEREVSEGWDFLVIACDGIWDVLSSQAVLEFVQEEIAQGIYPQQICENLMMRCLAPDCQMGGIGGDNMTVIVVCFLHGQPYEELVNRCKEAVSKRQEQRRKRRSHSNRSHEGPNGSDGAARDDAPSNGGELPAPVKPSSSSSAPEKARDTKNKQTEQSDSNNESAEESSEEMDLK

SEQ ID NO: 141125 - DNA, 1245 bp, Magnaporthe grisea 70-15; identical to SEQ ID NO: 1366
  CDS (1)..(1245)

SEQ ID NO: 141126 - protein, 414 aa, Magnaporthe grisea 70-15; identical to SEQ ID NO: 1367

SEQ ID NO: 141127 - DNA, 1293 bp, Gibberella zeae PH-1; identical to SEQ ID NO: 1368
  CDS (1)..(1293)

SEQ ID NO: 141128 - protein, 430 aa, Gibberella zeae PH-1; identical to SEQ ID NO: 1369

SEQ ID NO: 141129 - DNA, 1455 bp, Ustilago maydis 521; identical to SEQ ID NO: 1384
  CDS (1)..(1455)

SEQ ID NO: 141130 - protein, 484 aa, Ustilago maydis 521; identical to SEQ ID NO: 1385

SEQ ID NO: 141131 - DNA, 1158 bp, Strongylocentrotus purpuratus; identical to SEQ ID NO: 1388
  CDS (1)..(1158)

SEQ ID NO: 141132 - protein, 385 aa, Strongylocentrotus purpuratus; identical to SEQ ID NO: 1389

SEQ ID NO: 141133 - DNA, 1922 bp, Tribolium castaneum
  CDS (157)..(1263)
aatttattgttgtgtgtttattaaaaaagcatgagattttgttatgtaaatgagcagggaatcgaagcgatgatttcgtggggaaagtaatcacgtggagtcgatgtaagatggagcgccgttgacaaatcttacacaaccaattatatacaaagaatgggagcatttcttgacaagccaaagacagataaattccaagagtgtggagaaggcaacgggctgcgctatggggtcgccagcatgcagggctggagggtcgagatggaggacgcacacatggccaagacgaacctgggggacgccctcaaagactggtcttacttcgccgttttcgatggccatgctggggccaaggtgtcagcccactgcgccgagcacctcctcgacgccatcatgcaaacggaggagttccaaaaggacgtgatgaaaggcatccacaacggttttctagagttagataataaaatgcgctcgttacctgaaatgacgtccggcgaagacaagagcggcacaacggccgtctgtgcattcgtttcacctagacttatctatgtagcgaattgcggggattcccgcgccgttttatgtcgcggtggcagccccgttttcaccacacaagaccacaagcccgggttgccttcggaaagggagcgcattgttaaagcaggaggcaatgttatgatccagagagtgaacggaagtttggccgtatcgagggctctaggcgattacgagtacaaaaatgtcgaaggaagggggccctgtgagcagttggtttcgcccgaaccggaaatcttcgtcagggatagagatgataaagaggatgagtttctggtgttggcttgcgatggaatttgggacgtgatgagcaacgaggatctctgccagtatatacataatcgccttttagtcaccgataatttacaggaagttaccagtcaagttatcgatacgtgtttgaacaaaggtagccgcgataacatgagtattgtgttagttgtgtttcctggcgctccgacccccactcaggaagcaatcgatgccgaaaaggaattcgatgcgactctggaaaggcgtataaaagaaattgtggaacaaaacgaaatcactgaattctccacggtgctgcataagcttgcatcactcaacattgaagggtttcctccaggtggtggactagctgcaaaacgtacactgattgagaaaattttcaaagaactgtgtccggatctagctgaaactgatttggaccctttcaactaaatttggagcgcactttcaggtgttgaggttaattttaggctattgctgttttatttatttaaaaggataagcttgattggcataggaattcgtaatattaaaataattataattttattgcagcccttgtacttttattcattaacaacaacacgaacggttttgtaattgcttgttattcctctaaaactagggcctaacatttcttttattagttaccaatatactgcaaaagtgatcctgttttttgtatatttcgtaagtagtgaagttttgtatgttatgcacaaagctcatgtttcatcagcgtttttccttataggataataatgtaaaatttgtaattactattttaaactagaggtgccacgttgcgtacgtttagctattcaagtgtatgtggccatcctctctaccaattttaaaaataataaatgtttgtagttgtttgttttctttacttttcgcgatctgtgcaaacatttattagcaacggtacttctcatcatatcattgcgttatctctgtacagccattcaagaaattcgttgaaattctattttttaactacctatatcatgtgtataaatcagaatgtgtgctgtatatttcagataattgagaatactctaataattatgattaaattatttaagtat

SEQ ID NO: 141134 - protein, 368 aa, Tribolium castaneum; identical to SEQ ID NO: 1391

SEQ ID NO: 141135 - DNA, 1914 bp, Tribolium castaneum
  CDS (1)..(1914)
atggtttttatgaaagtgaaccgaataaaatgcccccaaagcctaatcgcccccttaatccaaatcgtcatcgacgaaacccggaaatcgtgcaagaaacaaccaacagcatgcggcttcaacccgtcagataatgcctatgaacccctgaagctcatgcagaccgtgatggcaaaaaccaacgaggtttgtctgaggtatttggacaacagcatgctttgttccttgccgccccctggccaaccccacaacatcacaagtgtgtgtgcagcgaagaataagcgaagacggatggaagatagacatgttgtagttcccgatttaaacaccatgttcaatttacaggaagctagtccgtccagttattatgcaatattcgacggtcatgctggtcatgatgccgcggcctacagttcggcccatttacaccaatttctggccgaaagcaagcactttgttgcaaatcctgagcaagctttaatcgatgccttttgcaaaaccgatgcgttatttatcgataagtgcaatgttgagaggttcaatagtgggactacagcagtttgcgcgctactgcgacccaaagaaaaaacgttgtatatagcgtgggtgggggattcccaggcccttttagttaatcaaggacgggtgttgcaatgtgtcaatccacataaaccttgccggagtgatgaaagggaaaggattgagaaggagggagggtatgtttgttactgggggacgtggagggttaatggacagttggctgtttccagagcaataggtgatgcagagtacaaaccatacgtaatagcagtgcctgatatccgcgaaatacctctcgacggtggcgaagacttcctgatcttggcctgcgacggcctctgggactatttatccgaagatgacgccgcaagaaccgtatacgaaatggtctgcagcaatccagacaagaccgatctcataagcgagcgcttggtccagctgtctaaagaacgaggatctgccgacaatatctctgtgatagtagtattccttcgcgaaccatcaaaaatcgcggcggaagcccattgggcaaaccgcaacgcttctcccatcacaatggacacgagcctcgacaatgccaataacccgttcgccaattcgaacggtgccgataccaacatcatgggccaaaaaacagacggtttgcttctaaacctggccgaaaattttaaacacaatggttccgacctttcaccctctggggatttctaccacaattcggagaaatccaacggcaaaagactggcgtcggaattcgacgacgacgacgatttgggacctgaaacggacgtggacgccgttgacgatgtgctgtcgccttccatagcagcggccaaggctttggccgacggcctcgtcaacaataatccagacggaagcttcaacccgtttgtggagaaacacgaagttgagaaggctgccctcgagattgatctcgatctccagaagcagcaaagtagcgagtttgatggacagaggtcgcctagggaggaaacgcctacaccacccgccgatgccgaggatgatgatttagtgttgccgctgaaatggcacaatttcgcgactggggtcggaatctccctcgaggagagcaaacagaaacgatcagtaaattccattagtttaatttcccaagcctgtggcactgcccatgacccacaccaattgccatcatcattgcgaaattatctcttgcatatggtggcaacggagcagttgtgcacccggactcgatcgatgggcccggtgtggcttaatatgaacttccatatgcgtatgacggacccccagagccacgtgggtgacatacgcgggattttcacgttggcgaagtgtaccaaggttttagcgaggttgaggaaaaattcgaattaa

SEQ ID NO: 141136 - protein, 637 aa, Tribolium castaneum
MVFMKVNRIKCPQSLIAPLIQIVIDETRKSCKKQPTACGFNPSDNAYEPLKLMQTVMAKTNEVCLRYLDNSMLCSLPPPGQPHNITSVCAAKNKRRRMEDRHVVVPDLNTMFNLQEASPSSYYAIFDGHAGHDAAAYSSAHLHQFLAESKHFVANPEQALIDAFCKTDALFIDKCNVERFNSGTTAVCALLRPKEKTLYIAWVGDSQALLVNQGRVLQCVNPHKPCRSDERERIEKEGGYVCYWGTWRVNGQLAVSRAIGDAEYKPYVIAVPDIREIPLDGGEDFLILACDGLWDYLSEDDAARTVYEMVCSNPDKTDLISERLVQLSKERGSADNISVIVVFLREPSKIAAEAHWANRNASPITMDTSLDNANNPFANSNGADTNIMGQKTDGLLLNLAENFKHNGSDLSPSGDFYHNSEKSNGKRLASEFDDDDDLGPETDVDAVDDVLSPSIAAAKALADGLVNNNPDGSFNPFVEKHEVEKAALEIDLDLQKQQSSEFDGQRSPREETPTPPADAEDDDLVLPLKWHNFATGVGISLEESKQKRSVNSISLISQACGTAHDPHQLPSSLRNYLLHMVATEQLCTRTRSMGPVWLNMNFHMRMTDPQSHVGDIRGIFTLAKCTKVLARLRKNSN

SEQ ID NO: 141137 - DNA, 1176 bp, Tribolium castaneum
  CDS (1)..(1176)
atggaagacgaattagacgacaaaatcctataccaaacgtacgtgtcccacatgaaactcatgtctcggatcgcgtggggcgtccctctaaacatctccccgttagcgtacacctcgcacgtatggagactcctcaaagtgtacatgttgaaaccggagataatcattttcggcacgatagtgttgttcatgttgatgtatatgcaagcccttgatgtatggagtcgtaatttgctagggcgcctgcagtacaccatcaaccgcgcccccaggaccgcccccgacaagctcagcctcttcacgggcggcgacctggacaaggctagctgggagctcaaaatcggcccctacgccgcctacgccgtccaggggcggcgccccaagatggaagaccgcttcgtcatcaacgacaacatcaacaacaccggcgtcgccctcttcgccgtcttcgacggccacggcggcgaattcgccgccaattacgccaaagagaagctcatccagagcctctacggacgcgtggtcgagatcaaagacatgattgcggggaaaaccaccaagacgttcaactacgggaaactgctcacagacgaggtgttggccgccgaccaacgcttgctcgaaacggccaagaagagcatggacgtggccgggaccacagccctgattgcaatcctcgaaggcgcgaaattgatcgtggccaacgtgggggactcccggggggtgatgtgcgacaataaaggcaacgtcatccccctgtccttcgaccacaagccgcaacaaatgcgcgagaggaaacgcatcaaagaggcgggcggttttgtcacgtttaacggcgtctggagggtggccggcatcttagccacgtccagagcgctcggggattacccgctcaaagacaagaaattagtcatcgccgatccggatattctcacgttcgatttaaacgaccacaagccgatgtttgtgattttggcttccgatggattgtgggacactttctcgaacgaagaagcgatcagttttattaaagaacgactgaacgaacccgattatggtgcgaaaagcttaactttacagtcgtattatcgcggttctttggataatatcaccgttatcgtgattaatttcagagataacgcctttagcttccacagtgcggagaagagcgcttag

SEQ ID NO: 141138 - protein, 391 aa, Tribolium castaneum
MEDELDDKILYQTYVSHMKLMSRIAWGVPLNISPLAYTSHVWRLLKVYMLKPEIIIFGTIVLFMLMYMQALDVWSRNLLGRLQYTINRAPRTAPDKLSLFTGGDLDKASWELKIGPYAAYAVQGRRPKMEDRFVINDNINNTGVALFAVFDGHGGEFAANYAKEKLIQSLYGRVVEIKDMIAGKTTKTFNYGKLLTDEVLAADQRLLETAKKSMDVAGTTALIAILEGAKLIVANVGDSRGVMCDNKGNVIPLSFDHKPQQMRERKRIKEAGGFVTFNGVWRVAGILATSRALGDYPLKDKKLVIADPDILTFDLNDHKPMFVILASDGLWDTFSNEEAISFIKERLNEPDYGAKSLTLQSYYRGSLDNITVIVINFRDNAFSFHSAEKSA

SEQ ID NO: 141139 - DNA, 945 bp, Tribolium castaneum; identical to SEQ ID NO: 1394
  CDS (1)..(945)

SEQ ID NO: 141140 - protein, 314 aa, Tribolium castaneum; identical to SEQ ID NO: 1395

SEQ ID NO: 141141 - DNA, 1116 bp, Drosophila melanogaster
  CDS (1)..(1116)
atgggtcataaaatgggtggcttcttggaaaaaccagaaactgaaaagcaggctcaagagggtcacgggaatgggctgcgatactgcgtaagttctatgcaaggttggcgattggaaatggaggacagccactcggctgcttgccggctgaaggatcccttcgcaacgtggtcatattttgcggtgttcgatggtcacgctggcagtcaaatatcactgcattgcgctgaacatctaatgagtactatattggaatccgaatctttttcgaagcacaaatacgaggctggcatacgagagggcttcctgcagttggatgaggatatgaggaagctgtatcacgaccagcaaggcggctcgacggccatttgtgtttttgtatcaccggacaaaatatatctggtcaattgtggtgactcgcgtgcagtgatatcgcggaatggagcagctgtcatcagtacaattgatcacaagccgttttctcccaaagaacaagaacgcattcaaaatgccggaggcagtgtaatgattaaaaggataaatggcactctggcagtttcccgggccttcggtgactatgatttcaagaatgatggctcaaagtctcctgtcgatcagatggtgtctccggaacctgatataatagtttgcaatcggtccgaacacgatgaattcatagttgtagcctgcgatggcatttgggatgtgatgactagcagcgaggtttgtgaatttattaggtcacggcttttggtgacctatgacctgccgatgattgttaacagcgtattggatatttgcctgcataaaggcagcagggacaatatgacactgctcctcctacttttgcctggagcaccaaaggtcgatacggatgctgttaaggccgaaaggagtcttgatcaaactattgtgcaaataaccaaggaagtgattgagaagcacgaaatacacgactttgaaacacttattcgactgatgaaaagaatggccattaacattccaaatctaccacctggcggtggtctttatgcaaaatattacattatagagcaagctttccacgagaaatttccagatactccggctgaaatatatgattatttttccatgtag

SEQ ID NO: 141142 - protein, 371 aa, Drosophila melanogaster
MGHKMGGFLEKPETEKQAQEGHGNGLRYCVSSMQGWRLEMEDSHSAACRLKDPFATWSYFAVFDGHAGSQISLHCAEHLMSTILESESFSKHKYEAGIREGFLQLDEDMRKLYHDQQGGSTAICVFVSPDKIYLVNCGDSRAVISRNGAAVISTIDHKPFSPKEQERIQNAGGSVMIKRINGTLAVSRAFGDYDFKNDGSKSPVDQMVSPEPDIIVCNRSEHDEFIVVACDGIWDVMTSSEVCEFIRSRLLVTYDLPMIVNSVLDICLHKGSRDNMTLLLLLLPGAPKVDTDAVKAERSLDQTIVQITKEVIEKHEIHDFETLIRLMKRMAINIPNLPPGGGLYAKYYIIEQAFHEKFPDTPAEIYDYFSM

SEQ ID NO: 141143 - DNA, 1116 bp, Drosophila melanogaster; identical to SEQ ID NO: 1396
  CDS (1)..(1116)

SEQ ID NO: 141144 - protein, 371 aa, Drosophila melanogaster; identical to SEQ ID NO: 1397

SEQ ID NO: 141145 - DNA, 1116 bp, Drosophila melanogaster
  CDS (1)..(1116)
atgggtcataaaatgggtggcttcttggaaaaaccagaaactgaaaagcaggctcatgagggtcacggaaatgggctgcgatactgcgtaagttctatgcaaggttggcgattggaaatggaggatagccactcggctgcttgccggctgaaggatcccttcgcaacttggtcatattttgcggtgttcgatggtcacgctggcagtcaaatatcactgcattgcgctgaacatctaatgagtactatattggaatccgaatctttttcgaagcacaaatacgaggctggcatacgagagggcttcctgcagttggatgaggatatgaggaagctgtatcacgaccagcaaggcggctcgacggccatttgtgtttttgtatcaccggacaaaatatatctggtcaattgtggtgactcgcgtgcagtgatatcgcgaaatggagcagctgtcatcagtacaattgatcacaagccgttttctcccaaagagcaagaacgcattcaaaatgccggaggcagtgtaatgattaaaaggataaatggcactctggcagtttcccgggccttcggtgactatgatttcaagaatgatggctcaaagtctcctgtcgatcagatggtgtctccggaacctgatataatagtttgcaatcggtccgaacacgatgaattcatagttgtagcctgcgatggcatttgggatgtgatgactagcagcgaagtttgtgaatttattaggtcacggcttttggtgacctatgacctgccgatgattgttaacagcgtattggatatttgcctgcataaaggcagcagggacaatatgacactgctcctcctacttttgcctggagcaccgaaggtcgatatggatgcagttaaggccgaaaggagtcttgatcaaactattgtgcaaataaccaaggaagtgattgagaagcacgaaatacacgactttgaaacacttattcgactgatgaaaagaatggccattaacataccaaatctaccacctggcggtggtctgtatgcaaaatattatattatagagcaagctttccacgagaaatttccagatactccggctgaaatatatgattatttttccatgtag

SEQ ID NO: 141146 - protein, 371 aa, Drosophila melanogaster
MGHKMGGFLEKPETEKQAHEGHGNGLRYCVSSMQGWRLEMEDSHSAACRLKDPFATWSYFAVFDGHAGSQISLHCAEHLMSTILESESFSKHKYEAGIREGFLQLDEDMRKLYHDQQGGSTAICVFVSPDKIYLVNCGDSRAVISRNGAAVISTIDHKPFSPKEQERIQNAGGSVMIKRINGTLAVSRAFGDYDFKNDGSKSPVDQMVSPEPDIIVCNRSEHDEFIVVACDGIWDVMTSSEVCEFIRSRLLVTYDLPMIVNSVLDICLHKGSRDNMTLLLLLLPGAPKVDMDAVKAERSLDQTIVQITKEVIEKHEIHDFETLIRLMKRMAINIPNLPPGGGLYAKYYIIEQAFHEKFPDTPAEIYDYFSM

SEQ ID NO: 141147 - DNA, 1116 bp, Drosophila melanogaster
  CDS (1)..(1116)
atgggtcataaaatgggtggcttcttggaaaaaccagaaactgaaaagcaggctcaagagggtcacggaaatgggctgcgatactgcgtaagttctatgcaaggttggcgattggaaatggaggacagccactcggctgcttgccggctgatggatcccttcgcaacgtggtcatattttgcggtgttcgatggtcacgctggcagtcaaatatcactgcattgcgctgaacatctaatgagtactatattggaatccgaatctttttcgaagcacaaatacgaggctggcatacgagagggcttcctgcagttggatgaggatatgaggaagctgtatcacgaccagcaaggcggctcgacggccatttgtgtttttgtatcaccggacaaaatatatctggtcaattgtggtgactcgcgtgcagtgatatcgcgaaatggagcagctgtcatcagtacaattgatcacaagccgttttctcccaaagagcaagaacgcattcaaaatgccggaggcagtgtaatgattaaaaggataaatggcactctggcagtttcccgggccttcggtgactatgatttcaagaatgatggctcaaagtctcctgtcgatcagatggtgtctccggaacctgatataatagtttgcaatcggtccgaacacgatgaattcatagttgtagcctgcgatggcatttgggatgtgatgactagcagcgaagtttgtgaatttattaggtcacggcttttggtgacctatgacctgccgatgattgttaacagcgtattggatatttgcctgcataaaggcagcagggacaatatgacactgctcctcctacttttgcctggagcaccaaaggtcgatatggatgcagttaaggccgaaaggagtcttgatcaaactattgtgcaaataaccaaggaagtgattgagaagcacgaaatacacgactttgaaacacttattcgactgatgaaaagaatggccattaacataccaaatctaccacctggcggtggtctttatgcaaaatattacattatagagcaagctttccacgagaaatttccagatactccggctgaaatatatgattatttttccatgtag

SEQ ID NO: 141148 - protein, 371 aa, Drosophila melanogaster
MGHKMGGFLEKPETEKQAQEGHGNGLRYCVSSMQGWRLEMEDSHSAACRLMDPFATWSYFAVFDGHAGSQISLHCAEHLMSTILESESFSKHKYEAGIREGFLQLDEDMRKLYHDQQGGSTAICVFVSPDKIYLVNCGDSRAVISRNGAAVISTIDHKPFSPKEQERIQNAGGSVMIKRINGTLAVSRAFGDYDFKNDGSKSPVDQMVSPEPDIIVCNRSEHDEFIVVACDGIWDVMTSSEVCEFIRSRLLVTYDLPMIVNSVLDICLHKGSRDNMTLLLLLLPGAPKVDMDAVKAERSLDQTIVQITKEVIEKHEIHDFETLIRLMKRMAINIPNLPPGGGLYAKYYIIEQAFHEKFPDTPAEIYDYFSM

SEQ ID NO: 141149 - DNA, 1116 bp, Drosophila melanogaster
  CDS (1)..(1116)
atgggtcataaaatgggtggcttcttggaaaaaccagaaactgaaaagcaggctcaagagggtcatgggaatgggctgcgatactgcgtaagttctatgcaaggttggcgattggaaatggaggatagccactcggctgcttgccggctgaaggatcccttcgcaacgtggtcatattttgcggtgttcgatggtcacgctggcagtcaaatatcactgcattgcgctgaacatctaatgagtactatattggaatccgaatctttttcgaagcacaaatacgaggctggcatacgagagggcttcctgcagttggatgaggatatgaggaagctgtatcacgaccagcaaggcggctcgacggccatttgtgtttttgtatcaccggacaaaatatatctggtcaattgtggtgactcgcgtgcagtgatatcgcgaaatggagcagctgtcgtcagtacaattgatcacaagccgttttctcccaaagaacaagaacgcattcaaaatgccggaggcagtgtaatgattaaaaggataaatggcactctggcagtttcccgggccttcggtgactatgatttcaagaatgatggctcaaagtctcctgtcgatcagatggtgtctccggaacctgatataatagtttgcaatcggtccgaacacgatgaattcatagttgtagcctgcgatggcatttgggatgtgatgactagcagcgaagtttgtgaatttattaggtcacggcttttggtgacctatgacctgccgatgattgttaacagcgtattggatatttgcctgcataaaggcagcagggacaatatgacactgctcctcctacttttgcctggagcaccgaaggtcgatatggatgcagttaaggccgaaaggagtcttgatcaaactattgtgcaaataaccaaggaagtgattgagaagcacgaaatacacgactttgaaacacttattcgactgatgaaaagaatggccattaacataccaaatctaccacctggcggtggtctttatgcaaaatattacattatagagcaagctttccacgagaaatttccagatactccggctgaaatatatgattatttttccatgtag

SEQ ID NO: 141150 - protein, 371 aa, Drosophila melanogaster
MGHKMGGFLEKPETEKQAQEGHGNGLRYCVSSMQGWRLEMEDSHSAACRLKDPFATWSYFAVFDGHAGSQISLHCAEHLMSTILESESFSKHKYEAGIREGFLQLDEDMRKLYHDQQGGSTAICVFVSPDKIYLVNCGDSRAVISRNGAAVVSTIDHKPFSPKEQERIQNAGGSVMIKRINGTLAVSRAFGDYDFKNDGSKSPVDQMVSPEPDIIVCNRSEHDEFIVVACDGIWDVMTSSEVCEFIRSRLLVTYDLPMIVNSVLDICLHKGSRDNMTLLLLLLPGAPKVDMDAVKAERSLDQTIVQITKEVIEKHEIHDFETLIRLMKRMAINIPNLPPGGGLYAKYYIIEQAFHEKFPDTPAEIYDYFSM

SEQ ID NO: 141151 - DNA, 1251 bp, Oryza sativa subsp
  CDS (1)..(1251)
atggcggcgcacggcggtggcggcgtggaggaggatcaggcggggtcgagctcgctgtgcccacctgctgcggaggcagaggcggcggctgcggcggcggcgatagcgagggcggcgcggcctccgaggccgggcagggacaagaggctcggcgtgcggcacccgctgaagcaccggaggttccgcgcggggggcaaggcggcggtggcggccggcgctagggaggtcggggaggcgaccaccgtggcggaggcgacggcgacggggcctccgaaggggagcgacgaggatgacgaggctaggtacatttgcggcggatggacgaggagtagcaacttacaattaggtctgatgcttttccgtttgttgattggaactgacctatcatttgcacggcttccttcgattgttgataatatatgcagttgcatccaggcatgttgtgatgatggaagaatgagttgtggatactcaagctttagagggagaagagcaaacatggaagacttctatgacataaaatcatcaaaagttgatgataaccaaataaacctctttggaatatttgatggtcatggtggttcacatgctgctgagcatttaaagaagcacttatttgaaaatcttctgaaacatccgtcattcatcactgatacaaaatcagcaataagtgagacctacagaaaaactgactctgatttcttggatgctgagactaatattaatagagaggatgggtcaactgcatcaacagcaattttcgttggtaaccatatctatgtggcaaatgttggtgactcacgaactgtgatgtcaaaggctggcaaagctattgcactctctagtgatcacaaaccaaatagaaaagatgagcggaaacggattgagaatgctggaggggttgtgacatggtctgggacatggagggttggtggtgtactagcaatgtctcgggcttttggtaatcgtttcttgaagcgattcgttgttgctgagcctgaggtccaggaacaagaaatagatgatgatttggagtttctgattttggctagtgatgggctgtgggatgtggtgtccaatgagcatgccgttgcatttgtaaaggcggaggagggccctgaggccgcagcccggaagctggcagagattgcttttgcccgtggaagcaccgacaatataacatgcatcgttgtaaaatttctccatgctaagatggccgtagatgctgcctcgtctggtgagcgaagttga

SEQ ID NO: 141152 - protein, 416 aa, Oryza sativa subsp
MAAHGGGGVEEDQAGSSSLCPPAAEAEAAAAAAAIARAARPPRPGRDKRLGVRHPLKHRRFRAGGKAAVAAGAREVGEATTVAEATATGPPKGSDEDDEARYICGGWTRSSNLQLGLMLFRLLIGTDLSFARLPSIVDNICSCIQACCDDGRMSCGYSSFRGRRANMEDFYDIKSSKVDDNQINLFGIFDGHGGSHAAEHLKKHLFENLLKHPSFITDTKSAISETYRKTDSDFLDAETNINREDGSTASTAIFVGNHIYVANVGDSRTVMSKAGKAIALSSDHKPNRKDERKRIENAGGVVTWSGTWRVGGVLAMSRAFGNRFLKRFVVAEPEVQEQEIDDDLEFLILASDGLWDVVSNEHAVAFVKAEEGPEAAARKLAEIAFARGSTDNITCIVVKFLHAKMAVDAASSGERS

SEQ ID NO: 141153 - DNA, 867 bp, Oryza sativa subsp; identical to SEQ ID NO: 878
  CDS (1)..(867)

SEQ ID NO: 141154 - protein, 288 aa, Oryza sativa subsp; identical to SEQ ID NO: 879

SEQ ID NO: 141155 - DNA, 717 bp, Oryza sativa subsp
  CDS (1)..(717)
atggaggactaccatgtggcagagtacaagtatgacaagagccatgagcttggtctctttgccatttttgatggtcacttgggagacagtgttccaagttacttgaaagctaaccttttctgcaacatactgaaagagcctatcttctggactaaccctcaggaagcaattaagaatgcataccgctctacaaacaaatatattttggagaatgccaaacaacttggacctggtggttcaacagcagttactgctattgtcgttgatggaaaggatatgtgggtagcaaatgtaggtgattcaagagctgttgtgtgtgaaagaggtgctgctaatcagctcactgttgaccatgaacctcatacaactaatgaaaggcagaggattgagaagcagggtggctttgtaacaacatttcctggtgatgttccccgggtaaatggtcagcttgctgttgcgagggcctttggggaccaaagcctcaaggcgcacttgagttcagaacctgatgttaggcatgtaccaataaattcaagcatagagttcgtcatacttgccagcgatggactatggaaggtaatgaagaaccaggaagccgtcgatcttgtgaagtcgatcaaggacccccaggcagcagcgaagcgactgacgaccgaagcgcttgcgaggaagagcaaggacgacatctcctgcatcgtcatccgattccgctgctga

SEQ ID NO: 141156 - protein, 238 aa, Oryza sativa subsp
MEDYHVAEYKYDKSHELGLFAIFDGHLGDSVPSYLKANLFCNILKEPIFWTNPQEAIKNAYRSTNKYILENAKQLGPGGSTAVTAIVVDGKDMWVANVGDSRAVVCERGAANQLTVDHEPHTTNERQRIEKQGGFVTTFPGDVPRVNGQLAVARAFGDQSLKAHLSSEPDVRHVPINSSIEFVILASDGLWKVMKNQEAVDLVKSIKDPQAAAKRLTTEALARKSKDDISCIVIRFRC

SEQ ID NO: 141157 - DNA, 1476 bp, Oryza sativa subsp; identical to SEQ ID NO: 890
  CDS (1)..(1476)

SEQ ID NO: 141158 - protein, 491 aa, Oryza sativa subsp; identical to SEQ ID NO: 891

SEQ ID NO: 141159 - DNA, 2643 bp, Oryza sativa subsp
  CDS (1)..(2643)
atggctggcaaggaaatctaccacaagatgaaggacaaggtgaaagatgcttttagttcgtcaggaccagaaacagggaaaggaaaaacaaaattgtcaggcaagcgtgtcaagcatggttaccatcttgtgaagggaaaatcaaatcatccgatggaggactatctagtggcagagtacaggcaagaaggagagcatgatctggggctgtttgcaatatttgatgggcatttgggccacactgttccagacttcctgcgctcacatctctttgataatatcttaaagcagccagaattcttgagcaacccacaagctgcaattcgaaatgcatatcaacttacggatgcaaaaatattggaaagcgcagctgagttgggcagaggaggctccactgctgttactgccatattaataagcagtgaaaattctgtgaacctagtagttgcaaatgttggagattcacgagcagttattagcaagagtggtgtagcaaaacagctttcggttgatcatgaaccaaacaaggagcggcattcaatcgagaaaaaaggtggctttgtttcaaacttaccaggagatgtaccgcgtgttgatggtcagcttgcggttgcaagggcatttggagaccggagcctaaagaagcacctcagctcagagccagatgtggtggaggaacctatagacgagaatactgattttctaattcttgcaagtgatggattatggaaggtgatgtccaaccaagaggcggtggatgaaatcaaggacttcaaggatgctcaggcagctgcgaagcatctaacggagcaggccgtgaaccggaaaagcaaagacgacatctcctgcatcgttgcgcggcgaccagcagccaccttggacgacctcgaggttgcatcggcgagtacccctccaatcgggaatccgaatctggcaggtctaagggctctttgtgatgataaggcttgcaaattgatgtgtgattgtactggagaattggagtggcagaatatgtatgttgaagagccccaaattgtggatttgtgtgataagtctgatgatgagagtgattatgaggtagagatggaattggaagttgagagtgaagaagatggggaaaaaggggatgtacatgtagatgcatctaaagggaaagaagttgacaagggtaaagcaatagcagaggaggaaactgataggaggatagttctgtaccaatctgaatcagcacctctagctagccatcaaccttttagcagtgctcccaaagctagccatgaaccttcagatagttcacccattccaaatcagccaacatatgacactaaacccatagctaacgatccaccttctgatagtgatgaagacaatgactatattctaggggatgaagctcagtcagatgatgatgaagaggctgctgagatagagaaacattacaagaaggtcaagaggaaggtgaaggcaggacagctagagaacctggatgacttctttctagagaggggacaaccaagtgtgcatggtggtgttgaagatgcagggaatgaaaccccttatgcaaacagcgatgaggaggactcagtagatgagactggtagtgatggggaggtgaggactaagagaagtaaggaaccaaggtacaagaagagtgaaggtgtgcctaagtttgaactagggatgaagttcaactgtaagaagcaattcaagaaggctattacaaaatatgctcttgcagagaagaaagtgattaactttattaaggatgatgggcaaagggtaagggcccagtgtgattggcataactgtccctggaggcattttcctgacaagcaattccagaaaaagttctggaggtgtgcaaaggctccctgcaggatgttattcaatcttgctagggcaaaacttgctcaggtgactcaagctggagctcaagccatactgaacacacaccctgagcattggagtagagcctggttcagaagcacacatgtgcactgccttcagccagtagagggaatgagtgcttggccggaggatgatagagaagcactcaatgctcctggatacataaagatgccaggaaggccaagaactaaaaggaggagggagatgcatgaaccacccaagcctaccaaaatgtccaagtatggtactgtcattagatgcactagctgcaagcaaattgggcacaacaaatctacctgtgcaaagcatcatggtgcaagttctagcaacctaggcagttctaagcagcttccatcaccaagtcaacagatggtgttatcaaacacaccaggcagttctgctcaaagcaggaagaggaaagctgtcagccttactacaacaagcaccacagaacattccaagagcaaccaatcaaagagcaaggcagcaatggatagccaggaagtggtcagggttgctgcaaaggccaaggtttcaacagctcagggtggatctgctagagaagatcttcaagcaatagttccccattcaaacagctctactactgcatctgtgaggctcacatctggcaaggcaactgtcactgtctcagctcaagagcctacaaaaaacaagccaaagaagagagctggaggatcacttattcttctgccctgggaagcaaagaagctttga

SEQ ID NO: 141160 - protein, 880 aa, Oryza sativa subsp
MAGKEIYHKMKDKVKDAFSSSGPETGKGKTKLSGKRVKHGYHLVKGKSNHPMEDYLVAEYRQEGEHDLGLFAIFDGHLGHTVPDFLRSHLFDNILKQPEFLSNPQAAIRNAYQLTDAKILESAAELGRGGSTAVTAILISSENSVNLVVANVGDSRAVISKSGVAKQLSVDHEPNKERHSIEKKGGFVSNLPGDVPRVDGQLAVARAFGDRSLKKHLSSEPDVVEEPIDENTDFLILASDGLWKVMSNQEAVDEIKDFKDAQAAAKHLTEQAVNRKSKDDISCIVARRPAATLDDLEVASASTPPIGNPNLAGLRALCDDKACKLMCDCTGELEWQNMYVEEPQIVDLCDKSDDESDYEVEMELEVESEEDGEKGDVHVDASKGKEVDKGKAIAEEETDRRIVLYQSESAPLASHQPFSSAPKASHEPSDSSPIPNQPTYDTKPIANDPPSDSDEDNDYILGDEAQSDDDEEAAEIEKHYKKVKRKVKAGQLENLDDFFLERGQPSVHGGVEDAGNETPYANSDEEDSVDETGSDGEVRTKRSKEPRYKKSEGVPKFELGMKFNCKKQFKKAITKYALAEKKVINFIKDDGQRVRAQCDWHNCPWRHFPDKQFQKKFWRCAKAPCRMLFNLARAKLAQVTQAGAQAILNTHPEHWSRAWFRSTHVHCLQPVEGMSAWPEDDREALNAPGYIKMPGRPRTKRRREMHEPPKPTKMSKYGTVIRCTSCKQIGHNKSTCAKHHGASSSNLGSSKQLPSPSQQMVLSNTPGSSAQSRKRKAVSLTTTSTTEHSKSNQSKSKAAMDSQEVVRVAAKAKVSTAQGGSAREDLQAIVPHSNSSTTASVRLTSGKATVTVSAQEPTKNKPKKRAGGSLILLPWEAKKL

SEQ ID NO: 141161 - DNA, 927 bp, Oryza sativa subsp; identical to SEQ ID NO: 904
  CDS (1)..(927)

SEQ ID NO: 141162 - protein, 308 aa, Oryza sativa subsp; identical to SEQ ID NO: 905

SEQ ID NO: 141163 - DNA, 879 bp, Vitis vinifera
  CDS (1)..(879)
  misc_feature (867)..(867): y is t or c
  misc_feature (873)..(873): s is g or c
atgggatatattagttcggttttgtcatcctcaagtcaagttcacgttgatgatgggcctgttagcggtggcggtctcagtcataatgggaagttcagctacggatatgctagttctcccgggaaaaggtcttcaatggaagatttttatgagacaagaattgatggtgttgaaggagagatagttggcctttttggagtctttgatggtcatggaggtgctcgagcagctgaatatgttaaacaaaacctttttagtaatttgatcaggcatccaaagttcatttctgatacaaaatcagctatagctgatgcatacaagcacacagactcagaatttctgaaatcagaaaataatcagaatagagatgctggatcaactgcctccactgctatccttgttggtgaccgtttgctggttgcaaatgttggggactccagagctgttatctgcaggggtggtaatgccattgctgtttctcgagatcacaagccagaccaaactgatgagcggcagcgtattgaggatgctggagggtttgtgatgtgggctggaacttggagggttgggggtgttcttgctgtttctcgtgcatttggtgatagactcttgaagcagtatgttgttgctgatccagaaatccaggaggaaaagattgacagctccctcgagtttcttatccttgccagtgatggactgtgggatgttgtcacaaatgaggaggctgtcgcaatgatcaaaccaatcccagacccagaggaggcagcaaagaggctgatgcaggaagcatatcagagaggcagtgcagataacattacctgtgttgttgtgcgtttcttggccaaccaagggggttcgtccctttcyagcccsgcataa

SEQ ID NO: 141164 - protein, 292 aa, Vitis vinifera
MGYISSVLSSSSQVHVDDGPVSGGGLSHNGKFSYGYASSPGKRSSMEDFYETRIDGVEGEIVGLFGVFDGHGGARAAEYVKQNLFSNLIRHPKFISDTKSAIADAYKHTDSEFLKSENNQNRDAGSTASTAILVGDRLLVANVGDSRAVICRGGNAIAVSRDHKPDQTDERQRIEDAGGFVMWAGTWRVGGVLAVSRAFGDRLLKQYVVADPEIQEEKIDSSLEFLILASDGLWDVVTNEEAVAMIKPIPDPEEAAKRLMQEAYQRGSADNITCVVVRFLANQGGSSLSSPA

SEQ ID NO: 141165 - DNA, 852 bp, Vitis vinifera
  CDS (1)..(852)
atggctggcaaagaaatcatcaataagatgaaggaaaaagttgggttgggttcatcttcctgtgacactggcaaagggaagagcaagatgtcaaagaacataacacatggctatcacttggtaaagggaaaatcaaaccatgccatggaagattatgttgttgcacaatttaagaaagttgatgacaaagagcttggtctgtttgcaatatttgatggtcacttgagccatgatattcctaattatttgcggtctcatttatttgataatattttgacagagcctgacttctggactgaaacggaggaggcaattagaagagcatatcataatactgatactacaattttggagaaatcagctgatttgggtaaagggggatcaacagcagttacagcaatattaattaatgggcataagttgatagtagccaatgtcggggattctcgagctgtcatatgcagaaatggggtggtcaaacaactatcagttgatcatgagccgagcaaggaacgaaagaacattgaggacagaggtggttttgtatcaaacttcccaggggatgttcctcgtgttgatgggcagttggcagttgcaagggcttttggtgacaagagcttgaagggacacctcagttcagaaccggatgtggtggtagagcacatatatgatgatacagagtttgctattttggcaagtgatggattatggaaggtaatgacgaaccaagaagcagcagactcaatcaagaacataaaggatgccagggctgcagcaaagcaccttactgaagaggcactgattaggaagagcacagacgatatctcctgcatagtagtaagattccagtga

SEQ ID NO: 141166 - protein, 283 aa, Vitis vinifera
MAGKEIINKMKEKVGLGSSSCDTGKGKSKMSKNITHGYHLVKGKSNHAMEDYVVAQFKKVDDKELGLFAIFDGHLSHDIPNYLRSHLFDNILTEPDFWTETEEAIRRAYHNTDTTILEKSADLGKGGSTAVTAILINGHKLIVANVGDSRAVICRNGVVKQLSVDHEPSKERKNIEDRGGFVSNFPGDVPRVDGQLAVARAFGDKSLKGHLSSEPDVVVEHIYDDTEFAILASDGLWKVMTNQEAADSIKNIKDARAAAKHLTEEALIRKSTDDISCIVVRFQ

SEQ ID NO: 141167 - DNA, 852 bp, Vitis vinifera
  CDS (1)..(852)
atgaatggaagggaaattctccagaagatcagtgtgaaggttgggttaggttcatccacagctgacacggggaaaggcaaaagcaagatgtcgaagcatataacgcatggatttcacttggtgaaaggcaaatcaaatcatgaaatggaagattgtttggtttctgaattcaagcaagtggaagaccatgagttgggtttatttggaatattcgatgggcatttgggccatgatgtttcaaattacttgaaaactcatctgtttgacaatattctgaaggagcatactttctggaccgaaacagagaatgctataaagagagcttaccgtaaaactgacattgagatactggacaaatcattgtacttgggaagaggagggtcaactgcagtaacagcaatactaatcaatggtgagaggttggtagtggcaaatgtgggagattctcgggctgttatatgcaagaatggtgaggctaaacagctatcagttgatcatgagccaagcaaggaaagaacgatgattgaaaggcggggtggttttgtatcaaaccttccaggtgatgtaccacgtgttgacggacaacttgcagtggcaagggcatttggtgataagagcttgaagctacaccttagctcagaaccagatgtggcagtggagcccataactactggaacagagtgcattattctggcaagtgatggcttatggaaggtgatgtcaaaccaggaggcggtggattgcatcaaacacataaaggatgctcagtcagcagcaaagcgattgactgacgaggctctttctaagaaaagcaaggatgatatctcctgcattgtagtaaagtttcagtga

SEQ ID NO: 141168 - protein, 283 aa, Vitis vinifera
MNGREILQKISVKVGLGSSTADTGKGKSKMSKHITHGFHLVKGKSNHEMEDCLVSEFKQVEDHELGLFGIFDGHLGHDVSNYLKTHLFDNILKEHTFWTETENAIKRAYRKTDIEILDKSLYLGRGGSTAVTAILINGERLVVANVGDSRAVICKNGEAKQLSVDHEPSKERTMIERRGGFVSNLPGDVPRVDGQLAVARAFGDKSLKLHLSSEPDVAVEPITTGTECIILASDGLWKVMSNQEAVDCIKHIKDAQSAAKRLTDEALSKKSKDDISCIVVKFQ

SEQ ID NO: 141169 - DNA, 870 bp, Triticum aestivum
  CDS (1)..(870)
atggggcaccggggggacaccaagcctgtcagtggcggcgggttcagtgagaatggcaagtttagctatggttatgcgagcagtctagggaaaagatcttccatggaggacttccacgagacgagaatcgatggcgtcgatggagagaccgtcggattgttcggtgttttcgacggccatggtggagctcgagccgcggagttcgtcaagcagaaccttttcagcaacttaatcaagcacccaaagttcttcaccgataccaagtctgctattgctgaaactttcacccatacggattcagagctcctggaggccgataccacccacaaccgagatgcagggtcgacggcctccacggccattctcgttggcgatcgcctggtggtggcaaacgttggggactctagggcggtcatttgtaggggtggtgatgccatagccgtgtcaagggaccataagcctgaccagacagatgaaaggcagaggatagaggacgccggaggtttcgtgatgtgggcaggtacatggcgtgtgggcggcgtgcttgctgtttctcgggcatttggtgacaaactgttgaagcagtacgtggttgccgatccagagatcaaggaggaggtggtcgacagctccctggagttcctcatcctggcgagcgacgggctgtgggacgtcgtctccaacgaggaagccgtggccatggtgaagccgatcgtggactcgcaggaggcggccaagaagctcctcgtcgaggcaacgcggaggggaagcgccgacaacatcacctgcgtcgtcgtccgtttcctggaccagcagcccccggcggcggccaccaacggatccccagcccctgccgcagcgagcaagtga

SEQ ID NO: 141170 - protein, 289 aa, Triticum aestivum
MGHRGDTKPVSGGGFSENGKFSYGYASSLGKRSSMEDFHETRIDGVDGETVGLFGVFDGHGGARAAEFVKQNLFSNLIKHPKFFTDTKSAIAETFTHTDSELLEADTTHNRDAGSTASTAILVGDRLVVANVGDSRAVICRGGDAIAVSRDHKPDQTDERQRIEDAGGFVMWAGTWRVGGVLAVSRAFGDKLLKQYVVADPEIKEEVVDSSLEFLILASDGLWDVVSNEEAVAMVKPIVDSQEAAKKLLVEATRRGSADNITCVVVRFLDQQPPAAATNGSPAPAAASK

SEQ ID NO: 141171 - DNA, 870 bp, Triticum aestivum
  CDS (1)..(870)
atggggcaccggggggacaccaagcctgtcagtggcggcgggttcagtgagaatggcaagtttagctatggttatgcgagcagtctagggaaaagatcttccatggaggacttccacgagacgagaatcgatggcgtcgatggagagaccgtcggattgttcggtgttttcgacggccatggtggagctcgagccgcggagttcgtcaagcagaaccttttcagcaacttaatcaagcacccaaagttcttcaccgataccaagtctgctattgctgaaactttcacccatacggattcagagctcctgaaggccgataccacccacaaccgagatgcagggtcgacggcctccacggccattctcgttggcgatcgcctggtggtggcaaacgttggggactctagggcggtcatttgtaggggtggtgatgccatagccgtgtcaagggaccataagcctgaccagacagatgaaaggcagaggatagaggacgccggaggtttcgtgatgtgggcaggtacatggcgtgtgggcggcgtgcttgctgtttctcgggcatttggtgacaaactgttgaagcagtacgtggttgccgatccagagatcaaggaggaggtggtcgacagctccctggagttcctcatcctggcgagcgacgggctgtgggacgtcgtctccaacgaggaagccgtggccatggtgaagccgatcgtggactcgcaggaggcggccaagaagctcctcgtcgaggcaacgcggaggggaagcgccgacaacatcacctgcgtcgtcgtccgtttcctggaccagcagcccccggcggcggccaccaacggatccccagcccctgccgcagcgagcaagtga

SEQ ID NO: 141172 - protein, 289 aa, Triticum aestivum
MGHRGDTKPVSGGGFSENGKFSYGYASSLGKRSSMEDFHETRIDGVDGETVGLFGVFDGHGGARAAEFVKQNLFSNLIKHPKFFTDTKSAIAETFTHTDSELLKADTTHNRDAGSTASTAILVGDRLVVANVGDSRAVICRGGDAIAVSRDHKPDQTDERQRIEDAGGFVMWAGTWRVGGVLAVSRAFGDKLLKQYVVADPEIKEEVVDSSLEFLILASDGLWDVVSNEEAVAMVKPIVDSQEAAKKLLVEATRRGSADNITCVVVRFLDQQPPAAATNGSPAPAAASK

SEQ ID NO: 141173 - DNA, 831 bp, Vitis vinifera
  CDS (1)..(831)
atgattctctctagagatcccgccgccatcttcagcggcggcggtatcagctttctcactggtgatcgaaatgcaagattcagctatgggtattccagtttcaagggtaaaaggccttccatggaggatttctacgagactagaatatcagaggttgatggtcatatggtagccttctttggtgtttttgatggtcatggaggttcaagaaccgcggaatacctcaaaaacaatcttttcaagaatttaagtagccacccagatttcatcaaagatacaaagtcagccattgctgaagtatttagaaagactgatgctgattatctcaatgaagagaaaggtcaggcaagagatgctggctcaactgcctcaactgctgtgctcgttggtgaccggctgcttgttgcaaatgtgggagattctagagtggttgcttgtagagctggttcagctatcccactgtccactgatcacaaacctgatagatctgatgaacgccaaaggattgaagatgctggaggtttcgttatttgggcaggaacctggcgggttggtggtgttcttgctgtttctcgtgcatttggggataaacttcttaaggcatatgttgttgctgatccagaaattcaggaagaagaaattgatggtgtagattttataattattgcaagtgatggactttggaatgtcttatcaaataaggaggccgtggctatagtgcaggacattatggatgcagaagcagcatcaagaaaacttatacatgaggcttatgcacgagggagctctgacaacattacttgcgttgtagtccgattcaagaactcatga

SEQ ID NO: 141174 - protein, 276 aa, Vitis vinifera
MILSRDPAAIFSGGGISFLTGDRNARFSYGYSSFKGKRPSMEDFYETRISEVDGHMVAFFGVFDGHGGSRTAEYLKNNLFKNLSSHPDFIKDTKSAIAEVFRKTDADYLNEEKGQARDAGSTASTAVLVGDRLLVANVGDSRVVACRAGSAIPLSTDHKPDRSDERQRIEDAGGFVIWAGTWRVGGVLAVSRAFGDKLLKAYVVADPEIQEEEIDGVDFIIIASDGLWNVLSNKEAVAIVQDIMDAEAASRKLIHEAYARGSSDNITCVVVRFKNS

SEQ ID NO: 141175 - DNA, 852 bp, Vitis vinifera
  CDS (1)..(852)
atgggtaggttatgctgttttaatgccgcctgttctcagcttgtaggaggagcttcctcttgtagctctggtaaaggaagaagtcaagagggtatgatcaagtatggtttcagcctcgtaaaagggaaagctaatcatcccatggaggattatcatgttgctaagtttgtacagatagaagaacatgagcttgggttgtttgctatttatgatggccatttgggagatcgtgtgcccctctacctacaaaagcatttgttttccaatatccttaaagaggaagagttttgggttgatcctggaggatctatttcaaaagcctatgagaaaacagaccaggcaattcttgctaacagttccaacttgggacgaggagggtccactgccgttactgcaattttgattaatggtcgtagattatggattgccaacgtgggagattcacgagcagttctttctaaagggggtcaggccatacagatgaccacagaccatgaacccaacactgaaagaggcagcattgagaacagaggtggttttgtttcaaacatgccaggagatgtccccagagtcaatgggcagctggctgtttctcgggcttttggagataagagccttaaatcacacttacgatcagatcctgacatacaagatactactctagatttcaactctgaaattctaattcttgcaagtgatggcctttggaaggtaatgaacaatcaagaagcggttgatattgtgagaagaatcaaagaccctgagaaggcagctaagcaactaactgctgaagcactgagaagagacagtaaagatgatatatcttgtgttgtggttagatttaggggataa

SEQ ID NO: 141176 - protein, 283 aa, Vitis vinifera
MGRLCCFNAACSQLVGGASSCSSGKGRSQEGMIKYGFSLVKGKANHPMEDYHVAKFVQIEEHELGLFAIYDGHLGDRVPLYLQKHLFSNILKEEEFWVDPGGSISKAYEKTDQAILANSSNLGRGGSTAVTAILINGRRLWIANVGDSRAVLSKGGQAIQMTTDHEPNTERGSIENRGGFVSNMPGDVPRVNGQLAVSRAFGDKSLKSHLRSDPDIQDTTLDFNSEILILASDGLWKVMNNQEAVDIVRRIKDPEKAAKQLTAEALRRDSKDDISCVVVRFRG

SEQ ID NO: 141177 - DNA, 765 bp, Vitis vinifera
  CDS (1)..(765)
atgtcaaagaacataacacatggctatcacttggtaaagggaaaatcaaaccatgccatggaagattatgttgttgcacaatttaagaaagttgatgacaaagagcttggtctgtttgcaatatttgatggtcacttgagccatgatattcctaattatttgcggtctcatttatttgataatattttgacagagcctgacttctggactgaaacggaggaggcaattagaagagcatatcataatactgatactacaattttggagaaatcagctgatttgggtaaagggggatcaacagcagttacagcaatattaattaatgggcataagttgatagtagccaatgtcggggattctcgagctgtcatatgcagaaatggggtggtcaaacaactatcagttgatcatgagccgagcaaggaacgaaagaacattgaggacagaggtggttttgtatcaaacttcccaggggatgttcctcgtgttgatgggcagttggctgttgcaagggcttttggtgacaagagcttgaagggacacctcagttcagaaccagatgtggtggtagagcacatacatgatgatacagagtttgctattttggcaagtgatggattatggaaggtaatgacgaaccaagaagcagcagactcaatcaagaacataaaggatgccagggctgcagcaaagcaccttactgaagaggcactgattaggaagagcacagacgatatctcctgcatagtagtaagattccagtga

SEQ ID NO: 141178 - protein, 254 aa, Vitis vinifera
MSKNITHGYHLVKGKSNHAMEDYVVAQFKKVDDKELGLFAIFDGHLSHDIPNYLRSHLFDNILTEPDFWTETEEAIRRAYHNTDTTILEKSADLGKGGSTAVTAILINGHKLIVANVGDSRAVICRNGVVKQLSVDHEPSKERKNIEDRGGFVSNFPGDVPRVDGQLAVARAFGDKSLKGHLSSEPDVVVEHIHDDTEFAILASDGLWKVMTNQEAADSIKNIKDARAAAKHLTEEALIRKSTDDISCIVVRFQ

SEQ ID NO: 141179 - DNA, 852 bp, Vitis vinifera; identical to SEQ ID NO: 141167
  CDS (88)..(852)

SEQ ID NO: 141180 - protein, 254 aa, Vitis vinifera
MSKHITHGFHLVKGKSNHEMEDCLVSEFKQVEDHELGLFGIFDGHLGHDVSNYLKTHLFDNILKEHTFWTETENAIKRAYRKTDIEILDKSLYLGRGGSTAVTAILINGERLVVANVGDSRAVICKNGEAKQLSVDHEPSKERTMIERRGGFVSNLPGDVPRVDGQLAVARAFGDKSLKLHLSSEPDVAVEPITTGTECIILASDGLWKVMSNQEAVDCIKHIKDAQSAAKRLTDEALSKKSKDDISCIVVKFQ

SEQ ID NO: 141181 - DNA, 882 bp, Vitis vinifera
  CDS (1)..(882)
atgtttttggatttttatcatgatgatttcttcttatttttgtgtttgttggtattacagaaggccacatgcctagactcatctactccagactctggaaaagggaaatgtaaatcatgtagtaacattgttgctcacggattccacttggtagaagggaaatcaggtcatgatatggaggactaccatgttgcagaatacagaaataagaagagccatgtacttggattatttgccatctttgatggccatcttggtaacagtgtgccaagttatttgaaagataaccttttcaataatatacttgaggagccgaacttctggaatgaccccaagattgcaataaaaaatgcatatcgtgccactgataaatatattctggagaactccatgaaattaggtcctggtggctcaacggcagtaactgcaatagttattgatggcaaagacttatgggtagcaaacattggtgactccagagctgtcgtctgtgaaaggggcgctgccaatcagctaactgttgaccatgagccagacagtgaacgaagaagaattgagaaacaaggtggctttgtgactaatcttgctggagatgtgcctcgagttaatggccaattggcagttgcacgtgcttttggggatcaaagccttaaagcacatttaagttcggagcctgatgtaagacatgtgcctatagactcaactatagagtttgttatattagcaagtgatggcttatggaaggttatgaaaaaccaggaggcagttgatatggtgaaatccattaaagatcctcaagtagcagccaaacgtctaacaacagaagcattggaaagaaagagcaaagatgatatatcgtgcatcgtgatccgtttcggatga

SEQ ID NO: 141182 - protein, 293 aa, Vitis vinifera
MFLDFYHDDFFLFLCLLVLQKATCLDSSTPDSGKGKCKSCSNIVAHGFHLVEGKSGHDMEDYHVAEYRNKKSHVLGLFAIFDGHLGNSVPSYLKDNLFNNILEEPNFWNDPKIAIKNAYRATDKYILENSMKLGPGGSTAVTAIVIDGKDLWVANIGDSRAVVCERGAANQLTVDHEPDSERRRIEKQGGFVTNLAGDVPRVNGQLAVARAFGDQSLKAHLSSEPDVRHVPIDSTIEFVILASDGLWKVMKNQEAVDMVKSIKDPQVAAKRLTTEALERKSKDDISCIVIRFG

SEQ ID NO: 141183 - DNA, 711 bp, Vitis vinifera
  CDS (1)..(711)
atggaggattatcatgttgcaaagtttgttcagcaacaaggacatgagcttggactttttgctatttatgatggacatctgggggatagtgtccctgcctatctacaaaagcatttgttcccaaacatcctaaaggaggaagaattttggactgatcctgcgaggtccatttctaaagcctatgagagaaccgaccaggcaattctttcacacagtcctgacttgggcagaggtgggtccactgcagttactgcaattcttatagatggccgaaagttatgggtagccaatgttggagattcacgagcggttttgtccaagaaagggcaggcgagacaaatgtccactgatcatgagcccaacactgagcgagatagcattgaggacagaggtggctttgtctcaaatatgccaggagatgttgcaagagtaaatgggcagctggcagtttctcgtgcttttggagacaagaacctcaaatcacacttgagatcagatcctgatgttcaatatgctgatattgatgcagatactgagtttctcatccttgcaagcgatggtctatggaaggtgctgagtaatgaagaggcaattgatattgcaaggaaaaccagggacccacagaaggcagccaagcaactagtagctgaagcattgaatagagagagtaaagacgatatatcatgtatcgttgttcgattcagggggtaa

SEQ ID NO: 141184 - protein, 236 aa, Vitis vinifera
MEDYHVAKFVQQQGHELGLFAIYDGHLGDSVPAYLQKHLFPNILKEEEFWTDPARSISKAYERTDQAILSHSPDLGRGGSTAVTAILIDGRKLWVANVGDSRAVLSKKGQARQMSTDHEPNTERDSIEDRGGFVSNMPGDVARVNGQLAVSRAFGDKNLKSHLRSDPDVQYADIDADTEFLILASDGLWKVLSNEEAIDIARKTRDPQKAAKQLVAEALNRESKDDISCIVVRFRG

SEQ ID NO: 141185 - DNA, 1056 bp, Vitis vinifera
  CDS (1)..(1056)
atggtatgcagcggctgcataaggaatgtgattgttcaagctggccacattggacaatcagctgtgagaagcgttcgattaagagcaatctatagaagtttgaatgcaaatattggattgaggtatacctggaatcgacagtttaggggcagtgtaaagatgatggttgatacggcgaagggggaacctattatcaatgtgttgccagagaaagaggacgatggtggctatgccagtggaggatggaaaagtgaagacggaaaactgagctgtgggtattcaagtttcaggggaaagagagctagcatggaggatttctatgatgtaaaaatgtccaagattgatgggcaaacagtttgcctttttggaatatttgatggtcatggtggttctcgtgctgcggagtttttgaaggagcatctctttgagaatttgatgaagcatccagagttcatgacaaataccaaattggctataagtgaaacatatcaacaaactgacatgaattttctggatgctgaaagagatacttaccgagatgatggttctactgcttccacagcagtgcttgttggtaaccatctctatgttgccaatgttggagattcgagggctgtgatatcaaaagctggaaaagcaatccctctttctgaggatcataaaccaaatagaagtgacgagcgaaaaagaattgaaaatgctggaggtgttgtgatgtgggcaggaacttggagggtgggaggagtcttagcaatgtctcgtgcttttggtaaccgcatgctgaagcaatatgttgtggcagaacccgagatccaggatcaagaggttgatgaagaacttgaattacttgtgcttgctagtgatggactctgggacgttgtacctaacgaggatgccattgcacttgctcgaacagaagaagaacccgaggcaggggcccggaaattgacggagactgcttttacccgggggagtgccgacaacataacctgcatcgtggtcaggttccaccatgagaaggttgatcccgatccacctaacatggagcaggcttag

SEQ ID NO: 141186 - protein, 351 aa, Vitis vinifera
MVCSGCIRNVIVQAGHIGQSAVRSVRLRAIYRSLNANIGLRYTWNRQFRGSVKMMVDTAKGEPIINVLPEKEDDGGYASGGWKSEDGKLSCGYSSFRGKRASMEDFYDVKMSKIDGQTVCLFGIFDGHGGSRAAEFLKEHLFENLMKHPEFMTNTKLAISETYQQTDMNFLDAERDTYRDDGSTASTAVLVGNHLYVANVGDSRAVISKAGKAIPLSEDHKPNRSDERKRIENAGGVVMWAGTWRVGGVLAMSRAFGNRMLKQYVVAEPEIQDQEVDEELELLVLASDGLWDVVPNEDAIALARTEEEPEAGARKLTETAFTRGSADNITCIVVRFHHEKVDPDPPNMEQA

SEQ ID NO: 141187 - DNA, 831 bp, Vitis vinifera
  CDS (1)..(831)
atgtatttttttcttcttcagcatggaggacgaggttccagtagctctggtaagggcagaagccctcaaggcccaataaaatatggatttagcctagtaaaagggaaggcgaatcatcctatggaggattatcatgttgctaagtttcatcataccaaaggacatgagcttggactatttgctatttatgatggccatatgggagatagcgtgccagcctacctacagaagcatttgttttccaatattttaaaggaggagaatttctggactgatcctcatggttccatttcaaaagcctacgagaggactgaccaggcaattctttctcatagtcgagacttggggcgaggtggatctactgctgttactgcaattcttataaatggccgaaagttattaatcgcaaatgttggtgattcaagagcagttctctcaagagggggtcaagcaatacaaatgacgattgatcatgagcccaacagagagcgaggcagtattgagaacaaaggtggatttgtctcgaatataccaggagatgtcccaagagttaatggccagttggcagtgtctcgtgcttttggagacaagagcctgaaatcacacctacgatcagatccagacatacgacatactgatattgatcccaattgtgagattcttattcttgcaagtgatggtttatggaaggtcatggataatcaagaggcagttgacattgcaagaaagatcaaggatccacagaaagctgctaagcacctaacggctgaagcattacgtagagaaagtaaagatgatatatcttgtgttgttgtccggttcaagggttag

SEQ ID NO: 141188 - protein, 276 aa, Vitis vinifera
MYFFLLQHGGRGSSSSGKGRSPQGPIKYGFSLVKGKANHPMEDYHVAKFHHTKGHELGLFAIYDGHMGDSVPAYLQKHLFSNILKEENFWTDPHGSISKAYERTDQAILSHSRDLGRGGSTAVTAILINGRKLLIANVGDSRAVLSRGGQAIQMTIDHEPNRERGSIENKGGFVSNIPGDVPRVNGQLAVSRAFGDKSLKSHLRSDPDIRHTDIDPNCEILILASDGLWKVMDNQEAVDIARKIKDPQKAAKHLTAEALRRESKDDISCVVVRFKG

SEQ ID NO: 141189 - DNA, 807 bp, Arabidopsis thaliana
  CDS (1)..(807)
atgtggaagaacatcacccacggttttcactgtgtgaagggcaagtccagccatccgatggaggactatgtagtgtctgaattcaagaaacttgaaggtcatgaattgggtttgtttgctatctttgatggtcacttggggcatgatgtggctaaatacttgcagactaatctctttgacaacattcttaaagagaaggatttttggactgacacagagaatgctataaggaatgcctacagatcaacagatgccgtgatattgcagcagtcccttaagcttggtaaaggcggatcaacagctgtaacgggaattctaattgatggtaaaaagctagttgttgctaatgttggagactccagagcagtgatgtctaagaatggtgttgcgcatcagctatctgtcgatcatgaaccaagcaaggagaaaaaagaaatagagagccgaggtggctttgtgtcaaatattccaggggatgttccacgagtggatggacagttagcggttgcaagagcatttggagataagagcttaaagttacatctgagctcagaaccggacataacacaccagacaattgatgatcacactgaattcatccttttcgcaagcgatggtatttggaaagtaagtttaatgactcagtatcttactctgtttctaaccgtggtattatcaaaccaagaagcggttgatgctatcaagagtatcaaagatcctcatgcagctgcaaagcacttgatagaggaagctatatctaggaagagcaaagatgacatctcatgtatcgttgtaaagttccactaa

SEQ ID NO: 141190 - protein, 268 aa, Arabidopsis thaliana
MWKNITHGFHCVKGKSSHPMEDYVVSEFKKLEGHELGLFAIFDGHLGHDVAKYLQTNLFDNILKEKDFWTDTENAIRNAYRSTDAVILQQSLKLGKGGSTAVTGILIDGKKLVVANVGDSRAVMSKNGVAHQLSVDHEPSKEKKEIESRGGFVSNIPGDVPRVDGQLAVARAFGDKSLKLHLSSEPDITHQTIDDHTEFILFASDGIWKVSLMTQYLTLFLTVVLSNQEAVDAIKSIKDPHAAAKHLIEEAISRKSKDDISCIVVKFH

SEQ ID NO: 141191 - DNA, 954 bp, Oryza sativa
  CDS (1)..(954)
atggagcggcagtcggcgtcgtcgtcggcgtcatgctccccctcctcctccgccgccggcacctcctcctcgtcttcggcctgcgggggcaagaagcggcccgacatactcaacatgatccggagtgcaacatgccttaattcgtcatctaccgataccggcaaggggaggagtaagcagtcaagcaacaaagtgactcatggattccacttggtggaagggaaatctgggcatgacatggaggactaccatgtggcagagtacaagtatgacaagagccatgagcttggtctctttgccatttttgatggtcacttgggagacagtgttccaagttacttgaaagctaaccttttctgcaacatactgaaagagcctatcttctggactaaccctcaggaagcaattaagaatgcataccgctctacaaacaaatatattttggagaatgccaaacaacttggacctggtggttcaacagcagttactgctattgtcgttgatggaaaggatatgtgggtagcaaatgtaggtgattcaagagctgttgtgtgtgaaagaggtgctgctaatcagctcactgttgaccatgaacctcatacaactaatgaaaggcagaggattgagaagcagggtggctttgtaacaacatttcctggtgatgttccccgggtaaatggtcagcttgctgttgcgagggcctttggggaccaaagcctcaaggcgcacttgagttcagaacctgatgttaggcatgtaccaataaattcaagcatagagttcgtcatacttgccagcgatggactatggaaggtaatgaagaaccaggaagccgtcgatcttgtgaagtcgatcaaggacccccaggcagcagcgaagcgactgacgaccgaagcgcttgcgaggaagagcaaggacgacatctcctgcatcgtcatccgattccgctgctga

SEQ ID NO: 141192 - protein, 317 aa, Oryza sativa
MERQSASSSASCSPSSSAAGTSSSSSACGGKKRPDILNMIRSATCLNSSSTDTGKGRSKQSSNKVTHGFHLVEGKSGHDMEDYHVAEYKYDKSHELGLFAIFDGHLGDSVPSYLKANLFCNILKEPIFWTNPQEAIKNAYRSTNKYILENAKQLGPGGSTAVTAIVVDGKDMWVANVGDSRAVVCERGAANQLTVDHEPHTTNERQRIEKQGGFVTTFPGDVPRVNGQLAVARAFGDQSLKAHLSSEPDVRHVPINSSIEFVILASDGLWKVMKNQEAVDLVKSIKDPQAAAKRLTTEALARKSKDDISCIVIRFRC

SEQ ID NO: 141193 - DNA, 1323 bp, Oryza sativa subsp
  CDS (1)..(1323)
atgcggcgccaccacctcctcggcctcctccgccgcgccgcggcttcgtcgacgtccgccgcctccagccgcgcgggcccacaccccagtctccatgcccctggcccgctgcggaatggcggctccgccccccgcttcttctcctcgcgcggcggcgccggagctgcttcgaagggcctgggcgacgacgaggtcgagctctactcgctcctcctcggcgtcagcatcggcgacgaaggcgaggcatcctcacgcggaccggctgcctcgaggggaggccggagggggcggaactcgaagcggcagccgccgaggtcgagatttgacggcgatggagttggctgtagtaaggatggtaaattgagctggggatattcaagtttccaggggaggaggccttctatggaggatcgcttgagcataaagtcaaccacggtcaacggagaaacagtcagcttatttggtgtatttgatggtcatggaggaccacgtgctgctgaatatctgaagaaacatctatttaaaaacctcgtgaagcatcctaagttcctgaaagacacaaagctcgctataaaccaaacgtttctgaaaactgacgctgatttcctacagtcgatatcttctgatcgttatagggatgatggttcaacagcagtggctgccattttgattggcaaccgcctatatgtagctaatgttggtgattcacgtgccgttgctctaaaagccggaaaagctgtcccactgtctgaagatcacaaacctaacaaaaaagatgagcgaaagagaattgaggatgctggaggcattgttgtttcagatgatatatggagggttgatggaattctggcagtgtcccgtgcatttggcaatcgtttaatgaagcgctatgttaaagcagaaccaaacattcaggaaaaagtggtcgatgaaggcttggaatacctggttcttgctactgatgggctttgggatgtcatgcgaaatgagaacaaggacgctgtttctcttttgaaagcacaagatggtcctaaagcggcagccatgaagctcacggaagtcgcccgctctcggcttaccttagataatgtcacatgcattgtgctgcagtttcaccatggaaaatcaaccaacagcaaggatatgacaatgcacatgaccaaaatgattcccatggatatggttgtaaacaggtaccgaaggttattcggcccatttctttacatgtcgacaccgttgttgattgcttccgtgcttagccctttcattgttcacaatcgtcttctctcacttcaaactagtctgagagagagctcgaggtaa

SEQ ID NO: 141194 - protein, 440 aa, Oryza sativa subsp
MRRHHLLGLLRRAAASSTSAASSRAGPHPSLHAPGPLRNGGSAPRFFSSRGGAGAASKGLGDDEVELYSLLLGVSIGDEGEASSRGPAASRGGRRGRNSKRQPPRSRFDGDGVGCSKDGKLSWGYSSFQGRRPSMEDRLSIKSTTVNGETVSLFGVFDGHGGPRAAEYLKKHLFKNLVKHPKFLKDTKLAINQTFLKTDADFLQSISSDRYRDDGSTAVAAILIGNRLYVANVGDSRAVALKAGKAVPLSEDHKPNKKDERKRIEDAGGIVVSDDIWRVDGILAVSRAFGNRLMKRYVKAEPNIQEKVVDEGLEYLVLATDGLWDVMRNENKDAVSLLKAQDGPKAAAMKLTEVARSRLTLDNVTCIVLQFHHGKSTNSKDMTMHMTKMIPMDMVVNRYRRLFGPFLYMSTPLLIASVLSPFIVHNRLLSLQTSLRESSR

SEQ ID NO: 141195 - DNA, 840 bp, Arabidopsis thaliana
  CDS (1)..(840)
atggcaggcagagagattctccataagatgaaggttggattatgcggatctgacacaggcagaggtaaaaccaaggtgtggaagaacatcgcacacggttatgactttgtgaaagacaaagcgggccatccgatggaggactatgttgtgtctgagttcaagaaagtagacggccatgatttgggtttgtttgctatctttgatggtcacttagggcatgatgtagccaagtacttgcaaaccaatctctttgataacatactcaaagagaaggatttttggactgatacgaaaaacgctataaggaatgcatacatatcaaccgatgctgtgatattagagcagtcacttaaacttggcaaaggtggatcaacggctgtaacaggcattctgatagatgggaaaacgctagtgattgctaacgttggagactcacgtgcagtgatgtcaaagaacggtgttgcttctcaactctctgttgatcatgaaccaagcaaggaacaaaaggaaatagaaagccgtggtggctttgtatcaaatattccaggggatgttccaagagttgatggacaactagcggttgctagggcgtttggagataagagcttaaagatacatctgagctcagatccagacataagagacgagaatatcgatcatgagactgagtttatccttttcgcaagtgatggagtttggaaggtgatgtcgaaccaagaagcggtggatttgatcaaaagcataaaagatccacaagcggcagccaaggagttgatagaagaagcagtctctaagcaaagcacagacgacatttcttgtatagttgtaaggttccagtga

SEQ ID NO: 141196 - protein, 279 aa, Arabidopsis thaliana
MAGREILHKMKVGLCGSDTGRGKTKVWKNIAHGYDFVKDKAGHPMEDYVVSEFKKVDGHDLGLFAIFDGHLGHDVAKYLQTNLFDNILKEKDFWTDTKNAIRNAYISTDAVILEQSLKLGKGGSTAVTGILIDGKTLVIANVGDSRAVMSKNGVASQLSVDHEPSKEQKEIESRGGFVSNIPGDVPRVDGQLAVARAFGDKSLKIHLSSDPDIRDENIDHETEFILFASDGVWKVMSNQEAVDLIKSIKDPQAAAKELIEEAVSKQSTDDISCIVVRFQ

SEQ ID NO: 141197 - DNA, 873 bp, Zea mays; identical to SEQ ID NO: 1412
  CDS (1)..(873)

SEQ ID NO: 141198 - protein, 290 aa, Zea mays; identical to SEQ ID NO: 1413

SEQ ID NO: 141199 - DNA, 1071 bp, Oryza sativa subsp; identical to SEQ ID NO: 938
  CDS (1)..(1071)

SEQ ID NO: 141200 - protein, 356 aa, Oryza sativa subsp; identical to SEQ ID NO: 939

SEQ ID NO: 141201 - DNA, 1584 bp, Neurospora crassa
  CDS (1)..(1584)
atgttcggcggcggttccagctccgccgcctccaagtccgtgagcgggtcagcttcagattcgggcagcagtggaaaggacaggtcgagcagcaagtcgccctcccccgagaaggaggcgccgggcaatggaggcgcgtctcccaaatccatcaagtccgccgatcagtccaccgccggcgacacccaaatcggcaacgggagtccaccgagcgctggtagctcgtccgatagcaagaagaagcggagcagtggggtgagcggcagagccagcagcctgattgcccaagccaaaaatactctgtttactcaagttgcgaaccgtaacagcggtgatatgagtactgactccaagaactctaatcagacttccttgcaaaagctcggcaagcaagatcaggcccttgctgttcctcaaggccagcacaacaatgccgccggtgaatcactccccgggccgcgctccacgttcaaggttggtgtctgggaggaccgcaacaagaagtgcagacgtactatggaagacacacatgctttcctctacaactttctccatactcctgcccctacggacaatggctactttgccattttcgatggccatgccggcacctttgctgctgactggtgcggcaagaagctccacataatccttgaggatatcatcaagaagaacccgaatgctcctataccggaactccttgatcaaacgtttaccactgtggacaccgagctagaagcgcttccgctcaaaaatagtggctgcacggctgccgttgcgtctgccacaagacagagggtgctttatacagccaatgtgggagatgctcgcatcgtcttgtgtcgctctggcaaggcgttgcgcctgtcatatgaccacaaaggcagcgatgaaaatgagggcaagcgtatagcaaacgctggaggtctgatcctgaacaaccgcgtgaacggagtccttgctgtcacccgagctcttggcgatacttatatcaaagacctcgtcactggtcatccttacaccacggagacggttatccaaccggattgggacgagttcatgattattgcttgcgatgggctttgggacgtttgctcggatcaggaagcagtcgaccttgtgcgcgatatccaggaaccggtgattgcggccaagaaactggtcgatcatgctctgtctcgtttcagcaccgataacctctcatgtatgattgtccggtttgacaaacaagccttgcttgaaaaccaaaacaacaaagatagtgccattggcgtcgagggcgatgcgactacggctgcgggcacggttaccgagtcggagaagattgtcacggcaactaagcagaagattgcggagggtagcacaccggcggttgggatatctgcgagcaactttggtcgcggtcacgaccccacacccctcgaggacggagagaagaagccatttgtccctaccaccatcgaaggttctgtggaagaagagccagttgtcctcagtgactctccagaggcgactccggacggttccgtgacggcaatgaagttagattcgctgcctgaagcgaagaagtctttggacgcatag

SEQ ID NO: 141202 - protein, 527 aa, Neurospora crassa
MFGGGSSSAASKSVSGSASDSGSSGKDRSSSKSPSPEKEAPGNGGASPKSIKSADQSTAGDTQIGNGSPPSAGSSSDSKKKRSSGVSGRASSLIAQAKNTLFTQVANRNSGDMSTDSKNSNQTSLQKLGKQDQALAVPQGQHNNAAGESLPGPRSTFKVGVWEDRNKKCRRTMEDTHAFLYNFLHTPAPTDNGYFAIFDGHAGTFAADWCGKKLHIILEDIIKKNPNAPIPELLDQTFTTVDTELEALPLKNSGCTAAVASATRQRVLYTANVGDARIVLCRSGKALRLSYDHKGSDENEGKRIANAGGLILNNRVNGVLAVTRALGDTYIKDLVTGHPYTTETVIQPDWDEFMIIACDGLWDVCSDQEAVDLVRDIQEPVIAAKKLVDHALSRFSTDNLSCMIVRFDKQALLENQNNKDSAIGVEGDATTAAGTVTESEKIVTATKQKIAEGSTPAVGISASNFGRGHDPTPLEDGEKKPFVPTTIEGSVEEEPVVLSDSPEATPDGSVTAMKLDSLPEAKKSLDA

SEQ ID NO: 141203 - DNA, 849 bp, Solanum lycopersicum
  CDS (1)..(849)
atgactggaggcaaagaaatcatcgacaaaattaaggaaaaggttggtttaagttcgtcagataccggaagaggtaagagtaagatgtcgaagaacataacccatgggtatcacatggttgagggaaaatcgcatcacaccatggaagattatgtttttgcacagtttaaacaagttgatgaaaatgaacttggtctatttgcaatatttgatggccatttgagccacgagattcctgagtacctccgctctcatctattcaacaatattctcaatgagcctaacttctgggctgaaccggagtctgcaatcaggaaagcctaccgtataacagatacaactattttggataaggctgctgatttgggtaaaggaggatccactgctgttacagccatattgattaatggtcagaaactagttgttgctaatgtcggagattctcgtgccgtcatttacaaaaatggagtggccaagcagctgtccatcgatcatgagcctggcagggagagggagatcatcgagggcaaaggtggtttcgtgtccaattttccaggtgatgttcctcgggttgatgggcagttagcagtagcaagagcatttggcgacaagagcttgaagatgcatttaagttcagagccagatgtagtggtagagctcatagatgatgacacagagtttctcattttggctagtgacggcgtatggaaggtactgtcgaatcaggaagctgcagattgcattaaagatattaaggatgcgcgatcagctgcaaagcatctcaatgaacatgctcttgcaaggggaagtaccgatgatatatcctgcgtagttgtaaggttccaataa

SEQ ID NO: 141204 - protein, 282 aa, Solanum lycopersicum
MTGGKEIIDKIKEKVGLSSSDTGRGKSKMSKNITHGYHMVEGKSHHTMEDYVFAQFKQVDENELGLFAIFDGHLSHEIPEYLRSHLFNNILNEPNFWAEPESAIRKAYRITDTTILDKAADLGKGGSTAVTAILINGQKLVVANVGDSRAVIYKNGVAKQLSIDHEPGREREIIEGKGGFVSNFPGDVPRVDGQLAVARAFGDKSLKMHLSSEPDVVVELIDDDTEFLILASDGVWKVLSNQEAADCIKDIKDARSAAKHLNEHALARGSTDDISCVVVRFQ

SEQ ID NO: 141205 - DNA, 1317 bp, Trichoderma reesei; identical to SEQ ID NO: 942
  CDS (1)..(1317)

SEQ ID NO: 141206 - protein, 438 aa, Trichoderma reesei; identical to SEQ ID NO: 943

SEQ ID NO: 141207 - DNA, 888 bp, Oryza sativa subsp
  CDS (1)..(888)
atggctggcaaggaaatctaccacaagatgaaggacaaggtgaaagatgcttttagttcgtcaggaccagaaacagggaaaggaaaaacaaaattgtcaggcaagcgtgtcaagcatggttaccatcttgtgaagggaaaatcaaatcatccgatggaggactatctagtggcagagtacaggcaagaaggagagcatgatctggggctgtttgcaatatttgatgggcatttgggccacactgttccagacttcctgcgctcacatctctttgataatatcttaaagcagccagaattcttgagcaacccacaagctgcaattcgaaatgcatatcaacttacggatgcaaaaatattggaaagcgcagctgagttgggcagaggaggctccactgctgttactgccatattaataagcagtgaaaattctgtgaacctagtagttgcaaatgttggagattcacgagcagttattagcaagagtggtgtagcaaaacagctttcggttgatcatgaaccaaacaaggagcggcattcaatcgagaaaaaaggtggctttgtttcaaacttaccaggagatgtaccgcgtgttgatggtcagcttgcggttgcaagggcatttggagaccggagcctaaagaagcacctcagctcagagccagatgtggtggaggaacctatagacgagaatactgattttctaattcttgcaagtgatggattatggaagatcatacatatccaggtgatgtccaaccaagaggcggtggatgaaatcaaggacttcaaggatgctcaggcagctgcgaagcatctgacggagcaggccgtgaaccggaaaagcaaagacgacatctcctgcatcgttgtaaaattcctctgctag

SEQ ID NO: 141208 - protein, 295 aa, Oryza sativa subsp
MAGKEIYHKMKDKVKDAFSSSGPETGKGKTKLSGKRVKHGYHLVKGKSNHPMEDYLVAEYRQEGEHDLGLFAIFDGHLGHTVPDFLRSHLFDNILKQPEFLSNPQAAIRNAYQLTDAKILESAAELGRGGSTAVTAILISSENSVNLVVANVGDSRAVISKSGVAKQLSVDHEPNKERHSIEKKGGFVSNLPGDVPRVDGQLAVARAFGDRSLKKHLSSEPDVVEEPIDENTDFLILASDGLWKIIHIQVMSNQEAVDEIKDFKDAQAAAKHLTEQAVNRKSKDDISCIVVKFLC

SEQ ID NO: 141209 - DNA, 870 bp, Arabidopsis thaliana
  CDS (1)..(870)
atgaccggtagagaaatcctccacaagatgaaggaatccgtcaaggagaaagttgggcttggtgcatctgcttcatctgcagattcagggaaaggtaagagcaagatgttgaagcagatcacacatggttttcatttggtgaaagggaaagcttttcacgagatcgaagattatgtggttgccaaattcaaggaagttgatgataatgagcttggtctgtttgctatcttcgatggccatcttagccacgagattccggactacttgtgctcccatttgtttgagaacatcttgaaagagccgaatttctggcaagaacctgagaaagcgataaagaaagcttactatataacggatacaacgattctagacaaggcagatgatttgggaaaaggaggttctactgctgtgactgcgatattgatcaattgccagaagctggtggttgctaatgttggtgactctcgagctgttatttgccaaaatggtgttgcgaagccactctcagttgatcatgagccgaacatggagaaggatgaaatcgagaacagaggaggattcgtttctaactttcctggggatgttcctcgagttgatggtcaactggctgtggcaagggcatttggtgataagagtttaaagatgcatttgagttcagaaccatatgttacggtggagataattgatgatgatgcagaatttcttatcctagcaagtgatggactatggaaggtcatgtcaaaccaagaagccgttgactcaatcaagggaataaaagatgcgaaggctgcagcaaagcaccttgcagaggaggctgttgcaaggaaaagctcagacgatatctcagtcgtcgtcgtgaaatttcagtga

SEQ ID NO: 141210 - protein, 289 aa, Arabidopsis thaliana
MTGREILHKMKESVKEKVGLGASASSADSGKGKSKMLKQITHGFHLVKGKAFHEIEDYVVAKFKEVDDNELGLFAIFDGHLSHEIPDYLCSHLFENILKEPNFWQEPEKAIKKAYYITDTTILDKADDLGKGGSTAVTAILINCQKLVVANVGDSRAVICQNGVAKPLSVDHEPNMEKDEIENRGGFVSNFPGDVPRVDGQLAVARAFGDKSLKMHLSSEPYVTVEIIDDDAEFLILASDGLWKVMSNQEAVDSIKGIKDAKAAAKHLAEEAVARKSSDDISVVVVKFQ

SEQ ID NO: 141211 - DNA, 843 bp, Arabidopsis thaliana
  CDS (1)..(843)
atgggaaaattttgttgcttcacttccgcttctgaggttgtgggaggacaatcatcatcacgatcaggtaaaggaagaagtgatgaagggatgatcaagtatggttttagtctagtgaaaggaaaagctaaccatccaatggaagattatcatgttgctaactttatcaacatccaagaccatgaattgggtctttttgctatttatgatggtcatatgggtgatagtgtccctgcttacttgcagaaacgtctcttctccaatatccttaaggagggagagttttgggttgatcctcgaaggtctattgcaaaagcttatgagaagacggaagcgattctatcgaatagttctgacttgggtcgtggtggttctactgctgtgactgctatattgattaatgggagaaagttgtggatagctaatgttggtgattcacgagctgttctttctcatggtggcgctataacgcagatgagtacagatcatgagcctcgtactgaaaggtcgagtattgaagatagaggtggatttgtatccaatctaccaggtgatgttcctcgggtgaatggtcaattagctgtgtctcgtgcttttggagataagggacttaagacacacttgagttcagagcctgacataaaagaagctactgtagatagccagacagatgttcttctcttggctagtgatggcatctggaaggtgatgacaaatgaagaggcaatggagatagcgagaagagtgaaagatccacagaaagcggcaaaggaattaacagctgaagcattgagaagagagagtaaagacgacatatcttgtgtcgtggtccgattcagatga

SEQ ID NO: 141212 - protein, 280 aa, Arabidopsis thaliana
MGKFCCFTSASEVVGGQSSSRSGKGRSDEGMIKYGFSLVKGKANHPMEDYHVANFINIQDHELGLFAIYDGHMGDSVPAYLQKRLFSNILKEGEFWVDPRRSIAKAYEKTEAILSNSSDLGRGGSTAVTAILINGRKLWIANVGDSRAVLSHGGAITQMSTDHEPRTERSSIEDRGGFVSNLPGDVPRVNGQLAVSRAFGDKGLKTHLSSEPDIKEATVDSQTDVLLLASDGIWKVMTNEEAMEIARRVKDPQKAAKELTAEALRRESKDDISCVVVRFR

SEQ ID NO: 141213 - DNA, 732 bp, Oryza sativa subsp
  CDS (1)..(732)
atggaagacttttacgagacaagaattgactctgttgatgggcagattattggtctttttggagtttttgatggtcatggtggtgctaaagtagctgagtatgttaaacagaatctcttcagtcatcttctaaggcatccaaagttcatcagtgacaccaaagtggcaatagatgatgcttataaaagtaccgacagtgaattcttagaatctgacagcagtcaaaaccagtgtggatcaactgcatcaaccgctgtccttgttggtgaccgtctctttgttgcaaacgttggagactctagggctatcatatgcagggggggaaatgctatagctgtttcaaaagatcacaagcctgatcagacagatgagcgacaacgtatcgaagatgctggaggttttgtaatgtgggcaggaacatggcgtgttggtggtgtgcttgctgtttctcgcgcttttggtgacaaactcttaaagcagtatgtagttgtggatcctgagattcgggaggaagttattgatcactctctcgagttcctcattcttgcaagtgatgggctgtgggatgtagtaaccaatgaggaggctgtcgacatgaccagatcgattcatgacccagaagaagctgcaaagaagctcttgcaagaggcctacaagagggagagcagtgacaacataacttgtgttgtcgtgcgcttcttgcatgggcaagggagtagtggatatgcttaa

SEQ ID NO: 141214 - protein, 243 aa, Oryza sativa subsp
MEDFYETRIDSVDGQIIGLFGVFDGHGGAKVAEYVKQNLFSHLLRHPKFISDTKVAIDDAYKSTDSEFLESDSSQNQCGSTASTAVLVGDRLFVANVGDSRAIICRGGNAIAVSKDHKPDQTDERQRIEDAGGFVMWAGTWRVGGVLAVSRAFGDKLLKQYVVVDPEIREEVIDHSLEFLILASDGLWDVVTNEEAVDMTRSIHDPEEAAKKLLQEAYKRESSDNITCVVVRFLHGQGSSGYA

SEQ ID NO: 141215 - DNA, 1263 bp, Arabidopsis thaliana
  CDS (1)..(1263)
atggtatgcagcagtttcataaggagtttcattgttcaagctggttgtcgtattggggtgttggctcaaggaagacatcagtttattcatattaagaagactttgagtgtgggttttggatttagaactagtgtgattggatttagaacaaccagtggaattggatttagaactagtgcgaagatgatggttgatacttctgctggagagaaacgtatatccttagttgatatgccgcctgagaaagttgatgatggtggatacatcggtggtgggtggaaaaatgatgatggaagcttgagctgtgggtactgtagtttcagagggaaaagatctacgatggaagatttctatgatatcaaagcttccactattgaaggccaagcagtttgcatgtttggaatatttgatggccatggtggttcacgtgctgctgaatacctgaaggaacacctgtttaacaatctcatgaagcatccacaatttttgacagacaccaagctggcattaaatgaaacatataaacaaactgatgtagcattcctcgagtccgaaaaggatacttacagagatgatggctccacagcatctgctgctgtgttggtggggaaccatttgtatgttgcaaatgttggagactcgaggacaatagtttctaaagctgggaaagcgatcgcgctatctgatgaccataagccaaatagaagcgatgaaagaaagcgaattgaaagtgctggtggtgttatcatgtgggcaggaacatggagagtaggtggggtgttggctatgtcccgggccttaggtaacagaatgctgaagcaattcgttgttgctgaacccgagatacaagatctagagatagatcatgaggccgagttgcttgtgcttgcaagtgacggtttatgggatgtggtaccaaatgaggatgcggtagcccttgctcagagcgaggaagagcccgaagcagctgcccgcaagttaactgacactgccttcagccgtggcagtgcagacaacatcacgtgcattgttgttaaattccgtcatgataagacagaatctcctaaaatcgaaacaaacgccatggctgaatcggaacctgaactgaaccccacaactgaactggaacctgaatcaaaccccagtactgcattggaaactgaatcaatccccaaagctgaactggaatccgaacctgatgctatacctgatccaaaacctgaaaccgaaccagagaccaagggtgagaaagctggtgagtaa

SEQ ID NO: 141216 - protein, 420 aa, Arabidopsis thaliana
MVCSSFIRSFIVQAGCRIGVLAQGRHQFIHIKKTLSVGFGFRTSVIGFRTTSGIGFRTSAKMMVDTSAGEKRISLVDMPPEKVDDGGYIGGGWKNDDGSLSCGYCSFRGKRSTMEDFYDIKASTIEGQAVCMFGIFDGHGGSRAAEYLKEHLFNNLMKHPQFLTDTKLALNETYKQTDVAFLESEKDTYRDDGSTASAAVLVGNHLYVANVGDSRTIVSKAGKAIALSDDHKPNRSDERKRIESAGGVIMWAGTWRVGGVLAMSRALGNRMLKQFVVAEPEIQDLEIDHEAELLVLASDGLWDVVPNEDAVALAQSEEEPEAAARKLTDTAFSRGSADNITCIVVKFRHDKTESPKIETNAMAESEPELNPTTELEPESNPSTALETESIPKAELESEPDAIPDPKPETEPETKGEKAGE

SEQ ID NO: 141217 - DNA, 852 bp, Arabidopsis thaliana
  CDS (1)..(852)
atgcccaagatctgctgctctcgttccgctacacaagttgtggtagcacaaaaatcaaactcgggtaaaggaagaaacggtgaaggaggaatcaagtatggatttagtttgataaaagggaaatctaaccattcaatggaggattatcatgttgctaagtttaccaatttcaatggcaatgaattggggctttttgcaatctttgatggtcataaaggtgatcatgttgctgcttatctgcagaaacatctcttctctaatatccttaaagatggagagttcttggttgatcctcgaagagcaattgcgaaagcttatgagaatacagatcaaaagattttagcagataatagaacggatttagagagtggtggttcgactgctgtgactgcgattttgatcaatgggaaagctttgtggatagctaatgttggtgattcacgagctattgtttctagtcgaggtaaagcaaaacagatgagtgttgatcatgatcctgatgatgatactgagaggagtatgattgagagtaaaggtggatttgtgaccaacagaccaggtgacgttcctcgagtgaacggtttgttagcgatctctagtgtctttggagataaaaaccttaaagcatatttgaactcagagcctgagattaaggacgtaaccattgatagtcacacagattttattattatggctagtgacggtatttcgaaggtgatgtcaaaccaagaagcagttgatgtagctaagaagttgaaagatccaaaggaagcggcgaggcaagtagttgctgaagcattgaaaagaaacagcaaggatgacatatcttgcattgttgtccggtttagatga

SEQ ID NO: 141218 - protein, 283 aa, Arabidopsis thaliana
MPKICCSRSATQVVVAQKSNSGKGRNGEGGIKYGFSLIKGKSNHSMEDYHVAKFTNFNGNELGLFAIFDGHKGDHVAAYLQKHLFSNILKDGEFLVDPRRAIAKAYENTDQKILADNRTDLESGGSTAVTAILINGKALWIANVGDSRAIVSSRGKAKQMSVDHDPDDDTERSMIESKGGFVTNRPGDVPRVNGLLAISSVFGDKNLKAYLNSEPEIKDVTIDSHTDFIIMASDGISKVMSNQEAVDVAKKLKDPKEAARQVVAEALKRNSKDDISCIVVRFR

SEQ ID NO: 141219 - DNA, 717 bp, Arabidopsis thaliana
  CDS (1)..(717)
atggaggattatcatgttgctaagtttaccaatttcaatggcaatgaattggggctttttgcaatctttgatggtcataaaggtgatcatgttgctgcttatctgcagaaacatctcttctctaatatccttaaagatggagagttcttggttgatcctcgaagagcaattgcgaaagcttatgagaatacagatcaaaagattttagcagataatagaacggatttagagagtggtggttcgactgctgtgactgcgattttgatcaatgggaaagctttgtggatagctaatgttggtgattcacgagctattgtttctagtcgaggtaaagcaaaacagatgagtgttgatcatgatcctgatgatgatactgagaggagtatgattgagagtaaaggtggatttgtgaccaacagaccaggtgatgttcctcgagtgaacggtttgttagcggtctctcgtgtctttggagataaaaaccttaaagcatatttgaactcagagcctgagattaaggacgtaaccattgatagtcacacagattttcttattctggctagtgacggtatttcgaaggtgatgtcaaaccaagaagcagttgatgtagctaagaagttgaaagatccaaaggaagcggcgaggcaagtagttgctgaagcattgaaaagaaacagcaaggatgacatatcttgcattgttgtccggtttagatga

SEQ ID NO: 141220 - protein, 238 aa, Arabidopsis thaliana
MEDYHVAKFTNFNGNELGLFAIFDGHKGDHVAAYLQKHLFSNILKDGEFLVDPRRAIAKAYENTDQKILADNRTDLESGGSTAVTAILINGKALWIANVGDSRAIVSSRGKAKQMSVDHDPDDDTERSMIESKGGFVTNRPGDVPRVNGLLAVSRVFGDKNLKAYLNSEPEIKDVTIDSHTDFLILASDGISKVMSNQEAVDVAKKLKDPKEAARQVVAEALKRNSKDDISCIVVRFR

SEQ ID NO: 141221 - DNA, 924 bp, Arabidopsis thaliana
  CDS (1)..(924)
atggaagatttctatgatatcaaagcttccactattgaaggccaagcagtttgcatgtttggaatatttgatggccatggtggttcacgtgctgctgaatacctgaaggaacacctgtttaacaatctcatgaagcatccacaatttttgacagacaccaagctggcattaaatgaaacatataaacaaactgatgtagcattcctcgagtccgaaaaggatacttacagagatgatggctccacagcatctgctgctgtgttggtggggaaccatttgtatgttgcaaatgttggagactcgaggacaatagtttctaaagctgggaaagcgatcgcgctatctgatgaccataagccaaatagaagcgatgaaagaaagcgaattgaaagtgctggtggtgttatcatgtgggcaggaacatggagagtaggtggggtgttggctatgtcccgggcctttggtaacagaatgctgaagcaattcgttgttgctgaacccgagatacaagatctagagatagatcatgaggccgagttgcttgtgcttgcaagtgacggtttatgggatgtggtaccaaatgaggatgcggtagcccttgctcagagcgaggaagagcccgaagcagctgcccgcaagttaactgacactgccttcagccgtggcagtgcagacaacatcacgtgcattgttgttaaattccgtcatgataagacagaatctcctaaaatcgaaacaaacgccatggctgaatcggaacctgaactgaaccccacaactgaactggaacctgaatcaaaccccagtactgcattggaaactgaatcaatccccaaagctgaactggaatccgaacctgatgctatacctgatccaaaacctgaaaccgaaccagagaccaagggtgagaaagctggtgagtaa

SEQ ID NO: 141222 - protein, 307 aa, Arabidopsis thaliana
MEDFYDIKASTIEGQAVCMFGIFDGHGGSRAAEYLKEHLFNNLMKHPQFLTDTKLALNETYKQTDVAFLESEKDTYRDDGSTASAAVLVGNHLYVANVGDSRTIVSKAGKAIALSDDHKPNRSDERKRIESAGGVIMWAGTWRVGGVLAMSRAFGNRMLKQFVVAEPEIQDLEIDHEAELLVLASDGLWDVVPNEDAVALAQSEEEPEAAARKLTDTAFSRGSADNITCIVVKFRHDKTESPKIETNAMAESEPELNPTTELEPESNPSTALETESIPKAELESEPDAIPDPKPETEPETKGEKAGE

SEQ ID NO: 141223 - DNA, 1047 bp, Arabidopsis thaliana
  CDS (1)..(1047)
atgggatacttggacttggccttgtcgtattccaaccagccgcagactgttgaagctccagcgagcggaggaggtctcagccagaatggaaaatttagctatggatatgcaagctccgctggcaagagatcatctatggaagacttttttgaaactaggatcgacggtatcaatggagaaatagttggtctatttggagtttttgatggccatggtggagccagagcagctgagtacgtgaagcgccatcttttcagtaatctgatcacccacccaaagtttatctctgacaccaaatcagctataactgatgcttataaccatacagactccgaacttctcaagtcagaaaatagtcacaatagagacgctggttctactgcgtctacagctattcttgttggtgaccgtttagttgttgcaaatgttggtgattctagagctgttatcagcagaggcggaaaagccattgctgtgtcaagggaccataaaccggaccaaagtgatgaacgtgaaaggattgagaatgctggtggatttgtgatgtgggcaggagttcttgcagtttctcgtgcgtttggtgatcggcttctgaagcaatatgttgttgctgatccagaaatccaggaagaaaagattgatgatactcttgagtttttgattctagcaagtgatggactgtgggatgttttctctaatgaggcagcagttgcaatggtaaaggaagttgaagatcccgaggactcagcgaaaaaactggtgggtgaagcaataaagagaggaagtgcagataacatcacatgtgttgtcgttcgtttcttggagaagaagtcagcttcatcaagccacattagctcttcctcctccaaggaagccaaggaaatgcctccacttggagaccttgctatctcatcgaatgaagctaagcaagtccagatcggctcagggaacaaaccagagaatgtaacgaatcgaaaaccggacactgcaagtcgctcaactgatacactgacccttgagaggaattcagtgaccgacaaggtataa

SEQ ID NO: 141224 - protein, 348 aa, Arabidopsis thaliana
MGYLDLALSYSNQPQTVEAPASGGGLSQNGKFSYGYASSAGKRSSMEDFFETRIDGINGEIVGLFGVFDGHGGARAAEYVKRHLFSNLITHPKFISDTKSAITDAYNHTDSELLKSENSHNRDAGSTASTAILVGDRLVVANVGDSRAVISRGGKAIAVSRDHKPDQSDERERIENAGGFVMWAGVLAVSRAFGDRLLKQYVVADPEIQEEKIDDTLEFLILASDGLWDVFSNEAAVAMVKEVEDPEDSAKKLVGEAIKRGSADNITCVVVRFLEKKSASSSHISSSSSKEAKEMPPLGDLAISSNEAKQVQIGSGNKPENVTNRKPDTASRSTDTLTLERNSVTDKV

SEQ ID NO: 141225 - DNA, 1191 bp, Arabidopsis thaliana
  CDS (1)..(1191)
atgaagaaaactagaaatgttgcttcttctcctattgaatgtgtccacctccagaccaaacccaccaccactcttgttcggtctttcttcttcttcctcttcaactctcaaacaatctcttcctttatcatcttctatctcttcctctgttccttcttctggttttgccaatcaccaaacctgactaacccttctcctcctcctctctccgtcgctccccttcgcggggatgccaattctccaccgccggaatcttcttcttctccggcgacgaaatcttctttaatgatttcttctagagatcccaatgccctctttagcggcggtggaatcagctttttagcaggagttagaactgtgaagtttagttatggttattctagtcttaaaggtaaaagagcaacaatggaggattacttcgaaactagaatctctgatgttaatggacaaatggttgctttctttggtgtctttgatggtcatggtggagcaagaactgcagaatatcttaaaaacaatcttttcaagaatttagttagtcatgatgattttatctcagacactaagaaagctattggtaataatgagacaaagtttgagtgttctagtagctttttccatggaatttgtgtttttgagactttgaattttgattctgcagttgaagtttttaagcagacagatgaagagtatcttattgaagaggcaggacaaccgaagaatgctggctcgactgctgcgactgcttttcttataggtgataagttgattgttgctaacgttggtgattctagagttgtagcgtcaagaaatggttcagctgttccactctctgatgatcataaacctgatagatcagatgagcgacaacggattgaagatgctggtggctttattatttgggctgttattacttggaatacaccaggaacatggcgagttggtggaattcttgcggtctctcgggcttttggagataagcaacttaagccatatgtgattgcggagccagaaattcaggtacttagatgtgatggactgtggaatgtgttgtcaaacaaggatgccgtggcaatagtacgagacatttcagatgcggaaacagcagcaagaaagcttgtgcaagaaggttacgcacggggtagctgcgacaatatcacttgcattgttgtacgattcgaggtttcttga

SEQ ID NO: 141226 - protein, 396 aa, Arabidopsis thaliana
MKKTRNVASSPIECVHLQTKPTTTLVRSFFFFLFNSQTISSFIIFYLFLCSFFWFCQSPNLTNPSPPPLSVAPLRGDANSPPPESSSSPATKSSLMISSRDPNALFSGGGISFLAGVRTVKFSYGYSSLKGKRATMEDYFETRISDVNGQMVAFFGVFDGHGGARTAEYLKNNLFKNLVSHDDFISDTKKAIGNNETKFECSSSFFHGICVFETLNFDSAVEVFKQTDEEYLIEEAGQPKNAGSTAATAFLIGDKLIVANVGDSRVVASRNGSAVPLSDDHKPDRSDERQRIEDAGGFIIWAVITWNTPGTWRVGGILAVSRAFGDKQLKPYVIAEPEIQVLRCDGLWNVLSNKDAVAIVRDISDAETAARKLVQEGYARGSCDNITCIVVRFEVS

SEQ ID NO: 141227 - DNA, 1044 bp, Schizosaccharomyces pombe; identical to SEQ ID NO: 960
  CDS (1)..(1044)

SEQ ID NO: 141228 - protein, 347 aa, Schizosaccharomyces pombe; identical to SEQ ID NO: 961

SEQ ID NO: 141229 - DNA, 1113 bp, Schizosaccharomyces pombe; identical to SEQ ID NO: 962
  CDS (1)..(1113)

SEQ ID NO: 141230 - protein, 370 aa, Schizosaccharomyces pombe; identical to SEQ ID NO: 963

SEQ ID NO: 141231 - DNA, 1245 bp, Schizosaccharomyces pombe; identical to SEQ ID NO: 1422
  CDS (1)..(1245)

SEQ ID NO: 141232 - protein, 414 aa, Schizosaccharomyces pombe; identical to SEQ ID NO: 1423

SEQ ID NO: 141233 - DNA, 1251 bp, Oryza sativa
  CDS (1)..(1251)
atggcggcgcacggcggtggcggcgtggaggaggatcaggcggggtcgagctcgctgtgcccacctgctgcggaggcagaggcggcggctgcggcggcggcgatagcgagggcggcgcggcctccgaggccgggcagggacaagaggctcggcgtgcggcacccgctgaagcaccggaggttccgcgcggggggcaaggcggcggtggcggccggcgctagggaggtcggggaggcgaccaccgtggcggaggcgacggcgacggggcctccgaaggggagcgacgaggatgacgaggctaggtacatttgcggcggatggacgaggagtagcaacttacaattaggtctgatgcttttccgtttgttgattggaactgacctatcatttgcacggcttccttcgattgttgataatatatgcagttgcatccaggcatgttgtgatgatggaagaatgagttgtggatactcaagctttagagggagaagagcaaacatggaagacttctatgacataaaatcatcaaaagttgatgataaccaaataaacctctttggaatatttgatggtcatggtggttcacatgctgctgagcatttaaagaagcacttatttgaaaatcttctgaaacatccgtcattcatcactgatacaaaatcagcaataagtgagacctacagaaaaactgactctgatttcttggatgctgagactaatattaatagagaggatgggtcaactgcatcaacagcaattttcgttggtaaccatatctatgtggcaaatgttggtgactcacgaactgtgatgtcaaaggctggcaaagctattgcactctctagtgatcacaaaccaaatagaaaagatgagcggaaacggattgagaatgctggaggggttgtgacatggtctgggacatggagggttggtggtgtactagcaatgtctcgggcttttggtaatcgtttcttgaagcgattcgttgttgctgagcctgaggtccaggaacaagaaatagatgatgatttggagtttctgattttggctagtgatgggctgtgggatgtggtgtccaatgagcatgccgttgcatttgtaaaggcggaggagggccctgaggccgcagcccggaagctggcagagattgcttttgcccgtggaagcaccgacaatataacatgcatcgttgtaaaatttctccatgctaagatggccgtagatgctgcctcgtctagtgagcgaagttga

SEQ ID NO: 141234 - protein, 416 aa, Oryza sativa
MAAHGGGGVEEDQAGSSSLCPPAAEAEAAAAAAAIARAARPPRPGRDKRLGVRHPLKHRRFRAGGKAAVAAGAREVGEATTVAEATATGPPKGSDEDDEARYICGGWTRSSNLQLGLMLFRLLIGTDLSFARLPSIVDNICSCIQACCDDGRMSCGYSSFRGRRANMEDFYDIKSSKVDDNQINLFGIFDGHGGSHAAEHLKKHLFENLLKHPSFITDTKSAISETYRKTDSDFLDAETNINREDGSTASTAIFVGNHIYVANVGDSRTVMSKAGKAIALSSDHKPNRKDERKRIENAGGVVTWSGTWRVGGVLAMSRAFGNRFLKRFVVAEPEVQEQEIDDDLEFLILASDGLWDVVSNEHAVAFVKAEEGPEAAARKLAEIAFARGSTDNITCIVVKFLHAKMAVDAASSSERS

SEQ ID NO: 141235 - DNA, 1212 bp, Oryza sativa; identical to SEQ ID NO: 5324
  CDS (1)..(1212)

SEQ ID NO: 141236 - protein, 403 aa, Oryza sativa; identical to SEQ ID NO: 5325

SEQ ID NO: 141237 - DNA, 1047 bp, Oryza sativa; identical to SEQ ID NO: 822
  CDS (1)..(1047)

SEQ ID NO: 141238 - protein, 348 aa, Oryza sativa; identical to SEQ ID NO: 823

SEQ ID NO: 141239 - DNA, 843 bp, Oryza sativa
  CDS (1)..(843)
atgttccccttttctgttgacagtgaaaacggcaagttcagttatgggtatgcaagtgctcctgggaaaagggcttcaatggaggatttctacgagacgagaatcgatggtgttgatggagagaccattggattatttggcgtattcgacggccatggcggagctcgagcggctgaatatgtcaagcagcaccttttcagcaatttaattaagcatccaaagttcatcagtgatatcaagtccgctatcgctgaaacgtacaaccatacagattcagaatttctgaaagccgaaagtagtcacactagggatgctggctcaactgcctcaacagctattcttgtaggcgatcgcttgctggttgctaatgttggagattctagagcagttgtttgtagaggcggggatgcaattgcagtttcaagggatcacaaacccgaccagtcagatgagagacaaagaattgaggacgctgggggcttcgtgatgtgggctgggacgtggcgtgttggtggtgttcttgctgtttctcgagcatttggtgataagctattgaagcagtatgtagttgctgatccagagatcaaggaggagattgtcgatagctcccttgagttcctcatccttgctagcgatggactttgggatgttgtaagtaacaaggaagctgttgacatggtgaggcctattcaggatcccgaacaggcagcgaagaggcttctccaggaggcgtaccaaaggggtagcgccgataacatcaccgttgttattgtccgctttttggagggaacaacgactggtggtggaccaagtagggaggccgccagcgaccaaaactcatag

SEQ ID NO: 141240 - protein, 280 aa, Oryza sativa
MFPFSVDSENGKFSYGYASAPGKRASMEDFYETRIDGVDGETIGLFGVFDGHGGARAAEYVKQHLFSNLIKHPKFISDIKSAIAETYNHTDSEFLKAESSHTRDAGSTASTAILVGDRLLVANVGDSRAVVCRGGDAIAVSRDHKPDQSDERQRIEDAGGFVMWAGTWRVGGVLAVSRAFGDKLLKQYVVADPEIKEEIVDSSLEFLILASDGLWDVVSNKEAVDMVRPIQDPEQAAKRLLQEAYQRGSADNITVVIVRFLEGTTTGGGPSREAASDQNS

SEQ ID NO: 141241 - DNA, 1092 bp, Oryza sativa; identical to SEQ ID NO: 1310
  CDS (1)..(1092)

SEQ ID NO: 141242 - protein, 363 aa, Oryza sativa; identical to SEQ ID NO: 1311

SEQ ID NO: 141243 - DNA, 1023 bp, Oryza sativa; identical to SEQ ID NO: 1430
  CDS (1)..(1023)

SEQ ID NO: 141244 - protein, 340 aa, Oryza sativa; identical to SEQ ID NO: 1431

SEQ ID NO: 141245 - DNA, 1065 bp, Oryza sativa; identical to SEQ ID NO: 824
  CDS (1)..(1065)

SEQ ID NO: 141246 - protein, 354 aa, Oryza sativa; identical to SEQ ID NO: 825

SEQ ID NO: 141247 - DNA, 1215 bp, Oryza sativa; identical to SEQ ID NO: 826
  CDS (1)..(1215)

SEQ ID NO: 141248 - protein, 404 aa, Oryza sativa; identical to SEQ ID NO: 827

SEQ ID NO: 141249 - DNA, 1176 bp, Oryza sativa; identical to SEQ ID NO: 828
  CDS (1)..(1176)

SEQ ID NO: 141250 - protein, 391 aa, Oryza sativa; identical to SEQ ID NO: 829

SEQ ID NO: 141251 - DNA, 855 bp, Oryza sativa
  CDS (1)..(855)
atgtcgaggttttgctgcttcggtgctggttgctccgagttctcggggcatgcatcaaccagctctggtaaagggaaaggtattcaaggccaagtgaaggtaagctatgggttttaccttgtaagagggatgacgaatcatccaatggaggactatcatgtcgcggaacttgcagaagagaaaggaaacgaacttggtcttttcgctattttcgatggccatctaggagatactgttcctgcatacttgcagaagaacttatttgcaaacattttgaatgaggaggagtttttgacacaaccagatagagcaatcataaaagcttatgaaaagacagaccaagcaatcctgtcacatactccagatttgggacaaggtggctccactgctgtaacagcaattcttttgaatggcaggaagttgtgggtcgcaaatgttggcgattcgcgagctgttcttttgaaaggtggtaggccaatacagatgtcgactgaccatgatccgaatgtcgagcgtagtgctattgaaaataggggtggctttgtttcaaacatgccaggagatgttccccgagtctgtggtcagttggctgtctccagagcttttggcgacaggaatctaaagtcactattgaagtcagagcctgatataaaagttgaagatatagattacactgctgagcttcttgtccttgcgagcgatggactttggaaggtaatgaacaatcaggaggtcgttgatgtggccaaaagattcaaggatccacaagcagctgccaagcaattaacagctgaggcattgaaaagagacagtaaagacgacatatcgtgcgttgttgttcggttcaggatgtaa

SEQ ID NO: 141252 - protein, 284 aa, Oryza sativa
MSRFCCFGAGCSEFSGHASTSSGKGKGIQGQVKVSYGFYLVRGMTNHPMEDYHVAELAEEKGNELGLFAIFDGHLGDTVPAYLQKNLFANILNEEEFLTQPDRAIIKAYEKTDQAILSHTPDLGQGGSTAVTAILLNGRKLWVANVGDSRAVLLKGGRPIQMSTDHDPNVERSAIENRGGFVSNMPGDVPRVCGQLAVSRAFGDRNLKSLLKSEPDIKVEDIDYTAELLVLASDGLWKVMNNQEVVDVAKRFKDPQAAAKQLTAEALKRDSKDDISCVVVRFRM

SEQ ID NO: 141253 - DNA, 1059 bp, Oryza sativa; identical to SEQ ID NO: 1432
  CDS (1)..(1059)

SEQ ID NO: 141254 - protein, 352 aa, Oryza sativa; identical to SEQ ID NO: 1433

SEQ ID NO: 141255 - DNA, 966 bp, Oryza sativa
  CDS (1)..(966)
atggtcgggcggatggagcggcagtcggcgtcgtcgtcggcgtcatgctccccctcctcctccgccgccggcacctcctcctcgtcttcggcctgcgggggcaagaagcggcccgacatactcaacatgatccggagtgcaacatgccttaattcgtcatctaccgataccggcaaggggaggagtaagcagtcaagcaacaaagtgactcatggattccacttggtggaagggaaatctgggcatgacatggaggactaccatgtggcagagtacaagtatgacaagagccatgagcttggtctctttgccatttttgatggtcacttgggagacagtgttccaagttacttgaaagctaaccttttctgcaacatactgaaagagcctatcttctggactaaccctcaggaagcaattaagaatgcataccgctctacaaacaaatatattttggagaatgccaaacaacttggacctggtggttcaacagcagttactgctattgtcgttgatggaaaggatatgtgggtagcaaatgtaggtgattcaagagctgttgtgtgtgaaagaggtgctgctaatcagctcactgttgaccatgaacctcatacaactaatgaaaggcagaggattgagaagcagggtggctttgtaacaacatttcctggtgatgttccccgggtaaatggtcagcttgctgttgcgagggcctttggggaccaaagcctcaaggcgcacttgagttcagaacctgatgttaggcatgtaccaataaattcaagcatagagttcgtcatacttgccagcgatggactatggaaggtaatgaagaaccaggaagccgtcgatcttgtgaagtcgatcaaggacccccaggcagcagcgaagcgactgacgaccgaagcgcttgcgaggaagagcaaggacgacatctcctgcatcgtcatccgattccgctgctga

SEQ ID NO: 141256 - protein, 321 aa, Oryza sativa
MVGRMERQSASSSASCSPSSSAAGTSSSSSACGGKKRPDILNMIRSATCLNSSSTDTGKGRSKQSSNKVTHGFHLVEGKSGHDMEDYHVAEYKYDKSHELGLFAIFDGHLGDSVPSYLKANLFCNILKEPIFWTNPQEAIKNAYRSTNKYILENAKQLGPGGSTAVTAIVVDGKDMWVANVGDSRAVVCERGAANQLTVDHEPHTTNERQRIEKQGGFVTTFPGDVPRVNGQLAVARAFGDQSLKAHLSSEPDVRHVPINSSIEFVILASDGLWKVMKNQEAVDLVKSIKDPQAAAKRLTTEALARKSKDDISCIVIRFRC

SEQ ID NO: 141257 - DNA, 849 bp, Oryza sativa
  CDS (1)..(849)
atggggtacttgagctccgtgatccccacggatggatcgccggtcagcggcggcggcctcagccagaatggtaagtttagctatgggtatgcgagctcccctggtaaaagggcttccatggaagacttttacgagacaagaattgactctgttgatgggcagattattggtctttttggagtttttgatggtcatggtggtgctaaagtagctgagtatgttaaacagaatctcttcagtcatcttctaaggcatccaaagttcatcagtgacaccaaagtggcaatagatgatgcttataaaagtaccgacagtgaattcttagaatctgacagcagtcaaaaccagtgtggatcaactgcatcaaccgctgtccttgttggtgaccgtctctttgttgcaaacgttggagactctagggctatcatatgcagggggggaaatgctatagctgtttcaaaagatcacaagcctgatcagacagatgagcgacaacgtatcgaagatgctggaggttttgtaatgtgggcaggaacatggcgtgttggtggtgtgcttgctgtttctcgcgcttttggtgacaaactcttaaagcagtatgtagttgtggatcctgagattcgggaggaagttattgatcactctctcgagttcctcattcttgcaagtgatgggctgtgggatgtagtaaccaatgaggaggctgtcgacatgaccagatcgattcatgacccagaagaagctgcaaagaagctcttgcaagaggcctacaagagggagagcagtgacaacataacttgtgttgtcgtgcgcttcttgcatgggcaagggagtagtggatatgcttaa

SEQ ID NO: 141258 - protein, 282 aa, Oryza sativa
MGYLSSVIPTDGSPVSGGGLSQNGKFSYGYASSPGKRASMEDFYETRIDSVDGQIIGLFGVFDGHGGAKVAEYVKQNLFSHLLRHPKFISDTKVAIDDAYKSTDSEFLESDSSQNQCGSTASTAVLVGDRLFVANVGDSRAIICRGGNAIAVSKDHKPDQTDERQRIEDAGGFVMWAGTWRVGGVLAVSRAFGDKLLKQYVVVDPEIREEVIDHSLEFLILASDGLWDVVTNEEAVDMTRSIHDPEEAAKKLLQEAYKRESSDNITCVVVRFLHGQGSSGYA

SEQ ID NO: 141259 - DNA, 1164 bp, Oryza sativa; identical to SEQ ID NO: 5392
  CDS (1)..(1164)

SEQ ID NO: 141260 - protein, 387 aa, Oryza sativa; identical to SEQ ID NO: 5393

SEQ ID NO: 141261 - DNA, 1146 bp, Oryza sativa; identical to SEQ ID NO: 832
  CDS (1)..(1146)

SEQ ID NO: 141262 - protein, 381 aa, Oryza sativa; identical to SEQ ID NO: 833

SEQ ID NO: 141263 - DNA, 1476 bp, Oryza sativa; identical to SEQ ID NO: 834
  CDS (1)..(1476)

SEQ ID NO: 141264 - protein, 491 aa, Oryza sativa; identical to SEQ ID NO: 835

SEQ ID NO: 141265 - DNA, 1083 bp, Oryza sativa; identical to SEQ ID NO: 836
  CDS (1)..(1083)

SEQ ID NO: 141266 - protein, 360 aa, Oryza sativa; identical to SEQ ID NO: 837

SEQ ID NO: 141267 - DNA, 1059 bp, Oryza sativa
  CDS (1)..(1059)
atggcgcgcgccgccggcctgcgggctctggtcggcattgaggcggcggggcgtgggcgccgcgtcgccgcctccccctcccccggcggtactccagcggcctcccgcgggctccccggctggccggggttctgcggggtgggctgcggctcctcgtcgtcgtcgtcgtttgctccgccgcggatgcaggcccggcgggccgcggggtcggctgcgcgcacgcggtcgccgtcgcagtccaacggctggattaccggcggctccgcgagtgaggatggtagacttagctgggattattcaagtttcaaggggaggaggccttctatggaggatcggtttagcataaagatgactacgatcaacgaacagacagtcagcctatttggtgtatttgatggtcatggaggatcacttgctgctgaatatcttaaggaacatttgtttgaaaaccttgtgaatcaccctgagctccttagagacacaaagcttgctataagccaaacgttcctgaaaactgatgctgatttcctagagtcagtgtcttctaatccttttagggatgatggttcaacagctgtgactgctattttggttggcaaccacctatatgttggtaatgttggtgattcacgtgttgtcgctctaaaagctggcaaagctgtcccactgtcagaagatcataaacctaacagaaaagatgagcagaagagaattgaggatgccggaggtattgttgttttcgatgatacatggagggttaatggacttttggcaatgtcccgtgcatttggcaaccgtgcattgaagcactatgtgaaagcagaaccagatattcaggaaaaagtggtcgatgaaagcttggaatacctgattcttgctactgatggcctttgggatgttatgcgaaatgaggatgctgtttctcttttgaaagcgcaagatggacccaaagcagcagccatgaagctgacagaagtcgcccactctcggcttaccttagacaacatcacatgcatcgtgctgcagtttcaccatggaaaatcaaccaacagcaactga

SEQ ID NO: 141268 - protein, 352 aa, Oryza sativa
MARAAGLRALVGIEAAGRGRRVAASPSPGGTPAASRGLPGWPGFCGVGCGSSSSSSFAPPRMQARRAAGSAARTRSPSQSNGWITGGSASEDGRLSWDYSSFKGRRPSMEDRFSIKMTTINEQTVSLFGVFDGHGGSLAAEYLKEHLFENLVNHPELLRDTKLAISQTFLKTDADFLESVSSNPFRDDGSTAVTAILVGNHLYVGNVGDSRVVALKAGKAVPLSEDHKPNRKDEQKRIEDAGGIVVFDDTWRVNGLLAMSRAFGNRALKHYVKAEPDIQEKVVDESLEYLILATDGLWDVMRNEDAVSLLKAQDGPKAAAMKLTEVAHSRLTLDNITCIVLQFHHGKSTNSN

SEQ ID NO: 141269 - DNA, 1107 bp, Oryza sativa; identical to SEQ ID NO: 840
  CDS (1)..(1107)

SEQ ID NO: 141270 - protein, 368 aa, Oryza sativa; identical to SEQ ID NO: 841

SEQ ID NO: 141271 - DNA, 984 bp, Oryza sativa; identical to SEQ ID NO: 68929
  CDS (1)..(984)

SEQ ID NO: 141272 - protein, 327 aa, Oryza sativa; identical to SEQ ID NO: 899

SEQ ID NO: 141273 - DNA, 873 bp, Oryza sativa
  CDS (1)..(873)
atggctggcaaggaaatctaccacaagatgaaggacaaggtgaaagatgcttttagttcgtcaggaccagaaacagggaaaggaaaaacaaaattgtcaggcaagcgtgtcaagcatggttaccatcttgtgaagggaaaatcaaatcatccgatggaggactatctagtggcagagtacaggcaagaaggagagcatgatctggggctgtttgcaatatttgatgggcatttgggccacactgttccagacttcctgcgctcacatctctttgataatatcttaaagcagccagaattcttgagcaacccacaagctgcaattcgaaatgcatatcaacttacggatgcaaaaatattggaaagcgcagctgagttgggcagaggaggctccactgctgttactgccatattaataagcagtgaaaattctgtgaacctagtagttgcaaatgttggagattcacgagcagttattagcaagagtggtgtagcaaaacagctttcggttgatcatgaaccaaacaaggagcggcattcaatcgagaaaaaaggtggctttgtttcaaacttaccaggagatgtaccgcgtgttgatggtcagcttgcggttgcaagggcatttggagaccggagcctaaagaagcacctcagctcagagccagatgtggtggaggaacctatagacgagaatactgattttctaattcttgcaagtgatggattatggaaggtgatgtccaaccaagaggcggtggatgaaatcaaggacttcaaggatgctcaggcagctgcgaagcatctgacggagcaggccgtgaaccggaaaagcaaagacgacatctcctgcatcgttgtaaaattcctctgctag

SEQ ID NO: 141274 - protein, 290 aa, Oryza sativa
MAGKEIYHKMKDKVKDAFSSSGPETGKGKTKLSGKRVKHGYHLVKGKSNHPMEDYLVAEYRQEGEHDLGLFAIFDGHLGHTVPDFLRSHLFDNILKQPEFLSNPQAAIRNAYQLTDAKILESAAELGRGGSTAVTAILISSENSVNLVVANVGDSRAVISKSGVAKQLSVDHEPNKERHSIEKKGGFVSNLPGDVPRVDGQLAVARAFGDRSLKKHLSSEPDVVEEPIDENTDFLILASDGLWKVMSNQEAVDEIKDFKDAQAAAKHLTEQAVNRKSKDDISCIVVKFLC

SEQ ID NO: 141275 - DNA, 1077 bp, Oryza sativa; identical to SEQ ID NO: 17535
  CDS (1)..(1077)

SEQ ID NO: 141276 - protein, 358 aa, Oryza sativa; identical to SEQ ID NO: 17536

SEQ ID NO: 141277 - DNA, 1089 bp, Oryza sativa; identical to SEQ ID NO: 932
  CDS (1)..(1089)

SEQ ID NO: 141278 - protein, 362 aa, Oryza sativa; identical to SEQ ID NO: 933

SEQ ID NO: 141279 - DNA, 1059 bp, Oryza sativa; identical to SEQ ID NO: 844
  CDS (1)..(1059)

SEQ ID NO: 141280 - protein, 352 aa, Oryza sativa; identical to SEQ ID NO: 845

SEQ ID NO: 141281 - DNA, 1194 bp, Oryza sativa
  CDS (1)..(1194)
atggcgtgcatgctctgctgctccccattgcccgcgctgtcgtccccggccaccggcggcgccgccgtcgttggcttctcctcttcgtcgcggaggaaggcggcgcacgtgcacccggcggtggcggtgaaggatcacgacctgtcgtcgtcgtcgccggcggcgtgcggcgacgagggcggcggtgccgtggtgatagaggaggaggcacatccgtcgatgatgatgagtgtggcggcgccggcgatgaagaagaaggcggtggcggcgaggtggaggccgccgaggctggtcgtgccggcggtggctggcgccgacgaggcaatggcggcggcggcggcggtgaaggcggcgaaggagaaggaggaggaggaggccatggaggtagagggagaagggttttgggtggcgagtaggagaggacttaggcatgcaatggaggatggctatggtgtgatcactcacaaaattgaagggcattcccaaatggcattctacggtgtgtacgatggtcacggcggccgcgccgccgtagacttcgtcgccggccgcctcggcaacaacgtcgtcgccgccgcggagaagcaaagattatcagaaaaagcatcgtctccggcggcggccgaccacgtcgcggcggcgatccgagcggcgtacctggccaccgacagcgagttcctcagccagggaacaagaggcggcgcatgcgctgcgacggcgctggtgatcgacggcgacctctacgtcgccaacctcggcgactgccgcgccgtcatcagccgccacggcgccgccgccgccctcacctccgaccacacgccggcgagggacgacgagaggtcccgcatcgagtcctcgggcgggtacgtgagctgcggcagcaatggcgtgtggcgcgtgcaggactgcctcgcggtgacgaggtcgttcggcgacggcggcctgaagcggtgggtggtggcggagccggaggtgagcaggacgccgctcgccggcgccggctgcgagttcctcgtcatcgcctccgacggcctctggaacaaggtgtccaaccaggaggcggtggacgccgtcgccgccggccattattccgtggactcgtgccggcggctggtggacatggcgcggcggagggggagcagggatgacgtcaccgtcatggtcgtcgacctcaagaggtttttgaactgctga

SEQ ID NO: 141282 - protein, 397 aa, Oryza sativa
MACMLCCSPLPALSSPATGGAAVVGFSSSSRRKAAHVHPAVAVKDHDLSSSSPAACGDEGGGAVVIEEEAHPSMMMSVAAPAMKKKAVAARWRPPRLVVPAVAGADEAMAAAAAVKAAKEKEEEEAMEVEGEGFWVASRRGLRHAMEDGYGVITHKIEGHSQMAFYGVYDGHGGRAAVDFVAGRLGNNVVAAAEKQRLSEKASSPAAADHVAAAIRAAYLATDSEFLSQGTRGGACAATALVIDGDLYVANLGDCRAVISRHGAAAALTSDHTPARDDERSRIESSGGYVSCGSNGVWRVQDCLAVTRSFGDGGLKRWVVAEPEVSRTPLAGAGCEFLVIASDGLWNKVSNQEAVDAVAAGHYSVDSCRRLVDMARRRGSRDDVTVMVVDLKRFLNC

SEQ ID NO: 141283 - DNA, 1266 bp, Oryza sativa
  CDS (1)..(1266)
atgctctgcggcgtcgagatcctctgctccgtcgtcgccgtcgtcgcgcgcgtgctcggcagggcgctcatgacaatctgctcgcccaagttctccaccgccgggctcatcggctcgccgacgacggcgtggggcggcggcggagccaagaagaaggtgcacatggagagcgagaagcagcagctgccgccgccgccgtcgccgccggcgctggtgctcccggcgttcaagaggaattgcaccgaccaggagcagagggcgccggcgacgtcgacaaaggcggcgagggggaggccgccgaggctggtcattccggctgcggcgccggtggcggtggcgcgcggcggcgtggacccgttcggcgggagggagacggacgtggcgacggagacggaggtgaagggggaggggttctgcctggcgagcaggagaggggtcaggcatgcaatggaggatggatatggggtgatcactcgtcacaagattgaaggaggctcccaattggcgttctacggtgtgtacgacgggcatggcggccgggccgccgtggacttcgtcgccgacaagctcggcaagaatgtcgtcaccgccgccgccgcggcgacgacgatgagccgacatcaagcagctggctcatcatcgccgtcgcagcaacgtcgagaagaagaggacgatgtcacggcggcgatcagggctgcgtacctgaccacggacagcgagttcctgagccagggtgtacgcggcggcgcgtgcgcggcgacggcgctggtgaaggacggtgagctctacgtgtccaacgtcggcgactgccgcgccgtcctcggcagccgcggcggcgtggccaccgccctcacctccgaccatacccccggccgcgaggacgagcgcctccgcatcgagagcacgggcgggtacgtgagctgcggcggcagcggggtgtggcgcgtgcaggacagcctcgccgtgtcgcgcgcgttcggcgacgccggcgtgaagcagtgggtgacgtgcgagccggagacggcgcgcgtcagcctcgccgccgacggcgactgccgcttcctcgtcctcgcctccgacggcctctggtgcaaggtgtccaaccaggaggcggtcgacgccgtcgccgccgccgccgccgccgccgccggcgtggccggcagcacggacccgtgcaaggagctggccgccatggcgaggagcagagggagccgggatgacatcaccgtcatggtcgtcgacctgcaaccattcttgccggtatag

SEQ ID NO: 141284 - protein, 421 aa, Oryza sativa
MLCGVEILCSVVAVVARVLGRALMTICSPKFSTAGLIGSPTTAWGGGGAKKKVHMESEKQQLPPPPSPPALVLPAFKRNCTDQEQRAPATSTKAARGRPPRLVIPAAAPVAVARGGVDPFGGRETDVATETEVKGEGFCLASRRGVRHAMEDGYGVITRHKIEGGSQLAFYGVYDGHGGRAAVDFVADKLGKNVVTAAAAATTMSRHQAAGSSSPSQQRREEEDDVTAAIRAAYLTTDSEFLSQGVRGGACAATALVKDGELYVSNVGDCRAVLGSRGGVATALTSDHTPGREDERLRIESTGGYVSCGGSGVWRVQDSLAVSRAFGDAGVKQWVTCEPETARVSLAADGDCRFLVLASDGLWCKVSNQEAVDAVAAAAAAAAGVAGSTDPCKELAAMARSRGSRDDITVMVVDLQPFLPV

SEQ ID NO: 141285 - DNA, 1089 bp, Oryza sativa; identical to SEQ ID NO: 1308
  CDS (1)..(1089)

SEQ ID NO: 141286 - protein, 362 aa, Oryza sativa; identical to SEQ ID NO: 1309

SEQ ID NO: 141287 - DNA, 1182 bp, Oryza sativa; identical to SEQ ID NO: 970
  CDS (1)..(1182)

SEQ ID NO: 141288 - protein, 393 aa, Oryza sativa; identical to SEQ ID NO: 971

SEQ ID NO: 141289 - DNA, 1269 bp, Brassica napus; identical to SEQ ID NO: 972
  CDS (1)..(1269)

SEQ ID NO: 141290 - protein, 422 aa, Brassica napus; identical to SEQ ID NO: 973

SEQ ID NO: 141291 - DNA, 1269 bp, Brassica napus
  CDS (1)..(1269)
atggacaaagcttctcctgcagtagctgctgtaccattcagaccgttccctgatcctcagctagaattcgccggaatcagaggctactgcagcccttcgctgccggaaagtacgtgctcctccggtgaggaatcaacgaaagattcgtcctttattaagatcaacaacatgaggcagggctctacttcatcatcatctcgtttagctgacgttaccgtggatatctccgccggagaagaaatcaacggctcggatgagtttgatccgagatcgacggctcagagcgagaagagagtgctgagcagaacagagagtagaagcttgttcgagttcaagagcgtgcctttgtacggagtgacttcgatctgcggaagacggccggagatggaagattccgtctcggcgattcctagattccttcaagtgtcgctgctcgattgtggtcgagtcgccaacgggcttaatcctcactcgagtgctcacttcttcggtgtttacgacggacacggcggttctcaggtggcggattattgccgtgagaggatgcatttggcgttgacggaggagatattgaaggagaagccggagttctgcgacggtgacacgtggcaagagaagtggaagagagctttgttcaactcttttatgagagttgactttgagcttgactttgtccccgaaactgtggggtccacttcggtggtcgccgttgtctttccgacgcatatcttcgtctctaactgcggcgactccagagcggttctgtgccgcggcaaaacgcctctcgcgttatccgtcgatcacaaaccggatagagaagatgaagcggctaggatagaagcagctggtggaaaagtaatccagtggaacggggctcgtgttttcggtgtgctcgccatgtcaagatctattggcgataaatacctaaaaccatcggtgatccctgatccggacgtgacttcaatccggcgagtcaaagaagacgactgtctcatcttagcaagtgacggtctttgggacgtgatgaccaacgaagaagtgtgtgatatggctcggaaacggattttgttatggcacaagaagaatgccatggcgggggatgctttgctgccggcggagaaaagaggagaaggaaaagatccggcggcaatgtcggcggcagagtatttgtcgaagatggctctgcaaagaggaagcaaagacaacataagtgtaatagtggttgatttgaagggaataagaaaattcaagagcaaagccttgaattga

SEQ ID NO: 141292 - protein, 422 aa, Brassica napus
MDKASPAVAAVPFRPFPDPQLEFAGIRGYCSPSLPESTCSSGEESTKDSSFIKINNMRQGSTSSSSRLADVTVDISAGEEINGSDEFDPRSTAQSEKRVLSRTESRSLFEFKSVPLYGVTSICGRRPEMEDSVSAIPRFLQVSLLDCGRVANGLNPHSSAHFFGVYDGHGGSQVADYCRERMHLALTEEILKEKPEFCDGDTWQEKWKRALFNSFMRVDFELDFVPETVGSTSVVAVVFPTHIFVSNCGDSRAVLCRGKTPLALSVDHKPDREDEAARIEAAGGKVIQWNGARVFGVLAMSRSIGDKYLKPSVIPDPDVTSIRRVKEDDCLILASDGLWDVMTNEEVCDMARKRILLWHKKNAMAGDALLPAEKRGEGKDPAAMSAAEYLSKMALQRGSKDNISVIVVDLKGIRKFKSKALN

SEQ ID NO: 141293 - DNA, 927 bp, Brassica napus; identical to SEQ ID NO: 1442
  CDS (1)..(927)

SEQ ID NO: 141294 - protein, 308 aa, Brassica napus; identical to SEQ ID NO: 1443

SEQ ID NO: 141295 - DNA, 1206 bp, Brassica napus; identical to SEQ ID NO: 1444
  CDS (1)..(1206)

SEQ ID NO: 141296 - protein, 401 aa, Brassica napus; identical to SEQ ID NO: 1445

SEQ ID NO: 141297 - DNA, 1182 bp, Brassica napus; identical to SEQ ID NO: 1446
  CDS (1)..(1182)

SEQ ID NO: 141298 - protein, 393 aa, Brassica napus; identical to SEQ ID NO: 1447

SEQ ID NO: 141299 - DNA, 1194 bp, Glycine max; identical to SEQ ID NO: 69127
  CDS (1)..(1194)

SEQ ID NO: 141300 - protein, 397 aa, Glycine max; identical to SEQ ID NO: 69128

SEQ ID NO: 141301 - DNA, 1176 bp, Brassica napus; identical to SEQ ID NO: 69129
  CDS (1)..(1176)

SEQ ID NO: 141302 - protein, 391 aa, Brassica napus; identical to SEQ ID NO: 69130

SEQ ID NO: 141303 - DNA, 1134 bp, Brassica napus; identical to SEQ ID NO: 69131
  CDS (1)..(1134)

SEQ ID NO: 141304 - protein, 377 aa, Brassica napus; identical to SEQ ID NO: 69132

SEQ ID NO: 141305 - DNA, 1104 bp, Brassica napus; identical to SEQ ID NO: 1450
  CDS (1)..(1104)

SEQ ID NO: 141306 - protein, 367 aa, Brassica napus; identical to SEQ ID NO: 1451

SEQ ID NO: 141307 - DNA, 1122 bp, Brassica napus
  CDS (1)..(1122)
atgattctgagtcagcctgagatcagggtcctcgacgttaagtgccatatctcctctgcgaaagagcagaacaattttcgagtttctgagtctgtgcgtgccgaagtttcggattccgctgaaacgcctcgattcgaatcgggcatgagttttgcgactactagcattgaagagcccaccattgagtttttcccaactatacgttcagggagctttgctgacattcggggccgagagaccatggaggatgaacacatctgcatagacgacttatcagctcagtttcgatccgtcaacttctctttaccaagtgctttctatggagtctttgatggccatggcggacctgaggcgtcgctttacatgaaggagaacttgacgagactgttcttccaagattctgtatttccggagatgccctccgttgcggacaactttttcttgcaagaacttgagaactctcaccggaaagcttttgctttggctgatctcgccatggctgacgaaagcattgtcagtggttcatgcgggacaaccgccttgaccgctctcattgtcggacgacatcttctggtcgctaacgctggagattgccgtgcagtgctatgccggagaggagtggctgttgacatgtctttcgatcacaggtcaacatatgagcctgagcgtaggcgaatagaggatctaggagggtactttgaggatgggtacctcaacggggtccttgctgtcacacgtgccattggggactgggagctcaagagtcctttcactggctcctcttcgcctctgatttcagacccagatattcaacagattgttcttacagaggacgacgagttcttgattttggcatgtgatggtatatgggatgtattgtcaagccagaatgcagtgagtaacgtaagacaaggactgagaaggcacggagacccgagacaaagcgcaatggaacttgggaaagaagcagcaaggcttaactcatcagataatctgacggttgtggtcatctgcttctcctcggttccgtctccacctcaacaaccgcagaggagaaggttaaggttctgtgtttctgatgaagctcgagctcggttacaagcgatgcttggaggcgactga

SEQ ID NO: 141308 - protein, 373 aa, Brassica napus
MILSQPEIRVLDVKCHISSAKEQNNFRVSESVRAEVSDSAETPRFESGMSFATTSIEEPTIEFFPTIRSGSFADIRGRETMEDEHICIDDLSAQFRSVNFSLPSAFYGVFDGHGGPEASLYMKENLTRLFFQDSVFPEMPSVADNFFLQELENSHRKAFALADLAMADESIVSGSCGTTALTALIVGRHLLVANAGDCRAVLCRRGVAVDMSFDHRSTYEPERRRIEDLGGYFEDGYLNGVLAVTRAIGDWELKSPFTGSSSPLISDPDIQQIVLTEDDEFLILACDGIWDVLSSQNAVSNVRQGLRRHGDPRQSAMELGKEAARLNSSDNLTVVVICFSSVPSPPQQPQRRRLRFCVSDEARARLQAMLGGD

SEQ ID NO: 141309 - DNA, 1077 bp, Brassica napus
  CDS (1)..(1077)
atggggacatacctaagctctcccaaaactgataagttatcagaagatggtgagaatgataaagtcagatatggtttatcctctatgcaaggttggcgtgccaccatggaagatgcgcatgctgcaattcttgatctagatgataagacatcgttcttcggtgtgtatgatggccatggaggtaaagttgtggcaaagttctgtgccaagtatctacaccaacaggttctcagtaatgaagcatatggagctggagacattgaaacatctcttcagagagcattctttagaatggatgacatgatgcaaggacagagaggatggcgagagctagctgtactcggtgacaagatgaataagtttagcggcatgattgaaggattcatatggtcaccaagaagcggtgacgccaataaccagcctgataattggcctcttgaggatggtcctcattctgatttcgccggacctacttccgggtgtacagcatgtgtagctctgatcaaagataagaagctgtttgttgcaaatgctggtgactcacgctgtgtgatatcaaggaaaggccaggcttacaatctttctaaagatcacaaacctgatcttgaagttgagaaagagaggatactgaaagctggtgggtttattcatgctgggcgtattaatggaagcttgaatctgactagagccattggtgacatggagttcaaacagaataagttcttaccatctgagaagcaaatggttactgctgatccagatataaacactcttgacctatgtgatgatgatgattttcttgttgttgcatgtgatggaatctgggactgtatgtcaagccagcaactggtggattttatccatgaacagttaaaatctgaaacaaaactttcaaccgtatgtgaaaaagttgttgatagatgtttggctccagacactgcgagtggtgaaggctgtgataatatgaccatcatcttggttcagttcaagaagtctaataataacccatctgagcctgaaccagaagaagaaaccaaaacagaaccgagccaggacgagccgagctcatcaagctag

SEQ ID NO: 141310 - protein, 358 aa, Brassica napus
MGTYLSSPKTDKLSEDGENDKVRYGLSSMQGWRATMEDAHAAILDLDDKTSFFGVYDGHGGKVVAKFCAKYLHQQVLSNEAYGAGDIETSLQRAFFRMDDMMQGQRGWRELAVLGDKMNKFSGMIEGFIWSPRSGDANNQPDNWPLEDGPHSDFAGPTSGCTACVALIKDKKLFVANAGDSRCVISRKGQAYNLSKDHKPDLEVEKERILKAGGFIHAGRINGSLNLTRAIGDMEFKQNKFLPSEKQMVTADPDINTLDLCDDDDFLVVACDGIWDCMSSQQLVDFIHEQLKSETKLSTVCEKVVDRCLAPDTASGEGCDNMTIILVQFKKSNNNPSEPEPEEETKTEPSQDEPSSSS

SEQ ID NO: 141311 - DNA, 1236 bp, Brassica napus; identical to SEQ ID NO: 974
  CDS (1)..(1236)

SEQ ID NO: 141312 - protein, 411 aa, Brassica napus; identical to SEQ ID NO: 975

SEQ ID NO: 141313 - DNA, 1269 bp, Brassica napus; identical to SEQ ID NO: 68939
  CDS (1)..(1269)

SEQ ID NO: 141314 - protein, 422 aa, Brassica napus; identical to SEQ ID NO: 68940

SEQ ID NO: 141315 - DNA, 1179 bp, Brassica napus
  CDS (1)..(1179)
atggaagatactaaaggaatctctgatccggagaatgggagttcgatttacggcggaaaaccgccgaatcctctctccttctcttcttcctcctcctcttccgccgccgccttataccggcagacctttgacggcgaccgcgaccgctttttggctccccccaggtcgctggttcgacacccatctctcgtgaagacaaaggtgtcagctttatctgttgagaacgagtttgttttagacaaggttgagtttgttcccgttatgcgttccggagcttggtctgatattggctccaggtccagcatggaagatgcttatctatgcctcgataatctcatggatagttacggtctcaaggactctgaggatggaccgaccgccttttacggcgtattcgatggacacggtgggaagcatgctgctgagttcgcgtgtcaacgtataccgaggtacatcgttgaggatcaagagtttcctagtgacatcaataaggtggtttcttcagcgtttcttcgagcagacgctgccttctcagaggcttgtgcgttggatgggagtctctcttcaggaactactgctttggctgctattcttactggaaggtcgttggttgtggcaaacgctggagattgtagagcggtcttgtctcgtcaggggaaagccattgagatgtcaaaggaccacaaacccatgagctgcaaagagaggagacgcatcgaagcctcgggtggatacatatacgatggctatctgaacgggcaacttaatgtggctcgcgccatcggggattttcatatggaagggatgaagagaaagaaggacggttctaacggtggacctctcattgcggatcctgagctcatgacaactaaactaacagaagaggacgagttccttataatgggctgcgatggggtttgggatgtgttcatgagccagaacgctgttgatttcgctaggaggaggctgcaagagcacaatgacccggttatgtgtagtaaagagttggttgaagaagctttgaagaggaagagtggggataatgtgacggcggtggttgtgtgccttcagccgcagccgccaccgaacttggttgcaccgaggttgagggttcaacggagtttctcagcggagggattaaaagatttgcagagctacttggatgactttgggtgctaa

SEQ ID NO: 141316 - protein, 392 aa, Brassica napus
MEDTKGISDPENGSSIYGGKPPNPLSFSSSSSSSAAALYRQTFDGDRDRFLAPPRSLVRHPSLVKTKVSALSVENEFVLDKVEFVPVMRSGAWSDIGSRSSMEDAYLCLDNLMDSYGLKDSEDGPTAFYGVFDGHGGKHAAEFACQRIPRYIVEDQEFPSDINKVVSSAFLRADAAFSEACALDGSLSSGTTALAAILTGRSLVVANAGDCRAVLSRQGKAIEMSKDHKPMSCKERRRIEASGGYIYDGYLNGQLNVARAIGDFHMEGMKRKKDGSNGGPLIADPELMTTKLTEEDEFLIMGCDGVWDVFMSQNAVDFARRRLQEHNDPVMCSKELVEEALKRKSGDNVTAVVVCLQPQPPPNLVAPRLRVQRSFSAEGLKDLQSYLDDFGC

SEQ ID NO: 141317 - DNA, 1125 bp, Glycine max; identical to SEQ ID NO: 69137
  CDS (1)..(1125)

SEQ ID NO: 141318 - protein, 374 aa, Glycine max; identical to SEQ ID NO: 69138

SEQ ID NO: 141319 - DNA, 1191 bp, Zea mays; identical to SEQ ID NO: 976
  CDS (1)..(1191)

SEQ ID NO: 141320 - protein, 396 aa, Zea mays; identical to SEQ ID NO: 977

SEQ ID NO: 141321 - DNA, 1296 bp, Zea mays; identical to SEQ ID NO: 102171
  CDS (1)..(1296)

SEQ ID NO: 141322 - protein, 431 aa, Zea mays; identical to SEQ ID NO: 18131

SEQ ID NO: 141323 - DNA, 1164 bp, Zea mays; identical to SEQ ID NO: 69139
  CDS (1)..(1164)

SEQ ID NO: 141324 - protein, 387 aa, Zea mays; identical to SEQ ID NO: 69140

SEQ ID NO: 141325 - DNA, 1083 bp, Zea mays; identical to SEQ ID NO: 978
  CDS (1)..(1083)

SEQ ID NO: 141326 - protein, 360 aa, Zea mays; identical to SEQ ID NO: 979

SEQ ID NO: 141327 - DNA, 873 bp, Zea mays; identical to SEQ ID NO: 1456
  CDS (1)..(873)

SEQ ID NO: 141328 - protein, 290 aa, Zea mays; identical to SEQ ID NO: 1457

SEQ ID NO: 141329 - DNA, 1194 bp, Glycine max; identical to SEQ ID NO: 69141
  CDS (1)..(1194)

SEQ ID NO: 141330 - protein, 397 aa, Glycine max; identical to SEQ ID NO: 69142

SEQ ID NO: 141331 - DNA, 1059 bp, Triticum aestivum; identical to SEQ ID NO: 980
  CDS (1)..(1059)

SEQ ID NO: 141332 - protein, 352 aa, Triticum aestivum; identical to SEQ ID NO: 981

SEQ ID NO: 141333 - DNA, 1041 bp, Triticum aestivum
  CDS (1)..(1041)
atgcatgagaggtcgccggggccatcgctagccgccacgcgcctcccctcctccgcctccctgctcctgctcctgtcgctgtccctgctcgccgggcgctcgcacggctggtggtgccgcgaggacgacgaggggtgctccctgatggggttcaggggcgacgactcgccggtcaccggaggcggtatcagtgaaaaaggcaggttcagttatgggtttgcaagctgtgctgggaaaagggcatctatggaggatttctacgagacaagagtggatgatgttgatggagagactgttgggttgtttggcgtatttgatggtcacggcggagctcgagcagctgaatatgtgaagaagcaccttttcagcaatttaatcaagcatccgaaattcatgacagatacaaaggctgctattgctgaaacattcaatcataccgattcagagtttctgaaagctgatagtagccacaccagagatgctggctcaactgcctcaacagctattcttgtcggtggtcgcttggtggttgcaaatgttggtgattctagagctgttgtttctaaaggagggaaggctattgcggtttccagggatcacaaacctgaccagacagatgagagacagagaattgaggaagctggaggctttgtgatgtgggctgggacatggcgtgttggtggtgttcttgctgtttctcgcgcatttggtgataaacttctaaagcagtatgttgtcgctgatccagagatcaaggaggaggtagttgacagctcacttgaattccttatccttgctagtgatgggctatgggatgttgtaactaacgatgaagctgttgccatggtcaagccagtagaagatcctgagcaagcggcgaagggactacttcaagaagcttctcaaaggggcagtgctgacaacatcactgtcgtcattgttcgcttcttggacggaacgacgacgtctgctggagatggaccgagcgaggaggttgccaaggaccaaagtgaggaggtcgccaaggaccaatcttcatag

SEQ ID NO: 141334 - protein, 346 aa, Triticum aestivum
MHERSPGPSLAATRLPSSASLLLLLSLSLLAGRSHGWWCREDDEGCSLMGFRGDDSPVTGGGISEKGRFSYGFASCAGKRASMEDFYETRVDDVDGETVGLFGVFDGHGGARAAEYVKKHLFSNLIKHPKFMTDTKAAIAETFNHTDSEFLKADSSHTRDAGSTASTAILVGGRLVVANVGDSRAVVSKGGKAIAVSRDHKPDQTDERQRIEEAGGFVMWAGTWRVGGVLAVSRAFGDKLLKQYVVADPEIKEEVVDSSLEFLILASDGLWDVVTNDEAVAMVKPVEDPEQAAKGLLQEASQRGSADNITVVIVRFLDGTTTSAGDGPSEEVAKDQSEEVAKDQSS

SEQ ID NO: 141335 - DNA, 1155 bp, Triticum aestivum
  CDS (1)..(1155)
atggtggccgaggcggaggtgatgcatcagcagccggcgccggttctggaggtgcagtaccgcgcgtgtgtcgccaagggggtcgggatgtcggcggtcgccgtgccggaggtggaggtggaggtcgaggtcgccgtcgagctgcctcgcatgggattggcgaacaccgatggtgcgacgagcgtgtccgctgaaaccctacagtttgtacccaatattcggtctggaagctttgctgatatcggacctaggaggtacatggaagatgaacacatccggatagatgatctttcagcccatcttggctcgctgttggtttgcccactacctagtgccttctatggggtgtttgatggccatgggggtcctgatgctgcagcctacatgaaaagacatgccatgaggttcttgtttgaggatagagagttcccacaagcattgcaagtggatgatatattccttcaatccgttgaggaatgtattcgcagcgcgttcctgcaagccgaccttgcgctggctgataatctagacatcagccgctcctccggaactacagcactcacagcattaatctttgggaggcaactgttggttgcgaacaccggtgactgccgagcggtcctttgccggagaggcatagcgatggagatgtcccgagaccacagggcaaactacgccgaggagtgcgagagggtggccgcctccggcgggtacatcgaggacgggtacctcaacggggtgctctcggtgacgcgtgccctgggcgactgggacatgaagatgcctgactgctccacgtcgcccctcatcgcggagcccgagttccagcaggcgacgctgagcgaggacgacgagttcctcatcatggggtgcgacgggatctgggacgtgatgacgagccagcacgcggtgagcgtggtccggcacggcctgcggcagcacgacgaccccgagcggtgcgcgcgggagctcgtcatggaggcgaagcggctcgagacggccgacaacctcaccgtcattgtggtgtgctttgggtcggagctcgggtccccgccgccgccccccgctgtggcggcggcgaggccgaggagctgcaagggcctgtcggcggaggccctgtgcaacctgaggagctggctggaggctgaccgctag

SEQ ID NO: 141336 - protein, 384 aa, Triticum aestivum
MVAEAEVMHQQPAPVLEVQYRACVAKGVGMSAVAVPEVEVEVEVAVELPRMGLANTDGATSVSAETLQFVPNIRSGSFADIGPRRYMEDEHIRIDDLSAHLGSLLVCPLPSAFYGVFDGHGGPDAAAYMKRHAMRFLFEDREFPQALQVDDIFLQSVEECIRSAFLQADLALADNLDISRSSGTTALTALIFGRQLLVANTGDCRAVLCRRGIAMEMSRDHRANYAEECERVAASGGYIEDGYLNGVLSVTRALGDWDMKMPDCSTSPLIAEPEFQQATLSEDDEFLIMGCDGIWDVMTSQHAVSVVRHGLRQHDDPERCARELVMEAKRLETADNLTVIVVCFGSELGSPPPPPAVAAARPRSCKGLSAEALCNLRSWLEADR

SEQ ID NO: 141337 - DNA, 1218 bp, Linum usitatissimum; identical to SEQ ID NO: 982
  CDS (1)..(1218)

SEQ ID NO: 141338 - protein, 405 aa, Linum usitatissimum; identical to SEQ ID NO: 983

SEQ ID NO: 141339 - DNA, 1107 bp, Linum usitatissimum
  CDS (1)..(1107)
atgttgctggactgcagttgcttcggcggccacggcggcggccacggaaccggcgacgagcttctctggcatgttggcctaaagcgacacgcctcaggtgatttctcgtttgcaatggttcaagcgaattcctcgctggaagaccagggtcaggttttcacttcaccttccgctacttacatcggcgtctacgacggccacggcggccccgaagccgcccgcttcctcgccacccgtctcttccccttcatccacgattttgcgatggagcaaggcggactatcggcggaggtgataaggaaggcgttctcggcgacggaggaggagttcctccagatggtgaagcgatcgtggatgaaccagccgcagattgcgtccgttggatcttgttgtcttttagggatattgtccgaggatttgctgtacgtggcgaatctcggtgattcgagagcggtgatggggaagagagcttctccggcgacggctgcggcggagcgattgaccgtcgatcataatgttgctgttgaggaggttagaaacgaagttttggctcttcatcccgatgattctcacatcgttctttatacccgtggtgtttggcggattaagggcataatccaggtttcaagatcgataggggatgtgtatctgaagaagccagagatgagcagagatccactcttccaacaattcggcacaccggttcctttaaaaagagcagtaatgtcagcagaaccatcgataacgattcgaaggctaaacccagacgacatgttcttgatactcgcaacagatggtctatgggagcagctaaccgatgaagcagctgtagatatggttttcaagaatccaagagccgggatagcgaggaggctggtgaaggcagcgttgcaggtggctgcgaagaaaagggagatgatctataatgacataacgaagatcgaaagaggggcgagacggtatttccacgacgatatcactgtgatcgttatgtatctcgatcatcatggtgcggcagggagagggaaatcaagctccgtcgattgcgtaagttctcctgctgatatctactcttcttctaatgcaagcagcaaagtgcatatttaa

SEQ ID NO: 141340 - protein, 368 aa, Linum usitatissimum
MLLDCSCFGGHGGGHGTGDELLWHVGLKRHASGDFSFAMVQANSSLEDQGQVFTSPSATYIGVYDGHGGPEAARFLATRLFPFIHDFAMEQGGLSAEVIRKAFSATEEEFLQMVKRSWMNQPQIASVGSCCLLGILSEDLLYVANLGDSRAVMGKRASPATAAAERLTVDHNVAVEEVRNEVLALHPDDSHIVLYTRGVWRIKGIIQVSRSIGDVYLKKPEMSRDPLFQQFGTPVPLKRAVMSAEPSITIRRLNPDDMFLILATDGLWEQLTDEAAVDMVFKNPRAGIARRLVKAALQVAAKKREMIYNDITKIERGARRYFHDDITVIVMYLDHHGAAGRGKSSSVDCVSSPADIYSSSNASSKVHI

SEQ ID NO: 141341 - DNA, 852 bp, Linum usitatissimum; identical to SEQ ID NO: 1464
  CDS (1)..(852)

SEQ ID NO: 141342 - protein, 283 aa, Linum usitatissimum; identical to SEQ ID NO: 1465

SEQ ID NO: 141343 - DNA, 1185 bp, Zea mays; identical to SEQ ID NO: 69145
  CDS (1)..(1185)

SEQ ID NO: 141344 - protein, 394 aa, Zea mays; identical to SEQ ID NO: 69146

SEQ ID NO: 141345 - DNA, 1200 bp, Zea mays; identical to SEQ ID NO: 69147
  CDS (1)..(1200)

SEQ ID NO: 141346 - protein, 399 aa, Zea mays; identical to SEQ ID NO: 69148

SEQ ID NO: 141347 - DNA, 1332 bp, Zea mays
  CDS (1)..(1332)
atgtcggcgtcgcggagcgggaggcggcggaccggtagcgtggcgctcggagaccttctgcagcgggaggcgtcggcggagcgggccgcgctgggatgcggcgagcggccttcggtcgcggcggggcaggcctgccgggcgaagaagggcgaggacttcgcgctgctcaagcccgcctgcgagcgacgccccggcgcgccgtccacctccttctccgccttcgccctgttcgatgggcacaacgggagcgccgccgcggtgtacgccaaggagcacctcctcggcaacgtgctcagctgcgtcccgaccgatctggcctgggacgactggctcgccgcgctgccgagggccctcgtcgcggggttcgtcaagaccgacaaggatttccagactaaagctcattcctcggggacaaccgcgacgcttgccataattgatggctccgttgtaactgttgcatctgttggtgattcacgttgtgtccttgaagctgagggatccatctactatttgtcggctgaccatcgcttcgacgctaatgaagaggaggttggacgtgtaaccgaatgtggaggtgaagttggaaggctaaatgtcgtcggtggtgctgagattggtccccttagatgttggccaggtggtttatgcctctcaagatcgattggtgatcaggatgtaggtgaatttattattccggttccttatgtgaagcaaattaagctgtctaatgctggaggccgtcttattatttcaagcgacggtgtttgggatgctttgactgcagaaatggcttttaaatgtgcacgagggcttcctcctgaggctgcagctgagcaaattgttaaagaagcagttgaagcaaaaggattgagagatgatacaacttgcattgtcattgacataatatcaccagagaaaccaaaacgcactatacaatctcaaagaacgccaggaaaaggccttgtgcttctaaaaaatttctttttaaggaaagcagcatctgactcgttgtctgtccctgataaggataattatcccgagccagatttagaggaggtctttgaggacggatgtccatccctttcaaggaggcttaattctgagtatcctgtccgagacatgttcaaactttttgcgtgtgcaatttgtcaaattgacttggaatctggccaaggcatatccatacacgagggtttgtcaaggccagggaagctgcgtccctgggatgcccctttcctttgtcacagctgccaggaaaagaaagaggcgatggaggggaagcgccattcacgagattcctcgtcgagaaatagcgggtcaagtgaatcgtga

SEQ ID NO: 141348 - protein, 443 aa, Zea mays
MSASRSGRRRTGSVALGDLLQREASAERAALGCGERPSVAAGQACRAKKGEDFALLKPACERRPGAPSTSFSAFALFDGHNGSAAAVYAKEHLLGNVLSCVPTDLAWDDWLAALPRALVAGFVKTDKDFQTKAHSSGTTATLAIIDGSVVTVASVGDSRCVLEAEGSIYYLSADHRFDANEEEVGRVTECGGEVGRLNVVGGAEIGPLRCWPGGLCLSRSIGDQDVGEFIIPVPYVKQIKLSNAGGRLIISSDGVWDALTAEMAFKCARGLPPEAAAEQIVKEAVEAKGLRDDTTCIVIDIISPEKPKRTIQSQRTPGKGLVLLKNFFLRKAASDSLSVPDKDNYPEPDLEEVFEDGCPSLSRRLNSEYPVRDMFKLFACAICQIDLESGQGISIHEGLSRPGKLRPWDAPFLCHSCQEKKEAMEGKRHSRDSSSRNSGSSES

SEQ ID NO: 141349 - DNA, 1200 bp, Zea mays; identical to SEQ ID NO: 69149
  CDS (1)..(1200)

SEQ ID NO: 141350 - protein, 399 aa, Zea mays; identical to SEQ ID NO: 69150

SEQ ID NO: 141351 - DNA, 873 bp, Hordeum vulgare
  CDS (1)..(873)
atggccggcaaggaaatctaccacaagatgaaggacaaggtgaaagatgcttttagttcgtcagggccagaaacagggaaaggcaagacaaaattgtcaggcaggcgtgtcaagcatggttaccatcttgtcaaggggaaatcaaatcatccaatggaggactacttggtggcggagtacaggcaagttggggagcatgatttgggtttgtttgcaatatttgatggccacctgggccacactgttccagactttctgcgtgcacatctctttgataacatcttgagcgagccagaattcttgagtgacacgaaaaatgctattagaaaagcatatctacttaccgatgagaaaatattggaaaaagcagctgagttgggaagaggaggctccacggctgttaccgccatcttgataagcagtaacgatagtgtgaagctagtggtcgcaaatattggagattcacgagcagttattagcaagaatggtaaagcagagcagctttcagttgatcatgagcctagcatggagcgacaaattattgaggaaaaaggtggatttgtttcgaacctaccaggagatgtcccacgagttgatgggcagctggctgttgcaagagcattcggagaccggagcttgaaaaagcacctcagttctgagccacacgtggctgaggaagtcatcgatgagagttcagatttcctaattctagcaagtgatggcctgtggaaggtgatgaccaaccaagaggctgttgatgagatcaaggacatcagggacgcacaggcagctgcgaaacatctaacggagcaggcggtgaacaggaagagcaaagacgacatctcctgcgtcgtcgtaaacttccactgctag

SEQ ID NO: 141352 - protein, 290 aa, Hordeum vulgare
MAGKEIYHKMKDKVKDAFSSSGPETGKGKTKLSGRRVKHGYHLVKGKSNHPMEDYLVAEYRQVGEHDLGLFAIFDGHLGHTVPDFLRAHLFDNILSEPEFLSDTKNAIRKAYLLTDEKILEKAAELGRGGSTAVTAILISSNDSVKLVVANIGDSRAVISKNGKAEQLSVDHEPSMERQIIEEKGGFVSNLPGDVPRVDGQLAVARAFGDRSLKKHLSSEPHVAEEVIDESSDFLILASDGLWKVMTNQEAVDEIKDIRDAQAAAKHLTEQAVNRKSKDDISCVVVNFHC

SEQ ID NO: 141353 - DNA, 1059 bp, Hordeum vulgare
  CDS (1)..(1059)
atgggagtttacctcagtactccaaagaccgataagctatctgaagacggggaaaatgataaactcaaatttggtctttcatctatgcaagggtggcgtgcaagcatggaagatgctcattcagcattgctagatctggacaatgagacggcattctttggtgtttttgacggccacggaggaagggtggttgccaaattctgtgcaaaatatctacactctcaagttctcaaaagtgaagcatattcttctggtgacctaggaactgctgttcataaagctttctttagaatggatgaaatgatgcgaggacagagaggttggagagaactatctgcactaggagataagatgaacaagttcagtggcatgatagaagggttgatttggtctccgagaggcagtgattcgaagaatgtagaagatgactgggctcttgaggagggaccccactctgactttgatgggccaacatgtggaagtacagcatgtgtagcactagtaaggaataaccaacttgtagtggcaaatgctggtgattcccggtgtgttatttctagggctggccaggcatacaatttgtccagagaccacaagccagagcttgtagctgagagagaaagaatactaaaagcaggcgggttcatacgtatggggcggataaatggaagtttgaacttagcgagagcgattggagatatggaatttaagcagaacaaattcttgcctcctgagaagcaaatagtgacttcaaatcctgacatcaatgttgtggagctttgcaatgaggatgactttcttgttttagcatgtgatggcatttgggactgtatgtcaagccaacagttggtggatttcatccacgagcatatacacacggaaagcaccctttctgcagtgtgtgaaagagtgctcgacagatgcctggctccatcaacaatgggcggagacggatgcgacaacatgaccatgatcttggtgcagttcaaaaaaccagtcagtgacaagaaaaatgctgacgcgggggagcaatctgcgaaaggcaaggaagagtcttga

SEQ ID NO: 141354 - protein, 352 aa, Hordeum vulgare
MGVYLSTPKTDKLSEDGENDKLKFGLSSMQGWRASMEDAHSALLDLDNETAFFGVFDGHGGRVVAKFCAKYLHSQVLKSEAYSSGDLGTAVHKAFFRMDEMMRGQRGWRELSALGDKMNKFSGMIEGLIWSPRGSDSKNVEDDWALEEGPHSDFDGPTCGSTACVALVRNNQLVVANAGDSRCVISRAGQAYNLSRDHKPELVAERERILKAGGFIRMGRINGSLNLARAIGDMEFKQNKFLPPEKQIVTSNPDINVVELCNEDDFLVLACDGIWDCMSSQQLVDFIHEHIHTESTLSAVCERVLDRCLAPSTMGGDGCDNMTMILVQFKKPVSDKKNADAGEQSAKGKEES

SEQ ID NO: 141355 - DNA, 1179 bp, Hordeum vulgare; identical to SEQ ID NO: 69151
  CDS (1)..(1179)

SEQ ID NO: 141356 - protein, 392 aa, Hordeum vulgare; identical to SEQ ID NO: 69152

SEQ ID NO: 141357 - DNA, 1167 bp, Zea mays; identical to SEQ ID NO: 984
  CDS (1)..(1167)

SEQ ID NO: 141358 - protein, 388 aa, Zea mays; identical to SEQ ID NO: 985

SEQ ID NO: 141359 - DNA, 1083 bp, Zea mays; identical to SEQ ID NO: 986
  CDS (1)..(1083)

SEQ ID NO: 141360 - protein, 360 aa, Zea mays; identical to SEQ ID NO: 987

SEQ ID NO: 141361 - DNA, 1314 bp, Zea mays; identical to SEQ ID NO: 1470
  CDS (1)..(1314)

SEQ ID NO: 141362 - protein, 437 aa, Zea mays; identical to SEQ ID NO: 1471

SEQ ID NO: 141363 - DNA, 1200 bp, Zea mays
  CDS (1)..(1200)
atgctggccgcggtgatggactatttcagctcctgctggggcccgcgatcgggtgacgggcacagggggaagggccccgacgccgccggccggcaggacggtctcctctggtacaaggacgccggtcagctcgtcactggggagttctccatggccgtggtgcaggccaaccagctgcttgaggaccagagccaagtggagtccggatcgctctccctggctgacccgggcccgcagggcaccttcgtcggcgtctatgatggccatggcggtcctgagacgtcccggttcatcaatgaccacctcttcaaccatctcagaaggtttgcaactgagcacaagtttatgtcagcggacgtgatccggaaagctttccaagcaactgaggagggctttctttctctagtcagcaaggaatggtctttgaagcctcagattgcttcagtgggctcctgctgccttgttggtgtaatctgtgctgggactctctatgttgcaaacctgggtgactcacgtgcagttcttggaaggcttgttaaggcaactggagaggtcgtggccatgcagttgtcatcggagcacaatgcgtgctatgaggaagttagacaagaactgcagtcatcacatcctgacgatccacatattgtggttctcaaacacaatgtttggcgagtgaagggtctcatccagatctcaagatctattggagatgtatatctaaagaaaccagagtacaacagagaaccacttcacagcaagtttcggcttcgagaaaccttccagaggccgatccttagttctgaacctcaaattactgaacatcgaatacagccaaatgatcaatttgttatatttgcttctgatggtctatgggagcacctcagcaataaggaagcagttgaccttgtccaaagtagtccacacaatggaattgctcggagactagtgaaagcggcgatgcaagaagctgccaagaagagggagatgagatactcagacctcaagaagatcgaccgtggtgtgagaaggcatttccacgacgatataacggtcgtcgtggtattccttgatttgaatgccatgagcaaagctagctggagcaaaagcccctcggtttctctccgagggggcggtgtcaccgtccctgcgaagtccctcgcacctttctcagctccggcacggctgaacagcacctactga

SEQ ID NO: 141364 - protein, 399 aa, Zea mays; identical to SEQ ID NO: 68996

SEQ ID NO: 141365 - DNA, 1119 bp, Zea mays; identical to SEQ ID NO: 988
  CDS (1)..(1119)

SEQ ID NO: 141366 - protein, 372 aa, Zea mays; identical to SEQ ID NO: 989

SEQ ID NO: 141367 - DNA, 897 bp, Brassica napus; identical to SEQ ID NO: 1474
  CDS (1)..(897)

SEQ ID NO: 141368 - protein, 298 aa, Brassica napus; identical to SEQ ID NO: 1475

SEQ ID NO: 141369 - DNA, 1182 bp, Brassica napus; identical to SEQ ID NO: 1476
  CDS (1)..(1182)

SEQ ID NO: 141370 - protein, 393 aa, Brassica napus; identical to SEQ ID NO: 1477

SEQ ID NO: 141371 - DNA, 1209 bp, Brassica napus; identical to SEQ ID NO: 1478
  CDS (1)..(1209)

SEQ ID NO: 141372 - protein, 402 aa, Brassica napus; identical to SEQ ID NO: 1479

SEQ ID NO: 141373 - DNA, 1182 bp, Brassica napus; identical to SEQ ID NO: 1480
  CDS (1)..(1182)

SEQ ID NO: 141374 - protein, 393 aa, Brassica napus; identical to SEQ ID NO: 1481

SEQ ID NO: 141375 - DNA, 1131 bp, Brassica napus; identical to SEQ ID NO: 990
  CDS (1)..(1131)

SEQ ID NO: 141376 - protein, 376 aa, Brassica napus; identical to SEQ ID NO: 991

SEQ ID NO: 141377 - DNA, 846 bp, Brassica napus; identical to SEQ ID NO: 1484
  CDS (1)..(846)

SEQ ID NO: 141378 - protein, 281 aa, Brassica napus; identical to SEQ ID NO: 1485

SEQ ID NO: 141379 - DNA, 1206 bp, Brassica napus; identical to SEQ ID NO: 1486
  CDS (1)..(1206)

SEQ ID NO: 141380 - protein, 401 aa, Brassica napus; identical to SEQ ID NO: 1487

SEQ ID NO: 141381 - DNA, 1290 bp, Brassica napus; identical to SEQ ID NO: 992
  CDS (1)..(1290)

SEQ ID NO: 141382 - protein, 429 aa, Brassica napus; identical to SEQ ID NO: 993

SEQ ID NO: 141383 - DNA, 1155 bp, Brassica napus; identical to SEQ ID NO: 17561
  CDS (1)..(1155)

SEQ ID NO: 141384 - protein, 384 aa, Brassica napus; identical to SEQ ID NO: 17562

SEQ ID NO: 141385 - DNA, 1152 bp, Brassica napus; identical to SEQ ID NO: 994
  CDS (1)..(1152)

SEQ ID NO: 141386 - protein, 383 aa, Brassica napus; identical to SEQ ID NO: 995

SEQ ID NO: 141387 - DNA, 1128 bp, Brassica napus; identical to SEQ ID NO: 22103
  CDS (1)..(1128)

SEQ ID NO: 141388 - protein, 375 aa, Brassica napus; identical to SEQ ID NO: 22104

SEQ ID NO: 141389 - DNA, 1134 bp, Brassica napus; identical to SEQ ID NO: 996
  CDS (1)..(1134)

SEQ ID NO: 141390 - protein, 377 aa, Brassica napus; identical to SEQ ID NO: 997

SEQ ID NO: 141391 - DNA, 1149 bp, Brassica napus; identical to SEQ ID NO: 998
  CDS (1)..(1149)

SEQ ID NO: 141392 - protein, 382 aa, Brassica napus; identical to SEQ ID NO: 999

SEQ ID NO: 141393 - DNA, 981 bp, Brassica napus; identical to SEQ ID NO: 22107
  CDS (1)..(981)

SEQ ID NO: 141394 - protein, 326 aa, Brassica napus; identical to SEQ ID NO: 22108

SEQ ID NO: 141395 - DNA, 894 bp, Brassica napus; identical to SEQ ID NO: 1490
  CDS (1)..(894)

SEQ ID NO: 141396 - protein, 297 aa, Brassica napus; identical to SEQ ID NO: 1491

SEQ ID NO: 141397 - DNA, 924 bp, Brassica napus; identical to SEQ ID NO: 1492
  CDS (1)..(924)

SEQ ID NO: 141398 - protein, 307 aa, Brassica napus; identical to SEQ ID NO: 1493

SEQ ID NO: 141399 - DNA, 1122 bp, Brassica napus; identical to SEQ ID NO: 22113
  CDS (1)..(1122)

SEQ ID NO: 141400 - protein, 373 aa, Brassica napus; identical to SEQ ID NO: 22114

SEQ ID NO: 141401 - DNA, 1056 bp, Brassica napus; identical to SEQ ID NO: 22117
  CDS (1)..(1056)

SEQ ID NO: 141402 - protein, 351 aa, Brassica napus; identical to SEQ ID NO: 22118

SEQ ID NO: 141403 - DNA, 1134 bp, Brassica napus; identical to SEQ ID NO: 1000
  CDS (1)..(1134)

SEQ ID NO: 141404 - protein, 377 aa, Brassica napus; identical to SEQ ID NO: 1001

SEQ ID NO: 141405 - DNA, 1098 bp, Zea mays; identical to SEQ ID NO: 1598
  CDS (1)..(1098)

SEQ ID NO: 141406 - protein, 365 aa, Zea mays; identical to SEQ ID NO: 1599

SEQ ID NO: 141407 - DNA, 1200 bp, Zea mays; identical to SEQ ID NO: 69181
  CDS (1)..(1200)

SEQ ID NO: 141408 - protein, 399 aa, Zea mays; identical to SEQ ID NO: 69182

SEQ ID NO: 141409 - DNA, 852 bp, Glycine max; identical to SEQ ID NO: 22119
  CDS (1)..(852)

SEQ ID NO: 141410 - protein, 283 aa, Glycine max; identical to SEQ ID NO: 22120

SEQ ID NO: 141411 - DNA, 1038 bp, Glycine max; identical to SEQ ID NO: 1002
  CDS (1)..(1038)

SEQ ID NO: 141412 - protein, 345 aa, Glycine max; identical to SEQ ID NO: 1003

SEQ ID NO: 141413 - DNA, 1206 bp, Glycine max; identical to SEQ ID NO: 1496
  CDS (1)..(1206)

SEQ ID NO: 141414 - protein, 401 aa, Glycine max; identical to SEQ ID NO: 1497

SEQ ID NO: 141415 - DNA, 849 bp, Glycine max; identical to SEQ ID NO: 22125
  CDS (1)..(849)

SEQ ID NO: 141416 - protein, 282 aa, Glycine max; identical to SEQ ID NO: 22126

SEQ ID NO: 141417 - DNA, 1203 bp, Glycine max; identical to SEQ ID NO: 1498
  CDS (1)..(1203)

SEQ ID NO: 141418 - protein, 400 aa, Glycine max; identical to SEQ ID NO: 1499

SEQ ID NO: 141419 - DNA, 1071 bp, Glycine max; identical to SEQ ID NO: 1004
  CDS (1)..(1071)

SEQ ID NO: 141420 - protein, 356 aa, Glycine max; identical to SEQ ID NO: 1005

SEQ ID NO: 141421 - DNA, 1170 bp, Glycine max; identical to SEQ ID NO: 1504
  CDS (1)..(1170)

SEQ ID NO: 141422 - protein, 389 aa, Glycine max; identical to SEQ ID NO: 1505

SEQ ID NO: 141423 - DNA, 1203 bp, Glycine max; identical to SEQ ID NO: 68951
  CDS (1)..(1203)

SEQ ID NO: 141424 - protein, 400 aa, Glycine max; identical to SEQ ID NO: 1459

SEQ ID NO: 141425 - DNA, 1134 bp, Glycine max; identical to SEQ ID NO: 1006
  CDS (1)..(1134)

SEQ ID NO: 141426 - protein, 377 aa, Glycine max; identical to SEQ ID NO: 1007

SEQ ID NO: 141427 - DNA, 1020 bp, Glycine max; identical to SEQ ID NO: 1008
  CDS (1)..(1020)

SEQ ID NO: 141428 - protein, 339 aa, Glycine max; identical to SEQ ID NO: 1009

SEQ ID NO: 141429 - DNA, 1017 bp, Glycine max; identical to SEQ ID NO: 1510
  CDS (1)..(1017)

SEQ ID NO: 141430 - protein, 338 aa, Glycine max; identical to SEQ ID NO: 1511

SEQ ID NO: 141431 - DNA, 849 bp, Glycine max; identical to SEQ ID NO: 1514
  CDS (1)..(849)

SEQ ID NO: 141432 - protein, 282 aa, Glycine max; identical to SEQ ID NO: 1515

SEQ ID NO: 141433 - DNA, 1173 bp, Glycine max; identical to SEQ ID NO: 1516
  CDS (1)..(1173)

SEQ ID NO: 141434 - protein, 390 aa, Glycine max; identical to SEQ ID NO: 1517

SEQ ID NO: 141435 - DNA, 1617 bp, Glycine max; identical to SEQ ID NO: 1518
  CDS (1)..(1617)

SEQ ID NO: 141436 - protein, 538 aa, Glycine max; identical to SEQ ID NO: 1519

SEQ ID NO: 141437 - DNA, 1134 bp, Glycine max; identical to SEQ ID NO: 1010
  CDS (1)..(1134)

SEQ ID NO: 141438 - protein, 377 aa, Glycine max; identical to SEQ ID NO: 1011

SEQ ID NO: 141439 - DNA, 1281 bp, Glycine max; identical to SEQ ID NO: 18194
  CDS (1)..(1281)

SEQ ID NO: 141440 - protein, 426 aa, Glycine max; identical to SEQ ID NO: 18195

SEQ ID NO: 141441 - DNA, 1185 bp, Glycine max; identical to SEQ ID NO: 69199
  CDS (1)..(1185)

SEQ ID NO: 141442 - protein, 394 aa, Glycine max; identical to SEQ ID NO: 69200

SEQ ID NO: 141443 - DNA, 1194 bp, Glycine max; identical to SEQ ID NO: 69201
  CDS (1)..(1194)

SEQ ID NO: 141444 - protein, 397 aa, Glycine max; identical to SEQ ID NO: 69202

SEQ ID NO: 141445 - DNA, 1287 bp, Glycine max; identical to SEQ ID NO: 22141
  CDS (1)..(1287)

SEQ ID NO: 141446 - protein, 428 aa, Glycine max; identical to SEQ ID NO: 18125

SEQ ID NO: 141447 - DNA, 1152 bp, Glycine max; identical to SEQ ID NO: 1012
  CDS (1)..(1152)

SEQ ID NO: 141448 - protein, 383 aa, Glycine max; identical to SEQ ID NO: 1013

SEQ ID NO: 141449 - DNA, 1071 bp, Glycine max
  CDS (1)..(1071)
atggtatgcagcagttgtgtaaggtctttggttgttcaagctggaaccttcgtcaacagagtgagaatcaacgaatttgggaggagtttgctggcggttcagagtttttctcattggccgattcgtgaatacaagacaatcacagggatgatggttgatacgggttctatgtcaagtgctggaccccttgttgatatgatgccagagaaagatgatgatggtcgatttgctagtggagggtggaaaagtgaagatggaagacttagctgtggttattcaagttttaggggaaagagagtgacaatggaagatttttatgatattaagacattgaagattggtggccaatcaatatgcttatttggaatatttgatggtcatggtggttctcgtgctgctgagtatttaaaggagcatctttttgataatctcttgaagcatccaaaatttttgacagatgccaaattggctataagtgaaacatatcaacagactgatgctaattttctggattctgaaaaggacaccttcagggatgatggatctacagcttcgacagcagttttggttgataaccatctttatgtagcaaatgttggagattctaggactataatatcaaaagctggtaaagcaaatgctctctctgaggatcataaaccaaatagaagtgatgagcggaagagaatcgagaatgctggtggtgttgtcatgtgggcaggtacttggagggttggaggggtgctagcaatgtctcgtgcctttggtaaccgtatgctgaagcagtttgtagtagcagaacctgagatccaggaccaggagatagatgaacaaattgaactgattattcttgcaagtgatggactctgggatgtagtacagaatgatgatgctgtttctcttgcccgcacggaagaggagcctgaggcagctgcacgaaagttaacagaagcagcattttctcgtgggagtgcagataacattacatgcattgtggtgcaattccaccatgagaaagcagaactagctaatcctgacaaagcagaagcagctagtgctcagcatgagtag

SEQ ID NO: 141450 - protein, 356 aa, Glycine max
MVCSSCVRSLVVQAGTFVNRVRINEFGRSLLAVQSFSHWPIREYKTITGMMVDTGSMSSAGPLVDMMPEKDDDGRFASGGWKSEDGRLSCGYSSFRGKRVTMEDFYDIKTLKIGGQSICLFGIFDGHGGSRAAEYLKEHLFDNLLKHPKFLTDAKLAISETYQQTDANFLDSEKDTFRDDGSTASTAVLVDNHLYVANVGDSRTIISKAGKANALSEDHKPNRSDERKRIENAGGVVMWAGTWRVGGVLAMSRAFGNRMLKQFVVAEPEIQDQEIDEQIELIILASDGLWDVVQNDDAVSLARTEEEPEAAARKLTEAAFSRGSADNITCIVVQFHHEKAELANPDKAEAASAQHE

SEQ ID NO: 141451 - DNA, 1158 bp, Glycine max; identical to SEQ ID NO: 69205
  CDS (1)..(1158)

SEQ ID NO: 141452 - protein, 385 aa, Glycine max; identical to SEQ ID NO: 69206

SEQ ID NO: 141453 - DNA, 1569 bp, Glycine max; identical to SEQ ID NO: 1524
  CDS (1)..(1569)

SEQ ID NO: 141454 - protein, 522 aa, Glycine max; identical to SEQ ID NO: 1525

SEQ ID NO: 141455 - DNA, 1017 bp, Glycine max
  CDS (1)..(1017)
atgataacttggaaccttttgcacgcaagaataagctgtatacacgcaagaatagcgctattattttttcttttttttttgttgttgttggtcaaagaagtagcacctgggagccctgaatattcagcctgtgatatggggtacctcaattcagttttgtcctcttcaagccaggttcatgctgcagaagattcacctgtcagtggagggggcctcagtcagaatggaaaattcagctatgggtatgctagctcccctggcaagagatcttcaatggaagatttttatgagacaaaaattgatggtgttgatggtgaaattgttggcctttttggagtttttgatggccatggtggtgctcgtgctgctgagtatgtcaagcaaaacctatttagcaatttgatcagtcatccaaaattcatttctgacaccaaatctgcaatagctgatgcatataaccataccgactctgaatttctgaaatctgaaaataatcaaaacagagatgctggatcaactgcttccactgccattcttgttggtgaccgtttgcttgttgcaaatgttggggactccagagctgttatatgcaggggtggaaatgccattgctgtttctcgagatcacaagccagaccaaactgatgagaggcgaaggattgaagatgcaggtggttttgttatgtgggctggaacttggagagttggtggagttcttgctgtttcacgtgcatttggtgatagactcctgaagcagtatgttgttgctgatccagaaatccaggaagaaaaggttgatagctctcttgagtttcttatattggccagtgatgggctatgggatgtcgtctcaaatgaggaagctgttgctatgattaaaccaattgaggacgcagaggaggcagcaaagaggctgatgcaagaagcatatcagcgaggtagttctgacaacattacctgtgttgttgtgcgctttttgtcaaaccaaggtgcctcttctcatagtaactctggctaa

SEQ ID NO: 141456 - protein, 338 aa, Glycine max
MITWNLLHARISCIHARIALLFFLFFLLLLVKEVAPGSPEYSACDMGYLNSVLSSSSQVHAAEDSPVSGGGLSQNGKFSYGYASSPGKRSSMEDFYETKIDGVDGEIVGLFGVFDGHGGARAAEYVKQNLFSNLISHPKFISDTKSAIADAYNHTDSEFLKSENNQNRDAGSTASTAILVGDRLLVANVGDSRAVICRGGNAIAVSRDHKPDQTDERRRIEDAGGFVMWAGTWRVGGVLAVSRAFGDRLLKQYVVADPEIQEEKVDSSLEFLILASDGLWDVVSNEEAVAMIKPIEDAEEAAKRLMQEAYQRGSSDNITCVVVRFLSNQGASSHSNSG

SEQ ID NO: 141457 - DNA, 1170 bp, Glycine max
  CDS (1)..(1170)
atgtcttgctccgtcgcggtttccaattcgccggtgttctctccttcttcttccctcttctgctcgaagccctccatcatctcttcttcgccggaatccctctcgctctctctctcgcatctcaaaccttccaactcttctacgacgtcgtcttgttcttcaccctctgctgctgcttcttcatcttcttctccttcttctccgtttcggcttcgccttcccaagcctcccaccgtgttctctgcttcttcttctgcttcgtctacctctccgaacggcaccgttttgaagaggaagcgacccgctaggttggacatacccgtttcctctctcacctttgcggttccgcccacgccctccgcggcggcgcgtgacttggtcgaggctgaggaagatgggtttggggtgtactgcaagagaggcaggagggagtacatggaggatcgttacaccgctgggaataatcttcgcggagaacacaaactggctttttttggcatatttgatgggcacggtggtgcaaaagctgctgaatttgctgcaagtaacttagaaaagaatgtgttagatgaagtaatcgtgagagatgaagataatgttgaggaggcagtgaagcgagggtacctaaacaccgattcggatttcctaaaggaggatcttcatggtggctcttgctgtgtgacagcattgattaggaatggtaacctcattgtgtccaacgcgggtgattgccgtgctgtcattagcagagggggtgttgctgaggctctaacatctgatcacaggccttcaagggaagatgaaagggacagaattgagagcctgggtggctatgtcgatttatgccgcggtgtttggaggatccagggatctctggctgtgtcaaggggaattggagatagacacctgaaacaatgggtgacagcagaacctgagaccaaagttctccgaattgaacctgaacatgacttgttaattttagcttcagatggattatgggataaggttggtaatcaggaagcagtagatattgctcgttcttttctcgtaggcaacaacaaatcacaaccattgctgcaggcttgtaaaaagcttgtagatttgtctgtttcacgaggctctttggatgatacaagtgtcatgctaatcaaattggagcactatatttaa

SEQ ID NO: 141458 - protein, 389 aa, Glycine max
MSCSVAVSNSPVFSPSSSLFCSKPSIISSSPESLSLSLSHLKPSNSSTTSSCSSPSAAASSSSSPSSPFRLRLPKPPTVFSASSSASSTSPNGTVLKRKRPARLDIPVSSLTFAVPPTPSAAARDLVEAEEDGFGVYCKRGRREYMEDRYTAGNNLRGEHKLAFFGIFDGHGGAKAAEFAASNLEKNVLDEVIVRDEDNVEEAVKRGYLNTDSDFLKEDLHGGSCCVTALIRNGNLIVSNAGDCRAVISRGGVAEALTSDHRPSREDERDRIESLGGYVDLCRGVWRIQGSLAVSRGIGDRHLKQWVTAEPETKVLRIEPEHDLLILASDGLWDKVGNQEAVDIARSFLVGNNKSQPLLQACKKLVDLSVSRGSLDDTSVMLIKLEHYI

SEQ ID NO: 141459 - DNA, 1134 bp, Glycine max; identical to SEQ ID NO: 1014
  CDS (1)..(1134)

SEQ ID NO: 141460 - protein, 377 aa, Glycine max; identical to SEQ ID NO: 1015

SEQ ID NO: 141461 - DNA, 846 bp, Glycine max
  CDS (1)..(846)
atgactggcaaagacatcctccatataatgaaggtgaaagcagggtttgcaccaccagacacagggaatggaaaaggcaaaatatcaaaacacatcacacatggctttcacttgatgaagggcaaatcggcacatcctatggaagattatttagtttcggaatttaagcaagaaaaggatagagaattaggcttgtttgcaatatttgatggccacttaggccatgatgttgccagctatttgcagaaccaccttttccaaaacatcttgaaagagcatgacttttggactgagacagaaagcgcggtgaaaaaagcttaccttgaaacagatgagaaaatattggaacaagcacttgtgttggggcgaggagggtcaacagctgtgactgcaatacttattgatggtcagaagcttatagtagcaaatgttggtgactcaagagctgttatttgtgagaatggaaaggcaagacaactatcagtggatcatgaaccaagcaaggaaaaaaaatcgattgagaggcgtgggggttttgtatcaaacattccaggagatgtccctcgagtagatggacagctggcagtagcaagggcttttggtgacaggagcctgaagatgcatcttagttcagaacctgatgtgattgtacaggaagtagatcaacatacagagtttcttattctggctagtgatggaatatggaaggttatgtcaaacgaagaagcagtggaatctattagacaaataaaggatgctcaagctgcagcaaagcaattgattgaagaggcagtttgcaagaaaagtaaggatgacatatcttgcatagttgtgaggttccaatga

SEQ ID NO: 141462 - protein, 281 aa, Glycine max
MTGKDILHIMKVKAGFAPPDTGNGKGKISKHITHGFHLMKGKSAHPMEDYLVSEFKQEKDRELGLFAIFDGHLGHDVASYLQNHLFQNILKEHDFWTETESAVKKAYLETDEKILEQALVLGRGGSTAVTAILIDGQKLIVANVGDSRAVICENGKARQLSVDHEPSKEKKSIERRGGFVSNIPGDVPRVDGQLAVARAFGDRSLKMHLSSEPDVIVQEVDQHTEFLILASDGIWKVMSNEEAVESIRQIKDAQAAAKQLIEEAVCKKSKDDISCIVVRFQ

SEQ ID NO: 141463 - DNA, 1296 bp, Glycine max; identical to SEQ ID NO: 1016
  CDS (1)..(1296)

SEQ ID NO: 141464 - protein, 431 aa, Glycine max; identical to SEQ ID NO: 1017

SEQ ID NO: 141465 - DNA, 1092 bp, Glycine max; identical to SEQ ID NO: 1018
  CDS (1)..(1092)

SEQ ID NO: 141466 - protein, 363 aa, Glycine max; identical to SEQ ID NO: 1019

SEQ ID NO: 141467 - DNA, 1143 bp, Glycine max; identical to SEQ ID NO: 69211
  CDS (1)..(1143)

SEQ ID NO: 141468 - protein, 380 aa, Glycine max; identical to SEQ ID NO: 69212

SEQ ID NO: 141469 - DNA, 852 bp, Glycine max; identical to SEQ ID NO: 22155
  CDS (1)..(852)

SEQ ID NO: 141470 - protein, 283 aa, Glycine max; identical to SEQ ID NO: 22156

SEQ ID NO: 141471 - DNA, 1191 bp, Glycine max; identical to SEQ ID NO: 1020
  CDS (1)..(1191)

SEQ ID NO: 141472 - protein, 396 aa, Glycine max; identical to SEQ ID NO: 1021

SEQ ID NO: 141473 - DNA, 849 bp, Glycine max; identical to SEQ ID NO: 1536
  CDS (1)..(849)

SEQ ID NO: 141474 - protein, 282 aa, Glycine max; identical to SEQ ID NO: 1537

SEQ ID NO: 141475 - DNA, 1086 bp, Glycine max; identical to SEQ ID NO: 966
  CDS (1)..(1086)

SEQ ID NO: 141476 - protein, 361 aa, Glycine max; identical to SEQ ID NO: 967

SEQ ID NO: 141477 - DNA, 1290 bp, Glycine max; identical to SEQ ID NO: 18198
  CDS (1)..(1290)

SEQ ID NO: 141478 - protein, 429 aa, Glycine max; identical to SEQ ID NO: 18199

SEQ ID NO: 141479 - DNA, 1128 bp, Glycine max; identical to SEQ ID NO: 69215
  CDS (1)..(1128)

SEQ ID NO: 141480 - protein, 375 aa, Glycine max; identical to SEQ ID NO: 69216

SEQ ID NO: 141481 - DNA, 1092 bp, Glycine max; identical to SEQ ID NO: 1022
  CDS (1)..(1092)

SEQ ID NO: 141482 - protein, 363 aa, Glycine max; identical to SEQ ID NO: 1023

SEQ ID NO: 141483 - DNA, 945 bp, Glycine max; identical to SEQ ID NO: 1540
  CDS (1)..(945)

SEQ ID NO: 141484 - protein, 314 aa, Glycine max; identical to SEQ ID NO: 1541

SEQ ID NO: 141485 - DNA, 1044 bp, Glycine max; identical to SEQ ID NO: 1024
  CDS (1)..(1044)

SEQ ID NO: 141486 - protein, 347 aa, Glycine max; identical to SEQ ID NO: 1025

SEQ ID NO: 141487 - DNA, 1173 bp, Glycine max
  CDS (1)..(1173)
atgtcttgctccgtcgcggtttccaattcgccggggtcctgtccttcttcttccctcttctgctcgaagccctccatcatctcttcttcgccggaatccctctccctctctctgtcgcatctcaaaccttcgaactcttctacgtcgtcgtcttgttcttcgccttctgctgctgctgcttcttcttctccttcttctccgtttcgacttcgccttcccaagcctcccaccgcgttctccgcgtcttctgctgcttctgcttcgtctacctctccgaactgcaccgttttgaagaggaagcgacccgctaggttggacatacccgtttcctccctcacctttgcggttccgcccacgccctccgtggcggcgcgtgacgtggttgaggctgaggaagatgggtttggggtgtcctgcaagagagggaggagggagtatatggaggatcgttacacagctggggataatcttcgcggagaacacaaactggctttttttggcatatttgatgggcacggtggtgcaaaagctgctgaatttgctgcaagtaacttagaaaagaatgtgttagatgaagtaatcgtgagagatgaagataatgttgaggaggcagtgaagcgagggtacctaaacaccgattcggatttcctaaaggaggatcttcatggtggctcttgctgtgtgacagcattgattaggaatggtaacctcattgtgtccaacgctggtgattgccgcgctgtcattagcagagggggtgttgctgaggctctaacatctgatcacaggccttcaagggaagatgaaagggacagaattgagagcctgggtggctatgttgatttatgccgtggtgtttggaggatccagggatctctggctgtgtcaaggggaattggagatagacacctgaaacaatgggtgacagcagaacctgagaccaaagttctccgaattgaacctgaacatgacttgttaattttagcttcagatggattatgggataaggttggtaatcaggaagcagtagatattgctcgttcttttctcgtaggcaacaacaaatcacaaccattgctgcaggcttgtaaaaagcttgtagatttgtctgtttcacgaggctctttggatgatacaagtgtcatgctaatcaaattggagcactatatttaa

SEQ ID NO: 141488 - protein, 390 aa, Glycine max
MSCSVAVSNSPGSCPSSSLFCSKPSIISSSPESLSLSLSHLKPSNSSTSSSCSSPSAAAASSSPSSPFRLRLPKPPTAFSASSAASASSTSPNCTVLKRKRPARLDIPVSSLTFAVPPTPSVAARDVVEAEEDGFGVSCKRGRREYMEDRYTAGDNLRGEHKLAFFGIFDGHGGAKAAEFAASNLEKNVLDEVIVRDEDNVEEAVKRGYLNTDSDFLKEDLHGGSCCVTALIRNGNLIVSNAGDCRAVISRGGVAEALTSDHRPSREDERDRIESLGGYVDLCRGVWRIQGSLAVSRGIGDRHLKQWVTAEPETKVLRIEPEHDLLILASDGLWDKVGNQEAVDIARSFLVGNNKSQPLLQACKKLVDLSVSRGSLDDTSVMLIKLEHYI

SEQ ID NO: 141489 - DNA, 1083 bp, Glycine max; identical to SEQ ID NO: 1544
  CDS (1)..(1083)

SEQ ID NO: 141490 - protein, 360 aa, Glycine max; identical to SEQ ID NO: 1545

SEQ ID NO: 141491 - DNA, 1128 bp, Glycine max; identical to SEQ ID NO: 69223
  CDS (1)..(1128)

SEQ ID NO: 141492 - protein, 375 aa, Glycine max; identical to SEQ ID NO: 69224

SEQ ID NO: 141493 - DNA, 1191 bp, Glycine max; identical to SEQ ID NO: 1026
  CDS (1)..(1191)

SEQ ID NO: 141494 - protein, 396 aa, Glycine max; identical to SEQ ID NO: 1027

SEQ ID NO: 141495 - DNA, 1107 bp, Glycine max; identical to SEQ ID NO: 22171
  CDS (1)..(1107)

SEQ ID NO: 141496 - protein, 368 aa, Glycine max; identical to SEQ ID NO: 22172

SEQ ID NO: 141497 - DNA, 1086 bp, Glycine max; identical to SEQ ID NO: 1028
  CDS (1)..(1086)

SEQ ID NO: 141498 - protein, 361 aa, Glycine max; identical to SEQ ID NO: 1029

SEQ ID NO: 141499 - DNA, 1092 bp, Glycine max; identical to SEQ ID NO: 1030
  CDS (1)..(1092)

SEQ ID NO: 141500 - protein, 363 aa, Glycine max; identical to SEQ ID NO: 1031

SEQ ID NO: 141501 - DNA, 1107 bp, Glycine max; identical to SEQ ID NO: 22175
  CDS (1)..(1107)

SEQ ID NO: 141502 - protein, 368 aa, Glycine max; identical to SEQ ID NO: 22176

SEQ ID NO: 141503 - DNA, 1128 bp, Brassica napus; identical to SEQ ID NO: 1556
  CDS (1)..(1128)

SEQ ID NO: 141504 - protein, 375 aa, Brassica napus; identical to SEQ ID NO: 1557

SEQ ID NO: 141505 - DNA, 1284 bp, Brassica napus; identical to SEQ ID NO: 18200
  CDS (1)..(1284)

SEQ ID NO: 141506 - protein, 427 aa, Brassica napus; identical to SEQ ID NO: 18201

SEQ ID NO: 141507 - DNA, 1176 bp, Brassica napus; identical to SEQ ID NO: 69225
  CDS (1)..(1176)

SEQ ID NO: 141508 - protein, 391 aa, Brassica napus; identical to SEQ ID NO: 69226

SEQ ID NO: 141509 - DNA, 1167 bp, Brassica napus; identical to SEQ ID NO: 1494
  CDS (1)..(1167)

SEQ ID NO: 141510 - protein, 388 aa, Brassica napus; identical to SEQ ID NO: 1495

SEQ ID NO: 141511 - DNA, 1674 bp, Glycine max; identical to SEQ ID NO: 1558
  CDS (1)..(1674)

SEQ ID NO: 141512 - protein, 557 aa, Glycine max; identical to SEQ ID NO: 1559

SEQ ID NO: 141513 - DNA, 1167 bp, Oryza sativa; identical to SEQ ID NO: 892
  CDS (1)..(1167)

SEQ ID NO: 141514 - protein, 388 aa, Oryza sativa; identical to SEQ ID NO: 893

SEQ ID NO: 141515 - DNA, 1176 bp, Oryza sativa; identical to SEQ ID NO: 884
  CDS (1)..(1176)

SEQ ID NO: 141516 - protein, 391 aa, Oryza sativa; identical to SEQ ID NO: 885

SEQ ID NO: 141517 - DNA, 1059 bp, Oryza sativa
  CDS (1)..(1059)
atggcgcgcgccgccggcctgcgggctctggtcggcattgaggcggcggggcgtgggcgccgcgtcgccgcctccccctcccccggcggtactccagcggcctcccgcgggctccccggctggccggggttctgcggggtgggctgcggctcctcgtcgtcgtcgtcgtttgctccgccgcggatgcaggcccggcgggccgcggggtcggctgcgcgcacgcggtcgccgtcgcagtccaacggctggattaccggcggctccgcgagtgaggatggtagacttagctggggttattcaagtttcaaggggaggaggccttctatggaggatcggtttagcataaagatgactacgatcaacgaacagacagtcagcctatttggtgtatttgatggtcatggaggatcacttgctgctgaatatcttaaggaacatttgtttgaaaaccttgtgaatcaccctgagctccttagagacacaaagcttgctataagccaaacgttcctgaaaactgatgctgatttcctagagtcagtgtcttctaatccttttagggatgatggttcaacagctgtgactgctattttggttggcaaccacctatatgttggtaatgttggtgattcacgtgttgtcgctctaaaagctggcaaagctgtcccactgtcagaagatcataaacctaacagaaaagatgagcagaagagaattgaggatgccggaggtattgttgttttcgatgatacatggagggttaatggacttttggcaatgtcccgtgcatttggcaaccgtgcattgaagcactatgtgaaagcagaaccagatattcaggaaaaagtggtcgatgaaagcttggaatacctgattcttgctactgatggcctttgggatgttatgcgaaatgaggatgctgtttctcttttgaaagcgcaagatggacccaaagcagcagccatgaagctgacagaagtcgcccactctcggcttaccttagacaacatcacatgcatcgtgctgcagtttcaccatggaaaatcaaccaacagcaactga

SEQ ID NO: 141518 - protein, 352 aa, Oryza sativa
MARAAGLRALVGIEAAGRGRRVAASPSPGGTPAASRGLPGWPGFCGVGCGSSSSSSFAPPRMQARRAAGSAARTRSPSQSNGWITGGSASEDGRLSWGYSSFKGRRPSMEDRFSIKMTTINEQTVSLFGVFDGHGGSLAAEYLKEHLFENLVNHPELLRDTKLAISQTFLKTDADFLESVSSNPFRDDGSTAVTAILVGNHLYVGNVGDSRVVALKAGKAVPLSEDHKPNRKDEQKRIEDAGGIVVFDDTWRVNGLLAMSRAFGNRALKHYVKAEPDIQEKVVDESLEYLILATDGLWDVMRNEDAVSLLKAQDGPKAAAMKLTEVAHSRLTLDNITCIVLQFHHGKSTNSN

SEQ ID NO: 141519 - DNA, 1143 bp, Zea mays; identical to SEQ ID NO: 1032
  CDS (1)..(1143)

SEQ ID NO: 141520 - protein, 380 aa, Zea mays; identical to SEQ ID NO: 1033

SEQ ID NO: 141521 - DNA, 1296 bp, Zea mays
  CDS (1)..(1296)
atggggaactgcgtggcgagcgggggcacgacgacggtcacggcggcaggtgctgcaggggaggacgggaggcggcgggggaggaggtggaaggcgccgcgggaggagcagctcggttcggtccccggccggatcttctccaacgacggccgcagccgcaccgccgccgtgttcacgcagcaggggcggaaggggatcaatcaggacgccatgctcgtctgggatgggttcggcggggaggaagacgtcgtgctttgtggggtgttcgacgggcacggcccgcatggccacctggtggcgcgcagagtccgcgatgcgatgccgctgaagctcatgtccgcggtgcgcgcgtccaaggctggcttggatatgcccgccgccgcgtggaggaaggccttcgcgcgcgcctacaagaccatggacaaggaccttcgctcccacgccaccctagattgcttctgcagtggcagcaccgccgtcaccgtactcaagctcggctcggatctctacatggccaacattggtgactcacgcgccgtcctaggctcgagggatggtggcgacggcggcatggtggccttgcaactgactattgacctcaaaccggatgttcccagcgaggcagaacggatcaagaagtgcaggggcagggtatttgctctgcaggacgaaccggaggtgccgcgggtctggctgccgttcgatgacgcgccaggcctggcaatggcccgggcgtttggggacttctgcctcaaggattatggtgtcatttcggttccagagttcttccactggtcgctcacagagaaggatcagtttgtcatccttgcatcagatggggtgtgggatgtcctcagcaaccaggaggctgttgacatcgtgtcgtcgtccccaagccgatcaaaggccgcaagatccctcgtcgaggccgcgacccgtgaatggaaaaccaagtacccgacatcgaagatcgatgactgcgcagtggtctgcctgtatctggacggcaaaatggaccacgaacgtgactcgacggcctccatggacaacatgagcctcgacgaaggttcagccgcggacccaaacgaagcccaggagcaggagccagcgctgacccgcaacttcacggtcaggacggtcgccggaagcgcccacgagaaggcgctgtcgggggcggtggatgcggtcgttgccggcgcagcccacgaccagagttggtcaggcctcgacggggtgacgcgggtgaactcgctcgtccagcttcccaggttctccgacgagaaggcgatcggctga

SEQ ID NO: 141522 - protein, 431 aa, Zea mays
MGNCVASGGTTTVTAAGAAGEDGRRRGRRWKAPREEQLGSVPGRIFSNDGRSRTAAVFTQQGRKGINQDAMLVWDGFGGEEDVVLCGVFDGHGPHGHLVARRVRDAMPLKLMSAVRASKAGLDMPAAAWRKAFARAYKTMDKDLRSHATLDCFCSGSTAVTVLKLGSDLYMANIGDSRAVLGSRDGGDGGMVALQLTIDLKPDVPSEAERIKKCRGRVFALQDEPEVPRVWLPFDDAPGLAMARAFGDFCLKDYGVISVPEFFHWSLTEKDQFVILASDGVWDVLSNQEAVDIVSSSPSRSKAARSLVEAATREWKTKYPTSKIDDCAVVCLYLDGKMDHERDSTASMDNMSLDEGSAADPNEAQEQEPALTRNFTVRTVAGSAHEKALSGAVDAVVAGAAHDQSWSGLDGVTRVNSLVQLPRFSDEKAIG

SEQ ID NO: 141523 - DNA, 1062 bp, Zea mays
  CDS (1)..(1062)
atgcggcagatctcgtcgctgctgcagggcctggcccggtcactctcggtggggagggacagggacagggacagggaccggaaagggaacggcgcaggcgaccgcaagaccgccgtgccggcggtgctgcggacgtcgggcaccctgtggggcgacggctcggacacgttcgccgccgtctgctcgcggcgcggcgagaaaggcatcaaccaggactgctccatcgtctgggagggattcgggtgccaggagggcaccatcttctgcggcatcttcgacggccacggccagtggggccactacgtggccaaggcggtgcgcgactcgctgccgccgtcgctgctgtgccactggcaggaggcgctcgctctcgcgtcactcatcgacgacggcgagaagaagctcggcgactgccagttcgatctctggaaacggtcctacgtggccgcatgcgccgccgtggacgatgagctgcggcgcagccgccgcttggacgcggtccaaagtggctgcaccgcgctatccatcgtcaagcagggggacctcatgatcgtcgccaacgtcggcgactcccgggccgtgctgggcaccacgtccgacgatggcgccattgcggctgtccagctcaccgtcgacctaaagcctaacctgccacaggagaaggagcgcatccggcggtgcaatggtcaagtgtactgcctcgccgatgagcccggggtgcaccgcgtgtggcagcctagccgagagtcgccggggctcgctatgtcgcgcgcgttcggcgactactgcgtcaaggactgcggtgtcatctctacgccggaggtgacgcagaagaggatcagcagcagtgaccaatttatcatcctcgctaccgacggggtatgggacgtgctctccaacgacgaggcggtacatatcgtggcggggacgccggaccgggcgaaggcggccaagcggctggtggagtgcgccgttcgcgcgtggaggcgcaagcggcgcgacatcgccgtcgatgactgctcggcgatctgcctcttcttccacccgccgccgccgtcgtag

SEQ ID NO: 141524 - protein, 353 aa, Zea mays
MRQISSLLQGLARSLSVGRDRDRDRDRKGNGAGDRKTAVPAVLRTSGTLWGDGSDTFAAVCSRRGEKGINQDCSIVWEGFGCQEGTIFCGIFDGHGQWGHYVAKAVRDSLPPSLLCHWQEALALASLIDDGEKKLGDCQFDLWKRSYVAACAAVDDELRRSRRLDAVQSGCTALSIVKQGDLMIVANVGDSRAVLGTTSDDGAIAAVQLTVDLKPNLPQEKERIRRCNGQVYCLADEPGVHRVWQPSRESPGLAMSRAFGDYCVKDCGVISTPEVTQKRISSSDQFIILATDGVWDVLSNDEAVHIVAGTPDRAKAAKRLVECAVRAWRRKRRDIAVDDCSAICLFFHPPPPS

SEQ ID NO: 141525 - DNA, 1113 bp, Zea mays; identical to SEQ ID NO: 1034
  CDS (1)..(1113)

SEQ ID NO: 141526 - protein, 370 aa, Zea mays; identical to SEQ ID NO: 1035

SEQ ID NO: 141527 - DNA, 1290 bp, Zea mays; identical to SEQ ID NO: 18202
  CDS (1)..(1290)

SEQ ID NO: 141528 - protein, 429 aa, Zea mays; identical to SEQ ID NO: 18203

SEQ ID NO: 141529 - DNA, 1200 bp, Zea mays
  CDS (1)..(1200)
atgctggccgcggtgatggactacttcagctcctgctggggcccgcgatcgggcgccgggcaccggggcaagggctccgacgccgccggccggcaggacggtctcctctggtacaaggacgccggccagctcgtcactggggagttctccatggccgtggtgcaggccaaccagctcctcgaggaccagagccaagtagagtccggatcgctctccctggctgacccgggcccacagggcaccttcgtcggcgtctatgatggccatggcggcccggagacgtcccggttcatcaatgaccacctcttcaaccatctcagaaggtttgcaactgagcacaagtttatgtcagcggacgtgatccggaaagctttccaagcaactgaggagggctttctttctctagtcagcaaggaatggtctttgaagcctcagattgcttcagtgggctcctgctgccttgttggtgtaatctgtgctgggactctctatgttgcaaacctgggcgactcacgtgcagttcttggaaggcttgttaaggcaactggagaggttttggccactcagttgtcatcggagcacaatgcgtgctatgaggaagttagacaagagctgcagtcatcacatcctgatgatccacatattgtggttctcaaacacaatgtttggcgagtgaagggtctcatccagatctcaagatctatcggagatgtatatctaaagaaaccggagtataacagagaacctcttcacagcaagtttcggcttcgagaaaccttccagaagccgattcttagttctgaacctcaaattactgaacaccgaatacagccaaacgatcagtttgttatatttgcttccgatggtctatgggagcacctcagcaatcaggaagctgttgaccttgtccaaagtagtccccgtaatggaatcgctcggagactagtgaaagccgcgatgcaagaagctgccaagaagagggagatgagatactcagacctcaagaagatcgaccgtggcgtgaggaggcatttccacgacgatataaccgtcgtcgtggtgttcctcgactcggatgccatgagcaaagctagctggagcaagagcccctcggtttctctccgagggggcggcgtcacccttcccgccaagtccctcgcacccttctcggctccggcacagttgaacggcacccactga

SEQ ID NO: 141530 - protein, 399 aa, Zea mays; identical to SEQ ID NO: 69002

SEQ ID NO: 141531 - DNA, 1185 bp, Glycine max; identical to SEQ ID NO: 68989
  CDS (1)..(1185)

SEQ ID NO: 141532 - protein, 394 aa, Glycine max; identical to SEQ ID NO: 68990

SEQ ID NO: 141533 - DNA, 1125 bp, Glycine max
  CDS (1)..(1125)
atgctccaggcattgatgaatctgttctcgctgtgttggaagccgtttggccgcgatgctgatcgaatcgattccatcggagttatcggaagagaaggcaaagacggcttgctctggttccgcgacttcggaaaatatggctccggtgatttctccatggctgtcgttcaggccaaccaggttctcgaagaccagagccagatcgagtctggtcctctcggcaccttcgtcggcatctacgacggtcacggaggacccgacgcatcaagatacgtttgcgatcacttgtttcgccattttcaagcaatatcagctgagtcacgcggggttgtgacaactgagacaatcgaaagagcatttcgccaaacagaagaggggtacatggccctcgtgtcaggctcgtggaatgctcgacctcatattgcaagtgctgggacctgttgtctagttggagtgatatttcagcagacactctttgtggcaaacgctggagattcccgtgttgtattgggtaagaaagttggcaacactggaggtatggctgcaattcagctgtctacagaacacaatgcaaatcttgaggctgttaggcaggaacttaaagaattacatcctcatgatccccaaattgttgtcctcaaacatggagtgtggagagtaaaaggcattattcaggtttctagatctataggtgatgtatatttgaagcatgcacagtttaaccgagaaccacttaatgcaaaattcagacttcctgaaccgatgaacatgcctatcttgagtgctaatcccactattctttctcatgctctccaaccaaatgattccttccttatatttgcatctgatggtttatgggagcatttgagtaacgagaaagctgtggatattgtaaacagcaatccacatgcgggtagtgccaagagacttatcaaggctgctctccatgaagcagcaagaaaacgagaaatgcgatattcagacctccgtaagattgacaagaaagttcgacgccattttcatgatgatatatccgttattgttttattcttaaatcacgaccttatttccagaggcacagtgctagacccgacactttcaattcgaagcgctctcgatcactga

SEQ ID NO: 141534 - protein, 374 aa, Glycine max; identical to SEQ ID NO: 69012

SEQ ID NO: 141535 - DNA, 1098 bp, Zea mays; identical to SEQ ID NO: 1564
  CDS (1)..(1098)

SEQ ID NO: 141536 - protein, 365 aa, Zea mays; identical to SEQ ID NO: 1565

SEQ ID NO: 141537 - DNA, 1074 bp, Zea mays; identical to SEQ ID NO: 1566
  CDS (1)..(1074)

SEQ ID NO: 141538 - protein, 357 aa, Zea mays; identical to SEQ ID NO: 1567

SEQ ID NO: 141539 - DNA, 1200 bp, Zea mays; identical to SEQ ID NO: 69233
  CDS (1)..(1200)

SEQ ID NO: 141540 - protein, 399 aa, Zea mays; identical to SEQ ID NO: 69234

SEQ ID NO: 141541 - DNA, 1323 bp, Zea mays; identical to SEQ ID NO: 18204
  CDS (1)..(1323)

SEQ ID NO: 141542 - protein, 440 aa, Zea mays; identical to SEQ ID NO: 18205

SEQ ID NO: 141543 - DNA, 1065 bp, Zea mays; identical to SEQ ID NO: 1036
  CDS (1)..(1065)

SEQ ID NO: 141544 - protein, 354 aa, Zea mays; identical to SEQ ID NO: 1037

SEQ ID NO: 141545 - DNA, 1194 bp, Zea mays; identical to SEQ ID NO: 1570
  CDS (1)..(1194)

SEQ ID NO: 141546 - protein, 397 aa, Zea mays; identical to SEQ ID NO: 1571

SEQ ID NO: 141547 - DNA, 1293 bp, Zea mays
  CDS (1)..(1293)
atggcgttcgccgccagcgagggaaatctttccccggcgctgcccctggccactctgatcggccgcgagctccgcggcgacggtaccgagcgcccgcacgtgcgctacggccactctggcttcgccaagcgcggcgaggactacttcctcgtcaagcccgactgcctccgcgtccccggagacccttcctcctctttctccgtcttcgctgtattcgacggccacaatggcgtgtcggcggcggtgttcagcaaggagaaattgctggagcacgtgatgagcgcggtgcccgagggcatcagccgcgaggactggctacaggcgctgccgcgcgcgctcgtcgcaggattcgtcaagacagacattgacttccagcgcaagggtgagacgtcaggaacgacggcgacacttgttgtggttgatgggttcacggtcactgtcgcgtcggtgggagattctaggtgcattctggatacacagggaggcgaggtctcattgctgactgtggatcaccggctagaggagaatgcagaggagcgtgagcgcgtcacagcgagtggaggagaggtcagccggcttaatctctgtggtggacaggaggtgggtcctctccgatgctggccaggtggattgtgcctttcaaggtcaattggggatactgatgtcggcgagttcatcgtaccgattccacatgtcaagcaagtgaagctcccaaatactggtggaagactaataattgcatcagatggaatatgggacgctctgtcctcagagagtgctgctcaggcgtgccggggattacgtgcagaactggctgcaaaacttgttgttaagcaagctctgaagacaagtgggctgaaagatgacaccacatgtgtggttgtcgacatcatcccatctgatcattgttcaacaccaccagcattgtctccaaagaaaaatcagaacaagttgaagcatcttatttttggtaaaaggtctcatagttctgttggaaagctcagcaaatctgcttcattgggttcagtggaagaaatattcgaggagggatctgcaatgttggaagaaaggttgggaagtaattttccaccaaaagcaaatctgcctccatttcgctgtgcaatctgccaagtggaccaagagccattcgaaggtttaatgacggacaatgtaggtggctgctgctcaaccccatcaacaccatggggtggtccttatctttgctcaggctgtaggaaaaagaaggacgcgatggaaggtaaacgatcgaatcgttcaacgacgtgcaggtga

SEQ ID NO: 141548 - protein, 430 aa, Zea mays; identical to SEQ ID NO: 18129

SEQ ID NO: 141549 - DNA, 873 bp, Zea mays; identical to SEQ ID NO: 1574
  CDS (1)..(873)

SEQ ID NO: 141550 - protein, 290 aa, Zea mays; identical to SEQ ID NO: 1575

SEQ ID NO: 141551 - DNA, 1200 bp, Zea mays; identical to SEQ ID NO: 69239
  CDS (1)..(1200)

SEQ ID NO: 141552 - protein, 399 aa, Zea mays; identical to SEQ ID NO: 69240

SEQ ID NO: 141553 - DNA, 1455 bp, Zea mays; identical to SEQ ID NO: 18206
  CDS (1)..(1455)

SEQ ID NO: 141554 - protein, 484 aa, Zea mays; identical to SEQ ID NO: 18207

SEQ ID NO: 141555 - DNA, 1164 bp, Zea mays; identical to SEQ ID NO: 69241
  CDS (1)..(1164)

SEQ ID NO: 141556 - protein, 387 aa, Zea mays; identical to SEQ ID NO: 69242

SEQ ID NO: 141557 - DNA, 1335 bp, Zea mays; identical to SEQ ID NO: 18208
  CDS (1)..(1335)

SEQ ID NO: 141558 - protein, 444 aa, Zea mays; identical to SEQ ID NO: 18209

SEQ ID NO: 141559 - DNA, 1080 bp, Zea mays; identical to SEQ ID NO: 1038
  CDS (1)..(1080)

SEQ ID NO: 141560 - protein, 359 aa, Zea mays; identical to SEQ ID NO: 1039

SEQ ID NO: 141561 - DNA, 957 bp, Zea mays
  CDS (1)..(957)
atggtcggccggatggagcggcagaccgcgtcgtcgtcagcgtcatgctcccccgccgccgccgccaccacctcctcctcgtcctgcggcggcaagaagcggcctgatatcctcaacatgatccggaatgcatcctgtcttaattcgtcgtctgctgataccggcaagggaaggagtaaattgtcgaccaacaaagttacacatggattccacctggtggaaggcaagtccggccatgacatggaagactaccatgtggcagagtacaagtatgtgaagaatcatgagcttggtctctttgccatttttgatggccatttaggagataaggtgccaagttacttgaaagctaacctttttagcaacataatgaaagagcctctcttctggtctagccctcaagaagcaataaagaatgcatactgctctacaaacaagtatattctagaaaataccaaacaacttggaccaggtggttcgacagcagttactgctattgtagttgatggtaaggacatgtggatagcaaatgtaggcgactctagagctgttgtgtgtgaaagaggctctgctaagcagctcactgttgaccatgagccccatgaaactaatgaaagacagaggattgaaaagcacggtggctttgtgacgacatttcctggtgatgttcctcgggtgaatggtcagctcgctgttgctagggcatttggtgaccaaagcctcaaggcccacttgagctctgaacctgatattagtcatgtaccaataaactcaagtatagagtttgtcatacttgccagtgatggattgtggaaggtaatgaagaaccaggaagccgtcgatctcgtgaagtcaatcaaggatccacaggcagcagcgaaacgattgaccactgaagcgttggcaaggaagagcaaggatgatatctcttgcattgtcatccgtttccgctgctga

SEQ ID NO: 141562 - protein, 318 aa, Zea mays
MVGRMERQTASSSASCSPAAAATTSSSSCGGKKRPDILNMIRNASCLNSSSADTGKGRSKLSTNKVTHGFHLVEGKSGHDMEDYHVAEYKYVKNHELGLFAIFDGHLGDKVPSYLKANLFSNIMKEPLFWSSPQEAIKNAYCSTNKYILENTKQLGPGGSTAVTAIVVDGKDMWIANVGDSRAVVCERGSAKQLTVDHEPHETNERQRIEKHGGFVTTFPGDVPRVNGQLAVARAFGDQSLKAHLSSEPDISHVPINSSIEFVILASDGLWKVMKNQEAVDLVKSIKDPQAAAKRLTTEALARKSKDDISCIVIRFRC

SEQ ID NO: 141563 - DNA, 1197 bp, Zea mays; identical to SEQ ID NO: 1040
  CDS (1)..(1197)

SEQ ID NO: 141564 - protein, 398 aa, Zea mays; identical to SEQ ID NO: 1041

SEQ ID NO: 141565 - DNA, 1290 bp, Zea mays; identical to SEQ ID NO: 18210
  CDS (1)..(1290)

SEQ ID NO: 141566 - protein, 429 aa, Zea mays; identical to SEQ ID NO: 18211

SEQ ID NO: 141567 - DNA, 1098 bp, Zea mays; identical to SEQ ID NO: 1576
  CDS (1)..(1098)

SEQ ID NO: 141568 - protein, 365 aa, Zea mays; identical to SEQ ID NO: 1577

SEQ ID NO: 141569 - DNA, 1101 bp, Zea mays; identical to SEQ ID NO: 1578
  CDS (1)..(1101)

SEQ ID NO: 141570 - protein, 366 aa, Zea mays; identical to SEQ ID NO: 1579

SEQ ID NO: 141571 - DNA, 1179 bp, Zea mays; identical to SEQ ID NO: 69243
  CDS (1)..(1179)

SEQ ID NO: 141572 - protein, 392 aa, Zea mays; identical to SEQ ID NO: 69244

SEQ ID NO: 141573 - DNA, 855 bp, Zea mays; identical to SEQ ID NO: 1580
  CDS (1)..(855)

SEQ ID NO: 141574 - protein, 284 aa, Zea mays; identical to SEQ ID NO: 1581

SEQ ID NO: 141575 - DNA, 1185 bp, Zea mays; identical to SEQ ID NO: 1582
  CDS (1)..(1185)

SEQ ID NO: 141576 - protein, 394 aa, Zea mays; identical to SEQ ID NO: 1583

SEQ ID NO: 141577 - DNA, 873 bp, Zea mays; identical to SEQ ID NO: 1584
  CDS (1)..(873)

SEQ ID NO: 141578 - protein, 290 aa, Zea mays; identical to SEQ ID NO: 1585

SEQ ID NO: 141579 - DNA, 1065 bp, Zea mays; identical to SEQ ID NO: 1042
  CDS (1)..(1065)

SEQ ID NO: 141580 - protein, 354 aa, Zea mays; identical to SEQ ID NO: 1043

SEQ ID NO: 141581 - DNA, 1092 bp, Zea mays; identical to SEQ ID NO: 1588
  CDS (1)..(1092)

SEQ ID NO: 141582 - protein, 363 aa, Zea mays; identical to SEQ ID NO: 1589

SEQ ID NO: 141583 - DNA, 855 bp, Zea mays; identical to SEQ ID NO: 1590
  CDS (1)..(855)

SEQ ID NO: 141584 - protein, 284 aa, Zea mays; identical to SEQ ID NO: 1591

SEQ ID NO: 141585 - DNA, 948 bp, Zea mays; identical to SEQ ID NO: 22211
  CDS (1)..(948)

SEQ ID NO: 141586 - protein, 315 aa, Zea mays; identical to SEQ ID NO: 22212

SEQ ID NO: 141587 - DNA, 1083 bp, Zea mays; identical to SEQ ID NO: 1044
  CDS (1)..(1083)

SEQ ID NO: 141588 - protein, 360 aa, Zea mays; identical to SEQ ID NO: 1045

SEQ ID NO: 141589 - DNA, 1290 bp, Zea mays; identical to SEQ ID NO: 18212
  CDS (1)..(1290)

SEQ ID NO: 141590 - protein, 429 aa, Zea mays; identical to SEQ ID NO: 18213

SEQ ID NO: 141591 - DNA, 1455 bp, Zea mays; identical to SEQ ID NO: 1594
  CDS (1)..(1455)

SEQ ID NO: 141592 - protein, 484 aa, Zea mays; identical to SEQ ID NO: 1595

SEQ ID NO: 141593 - DNA, 1047 bp, Zea mays; identical to SEQ ID NO: 1596
  CDS (1)..(1047)

SEQ ID NO: 141594 - protein, 348 aa, Zea mays; identical to SEQ ID NO: 1597

SEQ ID NO: 141595 - DNA, 1200 bp, Zea mays; identical to SEQ ID NO: 69153
  CDS (1)..(1200)

SEQ ID NO: 141596 - protein, 399 aa, Zea mays; identical to SEQ ID NO: 69154

SEQ ID NO: 141597 - DNA, 1200 bp, Zea mays; identical to SEQ ID NO: 69253
  CDS (1)..(1200)

SEQ ID NO: 141598 - protein, 399 aa, Zea mays; identical to SEQ ID NO: 69254

SEQ ID NO: 141599 - DNA, 1179 bp, Zea mays
  CDS (1)..(1179)
atgctagtgacattgatgaacttgttacgggcgtgctggcgaccgtcatcgaaccggcatgcccgaacaggctcagatgttaccggtaggcaggatggacttctatggtacaaggacgccgggcagcatgtcaacggggagttttccatggctgttgttcaggccaataacttacttgaggaccagtgtcagattgagtcgggcccactgagttttctagattccggaccatatggcacttttgttggcgtttacgatggacatggtggtccagagacggcctgctatatcaatgatcatctcttccagaatctgaaaaggtttgcatctgagcagaatacaatgtctgctgatgtactgaagaaggcgtatgaagctacagaagatggattcttttctgttgttaccaaacaatggcctgtaaagcctcagatagcagctgtcggctcatgctgcctggtcggtgtaatttgtggtggcatgctttatgttgccaatgttggggattcccgtgttgttttaggaagacatgttaaggctactggagaagttttggctgtccaactgtcagcagagcataatgtaagtattgagtcagtgagaaaagaactgcagtcaatgcacccagaagataggcacattgttgttctcaagcacaatgtttggcgtgtaaaaggactaattcaggtttgtagatcaatcggtgatgcttatctcaagaagcaagagttcaatagggaacccctatatgtgaaatttcggcttcgtgaaccttttcacaagccgatactaagttcagaaccatcgatcaatgtgcaaccactacaaccacacgaccagtttctcatatttgcatctgatggactttgggagcacttaaccaaccaagaagctgttgatattgttcacagtagcccccgcagtggctgtgctaggaggctgataagagcggcgctgcaagtggcagccaagaaaagggagatgaggtactcagacctcaagaagatcgaccgcggtgttcgccgccacttccacgacgacataacagtcatagtagtgttccttgattccagcctcgtgagcaaggcgagcacgcaccgaggccccactctttccctgcgaggcggcggtgccagcgctggtctgcgcagcaacacgcttgcaccaacgtcaatgtga

SEQ ID NO: 141600 - protein, 392 aa, Zea mays; identical to SEQ ID NO: 69000

SEQ ID NO: 141601 - DNA, 1455 bp, Zea mays; identical to SEQ ID NO: 18214
  CDS (1)..(1455)

SEQ ID NO: 141602 - protein, 484 aa, Zea mays; identical to SEQ ID NO: 18215

SEQ ID NO: 141603 - DNA, 1179 bp, Zea mays; identical to SEQ ID NO: 69255
  CDS (1)..(1179)

SEQ ID NO: 141604 - protein, 392 aa, Zea mays; identical to SEQ ID NO: 69256

SEQ ID NO: 141605 - DNA, 873 bp, Zea mays
  CDS (1)..(873)
atggggctcgccggggacgggtcggcggacaccgccaacctcagtaatagtgaaaatggtcggttcagttatggagttgcaagttctcccgggaaaagagcatcgatggaggacttctatgaggcaaggatagacgacgttgacggagagaaagttggaatgtttggtgtgtatgatggtcacggaggagtcagagcagctgagtacgttaagcagcatcttttcagcaatttaatcaaacacccaaagttcatcactgataccaaggccgctattgctgaaacttacaaccgcacagattcagaatttctgaaagctgatagcactcaaactcgagatgctggctcaactgcctcaacagctattattgtaggtgatcgtttgcttgttgcaaatgttggagattctagagctgttatttctaaaggaggacaggcgattgcggtttcaagggatcacaaacctgatcagacagatgagaggcaaagaattgaggatgcagggggctttgttatgtgggctgggacatggagagtgggtggtgttctcgctgtctctcgagcatttggtgataaactcttgaagccgtatgttgttgctgaccctgaaatcaaggaggaggtggtcgacagctcccctgaattcctcatccttgctagcgacggactctgggatgttgtcactaatgaggaagctgttgccatggtcaagcctatccaggacccccaggaagcagcaaacaagcttctcgaagaagcttcccgaaggggaagctccgataacatcacagttatcatcgtccgcttcatagacggaactaccggtgagaaatcaggcgacgacaaagagaccaccaacgaccaacactcctag

SEQ ID NO: 141606 - protein, 290 aa, Zea mays
MGLAGDGSADTANLSNSENGRFSYGVASSPGKRASMEDFYEARIDDVDGEKVGMFGVYDGHGGVRAAEYVKQHLFSNLIKHPKFITDTKAAIAETYNRTDSEFLKADSTQTRDAGSTASTAIIVGDRLLVANVGDSRAVISKGGQAIAVSRDHKPDQTDERQRIEDAGGFVMWAGTWRVGGVLAVSRAFGDKLLKPYVVADPEIKEEVVDSSPEFLILASDGLWDVVTNEEAVAMVKPIQDPQEAANKLLEEASRRGSSDNITVIIVRFIDGTTGEKSGDDKETTNDQHS

SEQ ID NO: 141607 - DNA, 1119 bp, Zea mays; identical to SEQ ID NO: 1046
  CDS (1)..(1119)

SEQ ID NO: 141608 - protein, 372 aa, Zea mays; identical to SEQ ID NO: 1047

SEQ ID NO: 141609 - DNA, 1140 bp, Zea mays
  CDS (1)..(1140)
atgctaggcccgctcctcaggctcctctcggcgtgcggcggggtctggcccacctcgccggcccccggcgccgcggcctcctcttccgcctcctccggggacgactctgagggccgcgacggccttctctggtggcgcgacctcgcgcgctgccacgccggcgacgtctccgtcgccgtcgcccaggccaaccaggtgctcgaggaccagtgccgcctcgactccgccccgtccatcggcaccgtcgtcggcgtcttcgacggccacggcggccccgacgccgcccgcttcgcctgcgaccaccttgtccccaacctccgagaggcgtcctccggcccgcggggcgtcaccgcagacgccatcagggaggccttcctggccacggaggaaggattcctcgcgctcgtgtcaagcctctgggaggcccagccggacatcgccacggccgggacatgctgccttgtcggcgtcgtgcacaacaggacccttttcgtcgccaacctcggcgactcccgggccgtcctcgggaagaaggcgggccgcgctggccagatcgccgcggagcagttgtccagcgagcacaatgccaaccaggaggctgtcaggcaggagctcatggcgcaacacccagatgatgctcagattgttgcgctcaagcatggggtctggagagtgaggggcctcatacaggtgtctagatcaatcggtgatgtatacctgaaacatgcaaagtataacacagaccagatcaaacccaagttcaggcttcccgaatcattcagcaagccactattgagtgccgatccatctatcatctcccgcgatcttgaaccaaatgactgtttcatcatattcgcatcagatggattgtgggagcacctcagcaatcaagaagccgttgagattgttcacagccatcaacgtgctggaagcgcaagaagactcattaaagccgctctacaagaagcagcgcggaagcgtgagatgcgttactcggatcttacaaagatcgataagaaagttcgcaggcatttccatgatgacattactgtcatcgtcttatttataaactatgacctattattgaaaggtgctccgcagggacaacccctctccatcagatgtgccctagattattga

SEQ ID NO: 141610 - protein, 379 aa, Zea mays; identical to SEQ ID NO: 69010

SEQ ID NO: 141611 - DNA, 1074 bp, Zea mays; identical to SEQ ID NO: 1602
  CDS (1)..(1074)

SEQ ID NO: 141612 - protein, 357 aa, Zea mays; identical to SEQ ID NO: 1603

SEQ ID NO: 141613 - DNA, 978 bp, Zea mays
  CDS (1)..(978)
atgatcggcggcgggcgggcagcggatagccacccggcgtcctgctcgtcctcgtcctcgtcttcctcctcgccgtcaggcccgtcgacggggggctcccgccttcaccgcagcaagaggcgtcccgacatcctcaacatgctcatgagtgcagcatgtctcagttcatcatcttctgatactggaaaaggacaaagcaagttttcaagcaacaaagtaacacacggatttcacttagtggaaggaagatctggccatgatatggaagactaccatgtagcagagtatagatatgaaaatgatcacgaacttggtctttttgctatttatgatggacatctgggagatagtgtggccagttatttgaaagctaatctttttgacaacatactgaaagagcctctcttttggtcagaccctcaagaagcaattaaaaacgcatacagctctacaaacaaatatattctggaaaacactaggcaactaggaccaggggggtcaacagcagtcactgctattgtagttgatggtacagatatgtggattgcaaatataggtgattcaagagctgttttgtctgaaactggtactgccagccaggttactgttgatcacgaacctcataccactaatgaacgaaagaggatagaagaaaaaggtggttttgtctctacgttccccggtgacgttcctcgtgtaaacggccaacttgcggttgcaagagcatttggtgatcagagcctcaaggcacacttgagctcagagcctgatgttaagcatataaagataaattcaagcacagagtttgtcatacttgccagtgacgggttatggaaggtaatgaagaaccaggaagccgttgatctggtgaagtcaaccaaggacccgcaaacagcggcgaagcgactgacgtccgaggccctgggaaggatgagcaaggacgatatctcatgcattgtcatccgttttcgatgctga

SEQ ID NO: 141614 - protein, 325 aa, Zea mays
MIGGGRAADSHPASCSSSSSSSSSPSGPSTGGSRLHRSKRRPDILNMLMSAACLSSSSSDTGKGQSKFSSNKVTHGFHLVEGRSGHDMEDYHVAEYRYENDHELGLFAIYDGHLGDSVASYLKANLFDNILKEPLFWSDPQEAIKNAYSSTNKYILENTRQLGPGGSTAVTAIVVDGTDMWIANIGDSRAVLSETGTASQVTVDHEPHTTNERKRIEEKGGFVSTFPGDVPRVNGQLAVARAFGDQSLKAHLSSEPDVKHIKINSSTEFVILASDGLWKVMKNQEAVDLVKSTKDPQTAAKRLTSEALGRMSKDDISCIVIRFRC

SEQ ID NO: 141615 - DNA, 1341 bp, Zea mays; identical to SEQ ID NO: 18216
  CDS (1)..(1341)

SEQ ID NO: 141616 - protein, 446 aa, Zea mays; identical to SEQ ID NO: 18217

SEQ ID NO: 141617 - DNA, 1173 bp, Zea mays; identical to SEQ ID NO: 69259
  CDS (1)..(1173)

SEQ ID NO: 141618 - protein, 390 aa, Zea mays; identical to SEQ ID NO: 69260

SEQ ID NO: 141619 - DNA, 1341 bp, Zea mays; identical to SEQ ID NO: 1604
  CDS (1)..(1341)

SEQ ID NO: 141620 - protein, 446 aa, Zea mays; identical to SEQ ID NO: 1605

SEQ ID NO: 141621 - DNA, 1218 bp, Zea mays; identical to SEQ ID NO: 1606
  CDS (1)..(1218)

SEQ ID NO: 141622 - protein, 405 aa, Zea mays; identical to SEQ ID NO: 817

SEQ ID NO: 141623 - DNA, 1164 bp, Zea mays; identical to SEQ ID NO: 69261
  CDS (1)..(1164)

SEQ ID NO: 141624 - protein, 387 aa, Zea mays; identical to SEQ ID NO: 69262

SEQ ID NO: 141625 - DNA, 1065 bp, Zea mays; identical to SEQ ID NO: 1048
  CDS (1)..(1065)

SEQ ID NO: 141626 - protein, 354 aa, Zea mays; identical to SEQ ID NO: 1049

SEQ ID NO: 141627 - DNA, 1167 bp, Zea mays; identical to SEQ ID NO: 1050
  CDS (1)..(1167)

SEQ ID NO: 141628 - protein, 388 aa, Zea mays; identical to SEQ ID NO: 1051

SEQ ID NO: 141629 - DNA, 1518 bp, Zea mays; identical to SEQ ID NO: 1052
  CDS (1)..(1518)

SEQ ID NO: 141630 - protein, 505 aa, Zea mays; identical to SEQ ID NO: 1053

SEQ ID NO: 141631 - DNA, 1290 bp, Zea mays; identical to SEQ ID NO: 22241
  CDS (1)..(1290)

SEQ ID NO: 141632 - protein, 429 aa, Zea mays; identical to SEQ ID NO: 18137

SEQ ID NO: 141633 - DNA, 20 bp, Artificial sequence
  primer
atgcccaagatctgctgctc

SEQ ID NO: 141634 - DNA, 22 bp, Artificial sequence
  primer
tcatctaaaccggacaacaatg

SEQ ID NO: 141635 - protein, 464 aa, Artificial sequence
  consensus sequence
  Variant (2)..(9): Xaa in position 2 to 9 is any amino acid
  Variant (10)..(17): Xaa in position 10 to 17 is any or no amino acid
  Variant (20)..(35): Xaa in position 20 to 35 is any amino acid
  Variant (36)..(61): Xaa in position 36 to 61 is any or no amino acid
  Variant (65)..(65): Xaa in position 65 is any amino acid
  Variant (66)..(67): Xaa in position 66 to 67 is any or no amino acid
  Variant (69)..(78): Xaa in position 69 to 78 is any amino acid
  Variant (80)..(99): Xaa in position 80 to 99 is any amino acid
  Variant (100)..(132): Xaa in position 100 to 132 is any or no amino acid
  Variant (134)..(143): Xaa in position 134 to 143 is any amino acid
  Variant (144)..(193): Xaa in position 144 to 193 is any or no amino acid
  Variant (195)..(195): Xaa in position 195 is any amino acid
  Variant (197)..(209): Xaa in position 197 to 209 is any amino acid
  Variant (210)..(217): Xaa in position 210 to 217 is any or no amino acid
  Variant (220)..(220): Xaa in position 220 is any amino acid
  Variant (225)..(225): Xaa in position 225 is any amino acid
  Variant (227)..(238): Xaa in position 227 to 238 is any amino acid
  Variant (239)..(253): Xaa in position 239 to 253 is any or no amino acid
  Variant (256)..(258): Xaa in position 256 to 258 is any amino acid
  Variant (259)..(266): Xaa in position 259 to 266 is any or no amino acid
  Variant (268)..(271): Xaa in position 268 to 271 is any amino acid
  Variant (272)..(274): Xaa in position 272 to 274 is any or no amino acid
  Variant (277)..(282): Xaa in position 277 to 282 is any amino acid
  Variant (283)..(296): Xaa in position 283 to 296 is any or no amino acid
  Variant (298)..(298): Xaa in position 298 is any amino acid
  Variant (300)..(302): Xaa in position 300 to 302 is any amino acid
  Variant (304)..(304): Xaa in position 304 is any amino acid
  Variant (305)..(305): Xaa in position 305 is any or no amino acid
  Variant (308)..(310): Xaa in position 308 to 310 is any amino acid
  Variant (312)..(317): Xaa in position 312 to 317 is any amino acid
  Variant (318)..(345): Xaa in position 318 to 345 is any or no amino acid
  Variant (347)..(351): Xaa in position 347 to 351 is any amino acid
  Variant (352)..(364): Xaa in position 352 to 364 is any or no amino acid
  Variant (366)..(366): Xaa in position 366 is any amino acid
  Variant (369)..(369): Xaa in position 369 is any amino acid
  Variant (371)..(405): Xaa in position 371 to 405 is any amino acid
  Variant (406)..(463): Xaa in position 406 to 463 is any or no amino acid
GXXXXXXXXXXXXXXXXEDXXXXXXXXXXXXXXXXXXXXXXXXXXXXXXXXXXXXXXXXXXDGHXXXGXXXXXXXXXXLXXXXXXXXXXXXXXXXXXXXXXXXXXXXXXXXXXXXXXXXXXXXXXXXXXXXXDXXXXXXXXXXXXXXXXXXXXXXXXXXXXXXXXXXXXXXXXXXXXXXXXXXXXXXXXXXXXGXTXXXXXXXXXXXXXXXXXXXXXANXGDSRXVXXXXXXXXXXXXXXXXXXXXXXXXXXXDHXXXXXXXXXXXEXXXXXXXGGXXXXXXXXXXXXXXXXXXXXGXLXXXRXXGDXXXKXXXXXXXXXXXXXXXXXXXXXXXXXXXXXXXXXXPXXXXXXXXXXXXXXXXXXAXDGXWXXXXXXXXXXXXXXXXXXXXXXXXXXXXXXXXXXXXXXXXXXXXXXXXXXXXXXXXXXXXXXXXXXXXXXXXXXXXXXXXXXXXXXXXXXXXXD

SEQ ID NO: 141636 - protein, 9 aa, Artificial sequence
  protein pattern
  Variant (3)..(3): Xaa in position 3 is any amino acid
  Variant (6)..(6): Xaa in position 6 is Cys or Ser
  Variant (8)..(8): Xaa in position 8 is Ala, Cys, Ser, Thr or Val
  Variant (9)..(9): Xaa in position 9 is Ile or Val
ANXGDXRXX

SEQ ID NO: 141637 - DNA, 1035 bp, Arabidopsis thaliana; identical to SEQ ID NO: 140893
  CDS (1)..(1035)

SEQ ID NO: 141638 - protein, 344 aa, Arabidopsis thaliana; identical to SEQ ID NO: 140894

SEQ ID NO: 141639 - DNA, 1526 bp, Sorghum bicolor; identical to SEQ ID NO: 140875
  CDS (127)..(1176)

SEQ ID NO: 141640 - protein, 349 aa, Sorghum bicolor; identical to SEQ ID NO: 140876

SEQ ID NO: 141641 - DNA, 1644 bp, Zea mays; identical to SEQ ID NO: 140843
  CDS (227)..(1270)

SEQ ID NO: 141642 - protein, 347 aa, Zea mays; identical to SEQ ID NO: 140844

SEQ ID NO: 141643 - DNA, 1514 bp, Zea mays subsp. mays; identical to SEQ ID NO: 140845
  CDS (127)..(1164)
  misc_feature (230)..(230): n is a, g, c or t

SEQ ID NO: 141644 - protein, 345 aa, Zea mays subsp. mays; identical to SEQ ID NO: 140846
  misc_feature (35)..(35): The Xaa at location 35 stands for Ala, Asp, Gly, or Val.

SEQ ID NO: 141645 - DNA, 1510 bp, Zea mays subsp. mays; identical to SEQ ID NO: 140849
  CDS (160)..(1188)

SEQ ID NO: 141646 - protein, 342 aa, Zea mays subsp. mays; identical to SEQ ID NO: 140850

SEQ ID NO: 141647 - DNA, 1440 bp, Triticum aestivum; identical to SEQ ID NO: 140853
  CDS (94)..(1113)

SEQ ID NO: 141648 - protein, 339 aa, Triticum aestivum; identical to SEQ ID NO: 140854

SEQ ID NO: 141649 - DNA, 1440 bp, Triticum aestivum; identical to SEQ ID NO: 140853
  CDS (118)..(1113)

SEQ ID NO: 141650 - protein, 331 aa, Triticum aestivum; identical to SEQ ID NO: 140856

SEQ ID NO: 141651 - DNA, 1406 bp, Glycine max; Cultivar Wye; identical to SEQ ID NO: 140865
  CDS (139)..(1125)
  misc_feature (1275)..(1275): k is g or t
  misc_feature (1276)..(1276): k is g or t
  misc_feature (1277)..(1277): k is g or t
  misc_feature (1278)..(1278): k is g or t
  misc_feature (1322)..(1322): s is g or c
  misc_feature (1323)..(1323): r is g or a

SEQ ID NO: 141652 - protein, 328 aa, Glycine max; Cultivar Wye; identical to SEQ ID NO: 140866

SEQ ID NO: 141653 - DNA, 1342 bp, Glycine max; identical to SEQ ID NO: 140867
  CDS (107)..(1099)

SEQ ID NO: 141654 - protein, 330 aa, Glycine max; identical to SEQ ID NO: 140868

SEQ ID NO: 141655 - DNA, 1151 bp, Glycine max; identical to SEQ ID NO: 140869
  CDS (71)..(1090)

SEQ ID NO: 141656 - protein, 339 aa, Glycine max; identical to SEQ ID NO: 140870

SEQ ID NO: 141657 - DNA, 1398 bp, Glycine max
  CDS (94)..(1089)
gcacgaggtgatttttgcttaattactaaaccaaaccatttcttattccctcatcgaaaccttttctttctatatatttcccttttcaatatcatggcacctaacatcaccaccgttgttgccaatgccaccactgagcaattacccaaagctcatggaggaagtagtgggcgtgcctttgtgacttttcttgctggaaacggtgattatgtaaagggtgttgtgggtttggccaaaggactgagaaaggccaaaagcatgtaccctttggtggttgctgtgttaccagatgttcctgaagaacatcgtgcgattctcaaatcccaaggttgcattgtcagggagattgaacctgtgtaccctcctaagaaccagacccagttcgccatggcctattatgtcatcaattactccaagctacgtatttgggagttcgtggagtaccagaagatgatatacctagacggcgacatccaagtttttggaaacattgaccacttgtttgatcttcctaataattatttctatgcggtgatggattgtttctgcgagaagacttggagccacacccctcagttccagattgggtactgccaacagtgccctgataaggttcaatggccctctcactttggtaccaaacctcctctatatttcaatgctggcatgtttgtttatgagcctaatctcaacacctaccgtcatcttctccaaactgtccaagtcatcaagcccacgtcctttgctgagcaggactttctgaacatgtacttcaaggacaagtacaagccaataccgaacgtgtacaaccttgtgctggccatgttgtggcgtcaccctgagaatgttgaacttgatcaagttcaagtggttcattactgtgctgctgggtctaagccttggaggttcactgggaaggaagagaacatggatagggaagatatcaagatgcttatgaagaagtggtgggacatatatgaagatgagacactggactacaataacaactctgtcaatgtggaacgtttcacatcagtactattggatgctgggggttttcagtttgtgccagcaccttctgctgcctaatatgattcacagctacaaattaaagtctaattaacgacaaagtatatatgtattgttatttgtttttgttttttttttcgtttttgggtcttatgaacgaaccacgtctatagttttaatttggatgacctttttgtatacaaagtcacatgtgacgtcttacagcttttgattattattaagatttaattatatgagtcctttacttaatttgttttcattgatcaagagttgtggatatatatatatatatatatatatctttaattttattaaatgaaattttaaggcaaaaaaaaaaaaaaaaaa

SEQ ID NO: 141658 - protein, 331 aa, Glycine max
MAPNITTVVANATTEQLPKAHGGSSGRAFVTFLAGNGDYVKGVVGLAKGLRKAKSMYPLVVAVLPDVPEEHRAILKSQGCIVREIEPVYPPKNQTQFAMAYYVINYSKLRIWEFVEYQKMIYLDGDIQVFGNIDHLFDLPNNYFYAVMDCFCEKTWSHTPQFQIGYCQQCPDKVQWPSHFGTKPPLYFNAGMFVYEPNLNTYRHLLQTVQVIKPTSFAEQDFLNMYFKDKYKPIPNVYNLVLAMLWRHPENVELDQVQVVHYCAAGSKPWRFTGKEENMDREDIKMLMKKWWDIYEDETLDYNNNSVNVERFTSVLLDAGGFQFVPAPSAA

SEQ ID NO: 141659 - DNA, 1417 bp, Glycine max; identical to SEQ ID NO: 140873
  CDS (213)..(1187)

SEQ ID NO: 141660 - protein, 324 aa, Glycine max; identical to SEQ ID NO: 140874

SEQ ID NO: 141661 - DNA, 1005 bp, Arabidopsis thaliana; identical to SEQ ID NO: 140887
  CDS (1)..(1005)

SEQ ID NO: 141662 - protein, 334 aa, Arabidopsis thaliana; identical to SEQ ID NO: 140888

SEQ ID NO: 141663 - DNA, 1008 bp, Arabidopsis thaliana; identical to SEQ ID NO: 140889
  CDS (1)..(1008)

SEQ ID NO: 141664 - protein, 335 aa, Arabidopsis thaliana; identical to SEQ ID NO: 140890

SEQ ID NO: 141665 - DNA, 999 bp, Arabidopsis thaliana; identical to SEQ ID NO: 140891
  CDS (1)..(999)

SEQ ID NO: 141666 - protein, 332 aa, Arabidopsis thaliana; identical to SEQ ID NO: 140892

SEQ ID NO: 141667 - DNA, 1005 bp, Arabidopsis thaliana; identical to SEQ ID NO: 140841
  CDS (1)..(1005)

SEQ ID NO: 141668 - protein, 334 aa, Arabidopsis thaliana; identical to SEQ ID NO: 140842

SEQ ID NO: 141669 - DNA, 1002 bp, Arabidopsis thaliana; identical to SEQ ID NO: 140895
  CDS (1)..(1002)

SEQ ID NO: 141670 - protein, 333 aa, Arabidopsis thaliana; identical to SEQ ID NO: 140896

SEQ ID NO: 141671 - DNA, 1011 bp, Arabidopsis thaliana; identical to SEQ ID NO: 140897
  CDS (1)..(1011)

SEQ ID NO: 141672 - protein, 336 aa, Arabidopsis thaliana; identical to SEQ ID NO: 140898

SEQ ID NO: 141673 - DNA, 987 bp, Arabidopsis thaliana; identical to SEQ ID NO: 140899
  CDS (1)..(987)

SEQ ID NO: 141674 - protein, 328 aa, Arabidopsis thaliana; identical to SEQ ID NO: 140900

SEQ ID NO: 141675 - DNA, 987 bp, Ammopiptanthus mongolicus; identical to SEQ ID NO: 140901
  CDS (1)..(987)

SEQ ID NO: 141676 - protein, 328 aa, Ammopiptanthus mongolicus; identical to SEQ ID NO: 140902

SEQ ID NO: 141677 - DNA, 1014 bp, Xerophyta viscosa; identical to SEQ ID NO: 140903
  CDS (1)..(1014)

SEQ ID NO: 141678 - protein, 337 aa, Xerophyta viscosa; identical to SEQ ID NO: 140904

SEQ ID NO: 141679 - DNA, 1026 bp, Oryza sativa subsp; identical to SEQ ID NO: 140905
  CDS (1)..(1026)

SEQ ID NO: 141680 - protein, 341 aa, Oryza sativa subsp; identical to SEQ ID NO: 140906

SEQ ID NO: 141681 - DNA, 984 bp, Oryza sativa subsp; identical to SEQ ID NO: 140907
  CDS (1)..(984)

SEQ ID NO: 141682 - protein, 327 aa, Oryza sativa subsp; identical to SEQ ID NO: 140908

SEQ ID NO: 141683 - DNA, 951 bp, Oryza sativa subsp; identical to SEQ ID NO: 140909
  CDS (1)..(951)

SEQ ID NO: 141684 - protein, 316 aa, Oryza sativa subsp; identical to SEQ ID NO: 140910

SEQ ID NO: 141685 - DNA, 960 bp, Triticum aestivum; identical to SEQ ID NO: 140911
  CDS (1)..(960)

SEQ ID NO: 141686 - protein, 319 aa, Triticum aestivum; identical to SEQ ID NO: 140912

SEQ ID NO: 141687 - DNA, 972 bp, Triticum aestivum; identical to SEQ ID NO: 140913
  CDS (1)..(972)

SEQ ID NO: 141688 - protein, 323 aa, Triticum aestivum; identical to SEQ ID NO: 140914

SEQ ID NO: 141689 - DNA, 978 bp, Vitis vinifera; identical to SEQ ID NO: 140915
  CDS (1)..(978)

SEQ ID NO: 141690 - protein, 325 aa, Vitis vinifera; identical to SEQ ID NO: 140916

SEQ ID NO: 141691 - DNA, 978 bp, Vitis vinifera; identical to SEQ ID NO: 140917
  CDS (1)..(978)
  misc_feature (84)..(84): w is a or t

SEQ ID NO: 141692 - protein, 325 aa, Vitis vinifera; identical to SEQ ID NO: 140918

SEQ ID NO: 141693 - DNA, 1029 bp, Vitis vinifera; identical to SEQ ID NO: 140919
  CDS (1)..(1029)
  misc_feature (67)..(67): r is g or a
  misc_feature (675)..(675): s is g or c

SEQ ID NO: 141694 - protein, 342 aa, Vitis vinifera; identical to SEQ ID NO: 140920
  misc_feature (225)..(225): The Xaa at location 225 stands for Arg, or Ser.

SEQ ID NO: 141695 - DNA, 1011 bp, Capsicum annuum; identical to SEQ ID NO: 140923
  CDS (1)..(1011)

SEQ ID NO: 141696 - protein, 336 aa, Capsicum annuum; identical to SEQ ID NO: 140924

SEQ ID NO: 141697 - DNA, 1005 bp, Arabidopsis thaliana; identical to SEQ ID NO: 140953
  CDS (1)..(1005)

SEQ ID NO: 141698 - protein, 334 aa, Arabidopsis thaliana; identical to SEQ ID NO: 140954

SEQ ID NO: 141699 - DNA, 1020 bp, Medicago truncatula
  CDS (1)..(1020)
atggcaccagagcttgttccaaccgctgcaaaatcagttaccggattcacgaagccagtgacgataccaaaacgtgcgtatgtaacgtttcttgccggtaacggtgattacgtgaaaggtgtaataggtttggcgaaaggtttgcggaaggtgatgacggcgtatccgctggttgtggcggtgcttccagatgtaccggaggaacaccgtgagatgttggaagctcagggatgtattgtccgtgagattgaaccggttaacccacccgaaaatcagactcagtttgctatggcgtattacgtcatcaattattccaaactccgtatatgggagtttgtggaatacagcaagatgatatacttggacggagacattcaagtttatgaaaacatagaccatctctttgatctaccagatggtcatttctacgctgttatggattgtttttgcgagagaacttggagtcacacaccacaatacaaaatcggttattgtcaacaatgtccagaaaaagttcattggccaaaggaaatgggtcaacctccttcactttacttcaatgctggcatgttcctgtttgagccaagcattgatacttaccacgatcttttgaagacacttaaagttactcctcctactccttttgctgaacaagatttcttgaatatgtatttcaaggatatttataagccaatcccatttgtttacaatcttgttcttgctatgttatggcgtcaccctgaaaatgttgagcttcataaagtcaaggttgttcactattgtgcagcgggatcaaagccttggagatacacagggaaggaagaaaacatgcaaagggaggatataagaatgctagtcaagaaatggtgggatatttacaatgattcatctcttgattacaacaagaatttgagtggaagtggtgaagtacaaacgaatggttttgaaattgagccattcgtacaagcattgtctgaggtaggtcgtgttcaatatgtcacagcaccttcagcagcttaa

SEQ ID NO: 141700 - protein, 339 aa, Medicago truncatula
MAPELVPTAAKSVTGFTKPVTIPKRAYVTFLAGNGDYVKGVIGLAKGLRKVMTAYPLVVAVLPDVPEEHREMLEAQGCIVREIEPVNPPENQTQFAMAYYVINYSKLRIWEFVEYSKMIYLDGDIQVYENIDHLFDLPDGHFYAVMDCFCERTWSHTPQYKIGYCQQCPEKVHWPKEMGQPPSLYFNAGMFLFEPSIDTYHDLLKTLKVTPPTPFAEQDFLNMYFKDIYKPIPFVYNLVLAMLWRHPENVELHKVKVVHYCAAGSKPWRYTGKEENMQREDIRMLVKKWWDIYNDSSLDYNKNLSGSGEVQTNGFEIEPFVQALSEVGRVQYVTAPSAA

SEQ ID NO: 141701 - DNA, 1047 bp, Zea mays; identical to SEQ ID NO: 140883
  CDS (1)..(1047)

SEQ ID NO: 141702 - protein, 348 aa, Zea mays; identical to SEQ ID NO: 140884

SEQ ID NO: 141703 - DNA, 1035 bp, Zea mays; identical to SEQ ID NO: 140881
  CDS (1)..(1035)

SEQ ID NO: 141704 - protein, 344 aa, Zea mays; identical to SEQ ID NO: 140882

SEQ ID NO: 141705 - DNA, 1038 bp, Zea mays; identical to SEQ ID NO: 140885
  CDS (1)..(1038)

SEQ ID NO: 141706 - protein, 345 aa, Zea mays; identical to SEQ ID NO: 140886

SEQ ID NO: 141707 - DNA, 1002 bp, Fagopyrum esculentum; identical to SEQ ID NO: 140955
  CDS (1)..(1002)

SEQ ID NO: 141708 - protein, 333 aa, Fagopyrum esculentum; identical to SEQ ID NO: 140956

SEQ ID NO: 141709 - DNA, 1065 bp, Fagopyrum esculentum; identical to SEQ ID NO: 140957
  CDS (1)..(1065)

SEQ ID NO: 141710 - protein, 354 aa, Fagopyrum esculentum; identical to SEQ ID NO: 140958

SEQ ID NO: 141711 - DNA, 987 bp, Glycine max; identical to SEQ ID NO: 140959
  CDS (1)..(987)

SEQ ID NO: 141712 - protein, 328 aa, Glycine max; identical to SEQ ID NO: 140960

SEQ ID NO: 141713 - DNA, 978 bp, Medicago sativa; identical to SEQ ID NO: 140961
  CDS (1)..(978)

SEQ ID NO: 141714 - protein, 325 aa, Medicago sativa; identical to SEQ ID NO: 140962

SEQ ID NO: 141715 - DNA, 996 bp, Cucumis sativus; identical to SEQ ID NO: 140963
  CDS (1)..(996)

SEQ ID NO: 141716 - protein, 331 aa, Cucumis sativus; identical to SEQ ID NO: 140964

SEQ ID NO: 141717 - DNA, 1014 bp, Thellungiella halophila; identical to SEQ ID NO: 140965
  CDS (1)..(1014)

SEQ ID NO: 141718 - protein, 337 aa, Thellungiella halophila; identical to SEQ ID NO: 140966

SEQ ID NO: 141719 - DNA, 996 bp, Cucumis melo; identical to SEQ ID NO: 140967
  CDS (1)..(996)

SEQ ID NO: 141720 - protein, 331 aa, Cucumis melo; identical to SEQ ID NO: 140968

SEQ ID NO: 141721 - DNA, 999 bp, Cucumis melo; identical to SEQ ID NO: 140969
  CDS (1)..(999)

SEQ ID NO: 141722 - protein, 332 aa, Cucumis melo; identical to SEQ ID NO: 140970

SEQ ID NO: 141723 - DNA, 957 bp, Solanum lycopersicum; identical to SEQ ID NO: 140971
  CDS (1)..(957)

SEQ ID NO: 141724 - protein, 318 aa, Solanum lycopersicum; identical to SEQ ID NO: 140972

SEQ ID NO: 141725 - DNA, 1005 bp, Pisum sativum; identical to SEQ ID NO: 140973
  CDS (1)..(1005)

SEQ ID NO: 141726 - protein, 334 aa, Pisum sativum; identical to SEQ ID NO: 140974

SEQ ID NO: 141727 - DNA, 1002 bp, Ajuga reptans; identical to SEQ ID NO: 140975
  CDS (1)..(1002)

SEQ ID NO: 141728 - protein, 333 aa, Ajuga reptans; identical to SEQ ID NO: 140976

SEQ ID NO: 141729 - DNA, 1026 bp, Oryza sativa; identical to SEQ ID NO: 140977
  CDS (1)..(1026)

SEQ ID NO: 141730 - protein, 341 aa, Oryza sativa; identical to SEQ ID NO: 140978

SEQ ID NO: 141731 - DNA, 987 bp, Oryza sativa; identical to SEQ ID NO: 140979
  CDS (1)..(987)

SEQ ID NO: 141732 - protein, 328 aa, Oryza sativa; identical to SEQ ID NO: 140980

SEQ ID NO: 141733 - DNA, 1047 bp, Zea mays; identical to SEQ ID NO: 140987
  CDS (1)..(1047)

SEQ ID NO: 141734 - protein, 348 aa, Zea mays; identical to SEQ ID NO: 140988

SEQ ID NO: 141735 - DNA, 993 bp, Brassica napus; identical to SEQ ID NO: 140989
  CDS (1)..(993)

SEQ ID NO: 141736 - protein, 330 aa, Brassica napus; identical to SEQ ID NO: 140990

SEQ ID NO: 141737 - DNA, 1023 bp, Glycine max; identical to SEQ ID NO: 140991
  CDS (1)..(1023)

SEQ ID NO: 141738 - protein, 340 aa, Glycine max; identical to SEQ ID NO: 140992

SEQ ID NO: 141739 - DNA, 975 bp, Glycine max; identical to SEQ ID NO: 140993
  CDS (1)..(975)

SEQ ID NO: 141740 - protein, 324 aa, Glycine max; identical to SEQ ID NO: 140994

SEQ ID NO: 141741 - DNA, 993 bp, Glycine max
  CDS (1)..(993)
atgccacctaacatcaccaccgttgttgccaatgtcaccaccgagcaattacccaaggctcgtggaggaagtgggcgtgccttcgtgacctttcttgctgggaacggtgattacgtaaagggtgtcgtgggtttggccaaaggactgagaaaggccaaaagcatgtaccctttggtggttgctgtgttaccagatgttcctgaagaacatcgtgagattctcaaatcccaaggttgcattgtcagggagattgaacctgtgtaccctcctgagaaccagacccagttcgccatggcctattatgtcatcaattactccaagctacgtatttgggagttcgtggagtacaagaagacgatatacctagacggtgacatccaagtatttggaaacatagaccacttgtttgatctgcctgataattatttctatgcggtgatggattgtttctgcgagaagacttggagccacacccctcagttccagattgggtactgccaacagtgccctgataaggttcaatggccctctcactttggttccaaacctcctctatatttcaatgctggcatgtttgtttatgagcctaatctcgacacctaccgtgatcttctccaaactgtccaactcaccaagcccacttcttttgctgagcaggactttctcaacatgtacttcaaggacaagtacaagccaataccgaacatgtacaaccttgtgctggccatgttgtggcgtcaccctgaaaatgttgaacttgataaagttcaagtggttcattactgtgctgctgggtctaagccttggaggttcactgggaaggaagagaacatggatagggaagatatcaagatgcttgtgaagaagtggtgggacatatatgaagatgagacactggactacaataacaactctgtcaacgtggaacgtttcacatcggcactattggatgctgggggctttcagtttgtgccagcaccttctgctgcctaa

SEQ ID NO: 141742 - protein, 330 aa, Glycine max; identical to SEQ ID NO: 140872

SEQ ID NO: 141743 - DNA, 1038 bp, Zea mays; identical to SEQ ID NO: 140997
  CDS (1)..(1038)

SEQ ID NO: 141744 - protein, 345 aa, Zea mays; identical to SEQ ID NO: 140998

SEQ ID NO: 141745 - DNA, 1029 bp, Zea mays; identical to SEQ ID NO: 140999
  CDS (1)..(1029)

SEQ ID NO: 141746 - protein, 342 aa, Zea mays; identical to SEQ ID NO: 141000

SEQ ID NO: 141747 - DNA, 1035 bp, Zea mays; identical to SEQ ID NO: 141001
  CDS (1)..(1035)

SEQ ID NO: 141748 - protein, 344 aa, Zea mays; identical to SEQ ID NO: 141002

SEQ ID NO: 141749 - DNA, 23 bp, Artificial sequence
  primer
atggctccggggcttactcaaac

SEQ ID NO: 141750 - DNA, 20 bp, Artificial sequence
  primer
tcaagcagcggacggtgcgg

SEQ ID NO: 141751 - protein, 363 aa, Artificial sequence
  consensus sequence
  Variant (2)..(2): Xaa in position 2 is any amino acid
  Variant (4)..(15): Xaa in position 4 to 15 is any amino acid
  Variant (16)..(29): Xaa in position 16 to 29 is any or no amino acid
  Variant (39)..(39): Xaa in position 39 is any amino acid
  Variant (43)..(43): Xaa in position 43 is any amino acid
  Variant (57)..(59): Xaa in position 57 to 59 is any amino acid
  Variant (66)..(66): Xaa in position 66 is any amino acid
  Variant (72)..(73): Xaa in position 72 to 73 is any amino acid
  Variant (76)..(77): Xaa in position 76 to 77 is any amino acid
  Variant (79)..(80): Xaa in position 79 to 80 is any amino acid
  Variant (84)..(85): Xaa in position 84 to 85 is any amino acid
  Variant (94)..(94): Xaa in position 94 is any amino acid
  Variant (122)..(123): Xaa in position 122 to 123 is any amino acid
  Variant (125)..(125): Xaa in position 125 is any amino acid
  Variant (129)..(129): Xaa in position 129 is any amino acid
  Variant (134)..(135): Xaa in position 134 to 135 is any amino acid
  Variant (139)..(139): Xaa in position 139 is any amino acid
  Variant (142)..(142): Xaa in position 142 is any amino acid
  Variant (144)..(147): Xaa in position 144 to 147 is any amino acid
  Variant (158)..(158): Xaa in position 158 is any amino acid
  Variant (164)..(164): Xaa in position 164 is any amino acid
  Variant (167)..(167): Xaa in position 167 is any amino acid
  Variant (176)..(176): Xaa in position 176 is any amino acid
  Variant (179)..(179): Xaa in position 179 is any amino acid
  Variant (182)..(184): Xaa in position 182 to 184 is any amino acid
  Variant (185)..(187): Xaa in position 185 to 187 is any or no amino acid
  Variant (189)..(190): Xaa in position 189 to 190 is any amino acid
  Variant (191)..(191): Xaa in position 191 is any or no amino acid
  Variant (193)..(193): Xaa in position 193 is any amino acid
  Variant (203)..(203): Xaa in position 203 is any amino acid
  Variant (206)..(208): Xaa in position 206 to 208 is any amino acid
  Variant (210)..(211): Xaa in position 210 to 211 is any amino acid
  Variant (212)..(212): Xaa in position 212 is any or no amino acid
  Variant (215)..(215): Xaa in position 215 is any amino acid
  Variant (217)..(219): Xaa in position 217 to 219 is any amino acid
  Variant (221)..(221): Xaa in position 221 is any amino acid
  Variant (224)..(224): Xaa in position 224 is any amino acid
  Variant (234)..(234): Xaa in position 234 is any amino acid
  Variant (236)..(237): Xaa in position 236 to 237 is any amino acid
  Variant (238)..(238): Xaa in position 238 is any or no amino acid
  Variant (240)..(240): Xaa in position 240 is any amino acid
  Variant (244)..(245): Xaa in position 244 to 245 is any amino acid
  Variant (260)..(261): Xaa in position 260 to 261 is any amino acid
  Variant (262)..(262): Xaa in position 262 is any or no amino acid
  Variant (264)..(265): Xaa in position 264 to 265 is any amino acid
  Variant (281)..(281): Xaa in position 281 is any amino acid
  Variant (284)..(284): Xaa in position 284 is any amino acid
  Variant (286)..(286): Xaa in position 286 is any amino acid
  Variant (289)..(289): Xaa in position 289 is any amino acid
  Variant (295)..(295): Xaa in position 295 is any amino acid
  Variant (298)..(298): Xaa in position 298 is any amino acid
  Variant (305)..(305): Xaa in position 305 is any amino acid
  Variant (307)..(308): Xaa in position 307 to 308 is any amino acid
  Variant (311)..(323): Xaa in position 311 to 323 is any amino acid
  Variant (324)..(348): Xaa in position 324 to 348 is any or no amino acid
  Variant (350)..(356): Xaa in position 350 to 356 is any amino acid
  Variant (357)..(358): Xaa in position 357 to 358 is any or no amino acid
MXPXXXXXXXXXXXXXXXXXXXXXXXXXXRAYVTFLAGXGDYXKGVVGLAKGLRKVXXXYPLVVAXLPDVPXXHRXXLXXQGCXXREIEPVYPXPENQTQFAMAYYVINYSKLRIWEFVEYXXMXYLDXDIQVXXNIDXLFXLXXXXFYAVMDCFCEXTWSHTXQYXIGYCQQCPXKVXWPXXXXXXGXXXPXLYFNAGMFVXEPXXXTXXXLLXTXXXTXPTXFAEQDFLNMXFXXXYXPIPXXYNLVLAMLWRHPENXXXLXXVKVVHYCAAGSKPWRXTGXEXNMXREDIKXLVXKWWDIYXDXXLDXXXXXXXXXXXXXXXXXXXXXXXXXXXXXXXXXXXXXXEXXXXXXXXXAPSAA

SEQ ID NO: 141752 - protein, 47 aa, Artificial sequence
  protein pattern
  Variant (2)..(3): Xaa in position 2 to 3 is any or no amino acid
  Variant (5)..(5): Xaa in position 5 is any amino acid
  Variant (6)..(7): Xaa in position 6 to 7 is any or no amino acid
  Variant (14)..(14): Xaa in position 14 is Ile or Leu
  Variant (23)..(23): Xaa in position 23 is any amino acid
  Variant (25)..(25): Xaa in position 25 is any amino acid
  Variant (26)..(26): Xaa in position 26 is Asp or Glu
  Variant (27)..(27): Xaa in position 27 is Phe or Tyr
  Variant (28)..(28): Xaa in position 28 is any amino acid
  Variant (29)..(29): Xaa in position 29 is Lys or Arg
  Variant (30)..(30): Xaa in position 30 is any amino acid
  Variant (31)..(31): Xaa in position 31 is Ile or Val
  Variant (35)..(35): Xaa in position 35 is Ala or Gly
  Variant (38)..(38): Xaa in position 38 is Glu or Gln
  Variant (40)..(40): Xaa in position 40 is Phe or Tyr
  Variant (41)..(41): Xaa in position 41 is Asp, Glu, Gly, Gln or Ser
  Variant (43)..(43): Xaa in position 43 is Ile or Val
  Variant (45)..(45): Xaa in position 45 is any amino acid
  Variant (47)..(47): Xaa in position 47 is Phe or Leu
NXXQXXXAMAYYVXNYSKLRIWXFXXXXXXXYLDXDIXVXXNXDXLX

SEQ ID NO: 141753 - protein, 42 aa, Artificial sequence
  protein pattern
  Variant (3)..(3): Xaa in position 3 is any or no amino acid
  Variant (5)..(5): Xaa in position 5 is any or no amino acid
  Variant (12)..(12): Xaa in position 12 is Ala or Ser
  Variant (17)..(17): Xaa in position 17 is Phe or Tyr
  Variant (20)..(20): Xaa in position 20 is any amino acid
  Variant (22)..(22): Xaa in position 22 is Ala, Asp, Glu or Gly
  Variant (25)..(25): Xaa in position 25 is Asp, Glu, Asn or Gln
  Variant (27)..(27): Xaa in position 27 is Ala, Asp or Glu
  Variant (30)..(31): Xaa in position 30 to 31 is any amino acid
  Variant (33)..(33): Xaa in position 33 is Ala, Ile or Val
  Variant (34)..(35): Xaa in position 34 to 35 is any amino acid
  Variant (37)..(37): Xaa in position 37 is any amino acid
  Variant (38)..(38): Xaa in position 38 is Ala, Asp or Glu
  Variant (39)..(39): Xaa in position 39 is Ile or Val
  Variant (41)..(41): Xaa in position 41 is Asp, Glu, Asn or Ser
KVXVXHYCAAGXKPWRXTGXEXNMXRXDIXXLXXXWXXXYXD

SEQ ID NO: 141754 - protein, 61 aa, Artificial sequence
  protein pattern
  Variant (3)..(3): Xaa in position 3 is Phe or Tyr
  Variant (10)..(11): Xaa in position 10 to 11 is any or no amino acid
  Variant (13)..(14): Xaa in position 13 to 14 is any or no amino acid
  Variant (16)..(17): Xaa in position 16 to 17 is any amino acid
  Variant (20)..(20): Xaa in position 20 is any amino acid
  Variant (23)..(23): Xaa in position 23 is Ala or Val
  Variant (28)..(28): Xaa in position 28 is Lys or Arg
  Variant (29)..(29): Xaa in position 29 is Ala, Thr or Val
  Variant (30)..(30): Xaa in position 30 is any amino acid
  Variant (31)..(31): Xaa in position 31 is Ala, Ser or Thr
  Variant (32)..(32): Xaa in position 32 is any amino acid
  Variant (33)..(33): Xaa in position 33 is His or Tyr
  Variant (36)..(36): Xaa in position 36 is Ile or Val
  Variant (39)..(39): Xaa in position 39 is any amino acid
  Variant (45)..(46): Xaa in position 45 to 46 is any amino acid
  Variant (49)..(50): Xaa in position 49 to 50 is any amino acid
  Variant (52)..(53): Xaa in position 52 to 53 is any amino acid
  Variant (57)..(57): Xaa in position 57 is Ile or Val
  Variant (58)..(58): Xaa in position 58 is Ala, Ile, Leu or Val
  Variant (59)..(59): Xaa in position 59 is Lys or Arg
RAXVTFLAGXXDXXYXXGVXGLXKGLRXXXXXXPLXVAXLPDVPXXHRXXLXXQGCXXXEI

SEQ ID NO: 141755 - protein, 19 aa, Artificial sequence
  protein pattern
  Variant (3)..(3): Xaa in position 3 is Pro or Ser
  Variant (4)..(5): Xaa in position 4 to 5 is any amino acid
  Variant (19)..(19): Xaa in position 19 is Cys or Asn
PIXXXYNLVLAMLWRHPEX

SEQ ID NO: 141756 - protein, 21 aa, Artificial sequence
  protein pattern
  Variant (2)..(2): Xaa in position 2 is Glu, Asn, Pro, Gln, Ser or Thr
  Variant (3)..(3): Xaa in position 3 is any amino acid
  Variant (5)..(5): Xaa in position 5 is Ala, Pro, Ser or Thr
  Variant (12)..(12): Xaa in position 12 is Phe or Met
  Variant (14)..(14): Xaa in position 14 is Ala, Ile, Leu or Val
  Variant (15)..(15): Xaa in position 15 is Phe, His or Tyr
  Variant (18)..(18): Xaa in position 18 is Cys, Asp, Gly, Asn or Ser
  Variant (19)..(20): Xaa in position 19 to 20 is any amino acid
  Variant (21)..(21): Xaa in position 21 is Thr or Val
GXXPXLYFNAGXFXXEPXXXX

SEQ ID NO: 141757 - protein, 24 aa, Artificial sequence
  protein pattern
  Variant (2)..(2): Xaa in position 2 is Ile or Leu
  Variant (3)..(6): Xaa in position 3 to 6 is any amino acid
  Variant (7)..(7): Xaa in position 7 is Ala, Ile, Leu or Val
  Variant (9)..(9): Xaa in position 9 is any or no amino acid
  Variant (11)..(11): Xaa in position 11 is any or no amino acid
  Variant (13)..(13): Xaa in position 13 is any amino acid
  Variant (16)..(16): Xaa in position 16 is Asp or Glu
  Variant (19)..(19): Xaa in position 19 is Phe or Tyr
  Variant (22)..(22): Xaa in position 22 is any amino acid
  Variant (23)..(23): Xaa in position 23 is Phe or Tyr
LXXXXXXTXPXTXFAXQDXLNXXF

SEQ ID NO: 141758 - DNA, 1182 bp, Arabidopsis thaliana
  CDS (1)..(1182)
atggagccaactaacgatgctgagacattggaaactcaaggagaggttacaaccgctatttggccgtcatctcaaatcctcaagacgactatcgatattccggggactctcagccatgacggcagatacatccagtacaatctatttgggcatatctttgaactccccgcaaagtataagccaccgattaggcctattggcagaggtgcttgtggcatcgtttgttcggctgtggactccgagaccaatgagaaggtagcaataaagaaaataacgcaagtatttgataacactatcgaagcaaagagaactcttcgtgaaatcaagcttcttcgtcacttcgatcatgagaatattgttgcaatcagagacgtaatcttgcctcctcagagagattcattcgaagatgtttacattgtgaatgaattgatggagtttgacctttatcgaaccttaaaatcagatcaagaactaaccaaagatcatggcatgtatttcatgtaccaaatcctgcgcggattaaagtacattcattcagccaatgtgctacacagagatctaaaaccaagcaatctcctcttgagtacacaatgtgacttaaagatttgtgatttcgggctcgctcgtgcaactcctgagagtaatttaatgactgagtatgttgtcacaagatggtaccgtgcacctgagcttctgttgggctcttctgactataccgcagcaatagatgtttggtctgttggctgtattttcatggaaataatgaaccgtgaaccgctcttcccggggaaagatcaagttaatcagcttcgtttgcttctggagctcattggcactccatctgaagaagagcttggatcgttgagtgaatacgctaagcgatacataaggcagcttcctacgcttcctcgccaatctttcactgagaaattcccgaacgtgcctcccttagcaatagacttggtggagaagatgctaacatttgatcctaaacagagaatctcagttaaagaagcacttgctcatccataccttagctcgtttcacgacattaccgatgaaccagagtgctcagagcccttcaatttcgatttagatgaacatccattctctgaggagcagtttagagagttaatctactgtgaagccctagctttcaaccctgaaaccagcaatgattga

SEQ ID NO: 141759 - protein, 393 aa, Arabidopsis thaliana
MEPTNDAETLETQGEVTTAIWPSSQILKTTIDIPGTLSHDGRYIQYNLFGHIFELPAKYKPPIRPIGRGACGIVCSAVDSETNEKVAIKKITQVFDNTIEAKRTLREIKLLRHFDHENIVAIRDVILPPQRDSFEDVYIVNELMEFDLYRTLKSDQELTKDHGMYFMYQILRGLKYIHSANVLHRDLKPSNLLLSTQCDLKICDFGLARATPESNLMTEYVVTRWYRAPELLLGSSDYTAAIDVWSVGCIFMEIMNREPLFPGKDQVNQLRLLLELIGTPSEEELGSLSEYAKRYIRQLPTLPRQSFTEKFPNVPPLAIDLVEKMLTFDPKQRISVKEALAHPYLSSFHDITDEPECSEPFNFDLDEHPFSEEQFRELIYCEALAFNPETSND

SEQ ID NO: 141760 - DNA, 1197 bp, Zea mays
  CDS (1)..(1197)
atggacggcggggggcagcccccggacaccgagatgtcggaggccggcgcgggcggcggagggcagccgccgcagcagccactgccgccggtgggcgggggcgtgatgttggacaacatccaggcgacgctcagccacggcggccgcttcatccagtacaacatcttcggcaacgtgttcgaggtcaccgccaagtacaagccccccgtcctccccatcggcaagggcgcctacggcatcgtctgctcggcgctcaactccgagacggcggagcaggtggccatcaagaagatcgccaacgccttcgacaacaagatcgatgccaagcgcacgctccgcgagatcaagctgctccgccacatggaccacgagaatattgttgcaataaggggaatcatacctcctgcgcagagggctgcattcaatgatgtgtatattgcatatgaattgatggatactgatctgcatcaaattattcgttcaaatcaagctttgtcagaggagcactgtcagtattttctttatcaaattcttcgtggcttgaagtatatacattcagcaaatgttcttcaccgtgacttgaagcctagcaatcttcttttgaatgcaaactgtgacctcaagatatgtgattttgggcttgctcgcaccacctcagaaactgattttatgactgaatatgttgtcacaagatggtatagagcaccagagcttttgttgaactcctcagaatatactgctgccatcgatgtgtggtctgtgggctgtatatttatggaactgatggaccgcaaacccttgtttcctggaagagaccatgtccatcagctacgtcttctaatggagctcattggcacgccaaatgagggtgatcttgattttgtaaatgaaaatgcaagaagatatatccgccaacttcctcgtcaccctagacagtccttacctgaaaaatttccacatgtacaacccttagcaattgacctggtggaaaagatgctgacttttgatcctagacagagaataactgttgaaggcgcacttgcacacccttacttggcatcacttcatgacataagtgatgagccaggctgctcaatgcccttcagctttgacttcgagcagcatgcattgtctgaagaacaaatgaaggatcttatctaccaagaggctcttgcattcaaccctgattatcagtag

SEQ ID NO: 141761 - protein, 398 aa, Zea mays
MDGGGQPPDTEMSEAGAGGGGQPPQQPLPPVGGGVMLDNIQATLSHGGRFIQYNIFGNVFEVTAKYKPPVLPIGKGAYGIVCSALNSETAEQVAIKKIANAFDNKIDAKRTLREIKLLRHMDHENIVAIRGIIPPAQRAAFNDVYIAYELMDTDLHQIIRSNQALSEEHCQYFLYQILRGLKYIHSANVLHRDLKPSNLLLNANCDLKICDFGLARTTSETDFMTEYVVTRWYRAPELLLNSSEYTAAIDVWSVGCIFMELMDRKPLFPGRDHVHQLRLLMELIGTPNEGDLDFVNENARRYIRQLPRHPRQSLPEKFPHVQPLAIDLVEKMLTFDPRQRITVEGALAHPYLASLHDISDEPGCSMPFSFDFEQHALSEEQMKDLIYQEALAFNPDYQ

SEQ ID NO: 141762 - DNA, 1197 bp, Zea mays
  CDS (1)..(1197)
atggacggcggggggcagcccccggacacggagatgacagacgccggcttgggcggcggggggcaaccgccgccgccgccgcaacagccggcgggcggggccgggatgatggagaacatccacgcgacgctcagccacggtggccgcttcatccagtacaacatcttcggcaacgtgttcgaggtcacctccaagtacaagccccccatcctccccatcggcaagggcgcctacggcatcgtctgctcggcgctcaactccgagacggcagagcaggtggccatcaagaagatcgccaacgccttcgacaacaagatcgatgccaagcgcacgctccgcgagatcaagctgctccgccacatggaccacgagaatattgttgcaataagagatatcatacctcctccattgagggaggcattcaatgatgtgtatattgcctatgaattgatggatactgatctgcatcaaattattcgttcaaatcaagctttgtcagaggagcactgtcagtattttctttatcaaattcttcgtggcttgaagtatatacattcagcaaatgtccttcaccgtgacttgaagcctagcaatcttcttttgaatgcaaactgtgacctcaagatatgtgattttgggcttgctcgcaccacctcagaaactgattttatgactgaatatgttgtcacaagatggtatagagcaccagagcttttattgaactcctctgaatatactgctgccattgatgtgtggtctgtgggctgtatatttatggaactgatggaccgaaaacccttgtttcctggaagagatcatgtccatcagctacgtctactaatggagctcattggaacaccgaatgaggctgatcttgattttgtaaatgaaaatgcaagaagatatatccgccaacttccctgtcatgctagacagtccttccctgaaaaatttccacatgtacaacctttagcaattgacctagtggaaaagatgctaacttttgatcctagacagagaataactgttgaaggcgcacttgcacacccttacttggcatcacttcatgacataagtgatgagccagtctgctcaatgcccttcagcttcgacttcgagcagcatgcattatctgaagaacagatgaaggatctgatctaccaagaggctcttgcattcaacccagattaccagtag

SEQ ID NO: 141763 - protein, 398 aa, Zea mays; identical to SEQ ID NO: 140611

SEQ ID NO: 141764 - DNA, 1711 bp, Eucalyptus grandis
  CDS (351)..(1541)
gcagcagcaggcgcagcagaaaggaaacaaaaacagggaggaaaggaaaacgacctttcccactcaaaagctcctccctttttcatttgcatttctgcatccacacaggcacagggagacaaggggaccgagtcagtgagtcggaacggttgaccgcggaatctcccccccccaacaaaaagccatcgcccaactcaggccaacagtcaaaacccaccttaaccgaattcccccagatcaatcccctctctctctctcctccactgtaacggaatcgcgacccccaaatcctagggctttctttctctctctttctctctctatttctaccaccaccatcaccaccaccgatggacggcggggctcctcagccggcggataccgtcatgtcggaggcggcgccggcgcagcagcagcagcagcagccgcagcaggcgcagccgcaggggatcgagaacatcccagcgacgctcagccacgggggccgcttcatccagtacaacatcttcggcaacatcttcgaggtcaccgccaagtacaagccccccatcatgcccatcggcaagggcgcctacggcatcgtatgctcggctttgaattcggagacgaacgagcacgtggccataaagaagattgctaatgctttcgataacaagatcgatgcgaagaggactctccgtgagatcaagcttctccggcacatggaccatgaaaacgttgtggcaattagggatatcattccaccgccacagagagaggtgttcaatgatgtttatattgcatatgagcttatggacactgatctgcatcaaattattcgttccaaccaagcattgtctgaggagcattgtcagtattttctatatcagatcttgcgaggattaaaatacatacattctgcaaatgttctgcatagagacttgaagcccagcaatcttctcctaaatgcaaattgcgatttgaaaatatgtgattttggactagctcgtgtcacttctgaaactgattttatgacagaatatgttgtcacaagatggtaccgtgcaccagagctattgttaaattcttcagactatacggcggcaatagatgtatggtctgtaggctgtatctttatggaactaatggatcggaaacccttgtttcctggcagagaccatgtgcaacagctgcgtttgttgatggagctgattggcaccccatcagaggcagagttggggttcttaaatgaaaatgctaagaagtatatcagacagcttcctctgtaccgtcggcaatctttcactgaaaagtttccccatgtccacccacttgcaatcgatctcgttgagaagatgttaacgttcgatcccaggctgaggctcacagttgaagaggcattggctcatccctacctaaactcactgcacgacatcagcgatgagccgacttgcatgaatccattcaacttcgactttgagcagcatgcactcacggaggaacagatgagggagttaatttatagggaagcgcttgcatttaatcccgagtatctacagtaatggaagtcatgctgttagtatttggtggctgttctcgagtgtgatgcccgcgctttaacatggcgatgatttatttcttcatgtacatatggtttatcctattgttggatggctctgctattgaattcttttcatgacttcgagaaccataagaattttcaaaaaaaaaa

SEQ ID NO: 141765 - protein, 396 aa, Eucalyptus grandis
MDGGAPQPADTVMSEAAPAQQQQQQPQQAQPQGIENIPATLSHGGRFIQYNIFGNIFEVTAKYKPPIMPIGKGAYGIVCSALNSETNEHVAIKKIANAFDNKIDAKRTLREIKLLRHMDHENVVAIRDIIPPPQREVFNDVYIAYELMDTDLHQIIRSNQALSEEHCQYFLYQILRGLKYIHSANVLHRDLKPSNLLLNANCDLKICDFGLARVTSETDFMTEYVVTRWYRAPELLLNSSDYTAAIDVWSVGCIFMELMDRKPLFPGRDHVQQLRLLMELIGTPSEAELGFLNENAKKYIRQLPLYRRQSFTEKFPHVHPLAIDLVEKMLTFDPRLRLTVEEALAHPYLNSLHDISDEPTCMNPFNFDFEQHALTEEQMRELIYREALAFNPEYLQ

SEQ ID NO: 141766 - DNA, 1672 bp, Pinus radiata
  CDS (59)..(1231)
gtcaagggttcgatctacgctcggacatctttggctctgtttccctcagatttcagtgatggaggccgcagcagctccagttcaatcgacggacacgctcatgtccgacgcgccgcaggccgccgggtcgaatcccatggacagcatccctgcagtactcagtcacggtggccgcttcgtgcagtataatatctttgggaatatttttgaagtcacagccaagtacaaaccacctctgctgcctatcgggaaaggggcttacgggatcgtctgttctgcaatgaactctgagacaaaagagcaagttgccataaaaaagatagccaatgcctttgacaatcgcatagatgcaaagcgaactcttcgggaaatcaagttgctccgacatatggatcatgaaaatgtagttgccataagagacataatacctcctccacaaagagaagcctttgatgatgtatacattgcatatgagttaatggatactgatctccatcaaattattcgctccaatcaaggcttatctgaggagcactgtcagtactttttgtatcagattttgcgaggattgaaatatatacactctgcaaatgtccttcatagggacttgaagcccagcaatcttctactgaatgcaaattgtgatctgaagatatgtgattttgggctggctcggattacttctgaaaccgatttcatgaccgaatatgtggttaccagatggtatagagctccagaattgctgctgaattctgcagattatactgcagccattgatgtctggtcagtaggctgtattttcatggaattgatgaacagacaacccttattccctggaagggatcatgtgcatcagctgcgtttattgacagagttgattggcacaccaactgaggctgaccttggatttgttcggagtgataatgctagaagatttattcggcaactgccacagtatccgaggcagtcatttactcaaaaatttcctcacgtgcatgcattagcaattgatctttgtgaaaaaatgctgacatttgatccaaatcagaggatcacagtggaagaggcacttgcccatccgtacctggcaaatctacatgatatcagtgatgaacccatttgtgccatgccattcagctttgattttgagcagcataccttaacagaggatcagatgaaagagctgatctatagagaggctctggtttttaatccagagtatgcacagtaaagtaacattttgtgcagacagtggttacaactttgaaaattggaagctgggctattttcttgtttgtagcagtcatagtgttataaatatttattgagttttgggagcaatgtaaatatgtgtattaaaaccacatttgagtccagggcaagttgtaagggggataatgattgaaggggtgtaaagcatttatattggagtatgtcaacctgatatgctacaacttggtgagatgcattgtgcatgtatgagtcacagacctgaacactgcggtaaaactgtattatgctttattcttctttatcttcaaacttcaaggggttgtatgaagataatttttgttagaatataagtgaagaaaagttgagtctggcagtttgccacttttgtctaattctcctttcagataagtgatgaacttggacctttggctattgtgta

SEQ ID NO: 141767 - protein, 390 aa, Pinus radiata
MEAAAAPVQSTDTLMSDAPQAAGSNPMDSIPAVLSHGGRFVQYNIFGNIFEVTAKYKPPLLPIGKGAYGIVCSAMNSETKEQVAIKKIANAFDNRIDAKRTLREIKLLRHMDHENVVAIRDIIPPPQREAFDDVYIAYELMDTDLHQIIRSNQGLSEEHCQYFLYQILRGLKYIHSANVLHRDLKPSNLLLNANCDLKICDFGLARITSETDFMTEYVVTRWYRAPELLLNSADYTAAIDVWSVGCIFMELMNRQPLFPGRDHVHQLRLLTELIGTPTEADLGFVRSDNARRFIRQLPQYPRQSFTQKFPHVHALAIDLCEKMLTFDPNQRITVEEALAHPYLANLHDISDEPICAMPFSFDFEQHTLTEDQMKELIYREALVFNPEYAQ

SEQ ID NO: 141768 - DNA, 1191 bp, Bombyx mori
  CDS (1)..(1191)
atgccccacgcggctcccgtctccgccatgtcggccccgccgcgccacccacacttttataccgttgaggtcggcgacacacgcttcaccatcctcaagcgctaccagaacctcaaacccatcggctccggcgcccagggtattgtatgtgccgcatacgacacggtgacgcaacagaatgttgccataaagaagttatcgcgtccgtttcagaacgtgacgcacgcgaaaagagcttacagggagttcaaacttatgaaacttgtcaaccataaaaatataatcggtctgctaaacgcgttcacgccgcagaaaagcctcgaggagttccaagacgtttacctggttatggagctgatggacgctaatctgtgccaagtgattcagatggatctggatcacgaacggatgagctatctgctgtaccagatgctgtgcggcatcaaacacttgcacctcgccggaatcattcatcgggatctgaagccgtccaacatagtggtgaagagcgactgcacgctgaagatcctggacttcgggctggctcgcaccgccgggaccaccttcatgatgacgccctacgtcgtcacgcgctactaccgcgcgccggaggtgattttgggtatgggctacaccgagaacgtggacatctggtccgtgggctgcatcatgggggagatgatccgcggcggcgtgctgttccccggcaccgaccacatcgaccagtggaacaagatcatcgagcaactgggcacgccgtcggccgcgttcatgtcccggctgcagcccacggtccgcaactacgtcgagaacagaccgcgctactccgggtacagcttcgagcggctcttcccggacatactgttccccagcgacagcaacgaacacaaccgactcaaggcgtcgcaggcccgcgacctgctgtcgcgcatgctggtcatcgaccccgagcgccgcatctcagtggacgacgccctgctgcacccctacatcaacgtctggtacgacgaggtcgaggtcaacgcgcccgcgccggcctcatacgaccactcggtggacgaacgcgagcacaccgtggagcagtggaagcagctcatctaccaggaggtggtcgagtactccgcgccgccccaccccccgcccccgcaccccccgcccgccgaccacgcgcagcccgcattcaccacgtag

SEQ ID NO: 141769 - protein, 396 aa, Bombyx mori
MPHAAPVSAMSAPPRHPHFYTVEVGDTRFTILKRYQNLKPIGSGAQGIVCAAYDTVTQQNVAIKKLSRPFQNVTHAKRAYREFKLMKLVNHKNIIGLLNAFTPQKSLEEFQDVYLVMELMDANLCQVIQMDLDHERMSYLLYQMLCGIKHLHLAGIIHRDLKPSNIVVKSDCTLKILDFGLARTAGTTFMMTPYVVTRYYRAPEVILGMGYTENVDIWSVGCIMGEMIRGGVLFPGTDHIDQWNKIIEQLGTPSAAFMSRLQPTVRNYVENRPRYSGYSFERLFPDILFPSDSNEHNRLKASQARDLLSRMLVIDPERRISVDDALLHPYINVWYDEVEVNAPAPASYDHSVDEREHTVEQWKQLIYQEVVEYSAPPHPPPPHPPPADHAQPAFTT

SEQ ID NO: 141770 - DNA, 1077 bp, Aedes aegypti; identical to SEQ ID NO: 140178
  CDS (1)..(1077)

SEQ ID NO: 141771 - protein, 358 aa, Aedes aegypti; identical to SEQ ID NO: 140179

SEQ ID NO: 141772 - DNA, 1629 bp, Arabidopsis thaliana
  CDS (1)..(1629)
atgggttgtgtgaattctaggcataggccttttagaagaaagtcaacaacactgaaagagtcatcagaggagaaacgttcctctcggattgattcgtcgaggaggattgatgattggattcaaccggaagatgggtttgatagattgagtaacagtggagatgctaaagttaggttgattgaatccgaaatgtttagtacaagtaggtgtcatgatcatcagattgggaagatattagagaatcctgcgacagttgctcatatggatagagttgtgcatgatcaggaattgagaagggcctctagtgctgttgtagactcggacttggatattgatccaaaggttgttaaggccaagctagatagatggaatagcaaagattccaaagttcggttgattgaatctgaaaagttgagttctagcatgttttctgagcatcatcagatagagaagggagtagagaaacctgaggttgaagcttcggttcgagtggttcatcgggaactgaagaggggttcaagcattgttagtccaaaggatgcagagcggaagcaagtggcagcaggatggccgtcttggctggtctctgttgctggtgagtcactagtggattgggctccacgacgagcaaatacttttgaaaagctggagaaaattggccaaggaacatatagcagcgtatacagagctcgcgatcttcttcataacaagattgttgcgctaaaaaaagtccggtttgatcttaacgatatggaaagtgttaagtttatggcaagagagatcatagtaatgcgacggcttgatcatcctaatgtcctgaaattggaaggattgatcactgcccctgtctcatcgtccctttacttagtttttgagtacatggatcatgatctcttaggactttcttcactacctggtgtcaagtttacagagcctcaggttaaatgttacatgcgacaacttctaagtgggcttgaacattgtcacagccgtggcgttcttcaccgtgatataaaaggctcaaacctactaattgacagtaagggagtcttgaagatagcagattttgggttagcaacttttttcgaccctgcaaaaagtgtttcattgactagccatgttgtcactctttggtaccggccaccagaacttttgcttggagcctctcattacggtgttggggttgatttatggagcacaggttgcatcttaggtgaattatatgccggtaaaccgatcctccctggaaaaaccgaggtagaacaattgcataaaatcttcaagctttgcggttcaccaacagaaaattactggagaaaacagaagttaccatcttcagctggattcaaaaccgcgattccttataggcggaaagtatcagagatgtttaaggactttcctgcaagtgttctttcacttttagagactttactctccatagatcctgatcaccggagctctgcagatcgtgcccttgagagtgagtacttcaaaaccaagccgtttgcttgcgatccatcgaacttaccaaaatatcctcctagtaaagagattgatgcgaaaatgcgtgatgaagcgaaaaggcaacaacctatgagggcggagaaacaagaagacaagactctatga

SEQ ID NO: 141773 - protein, 542 aa, Arabidopsis thaliana
MGCVNSRHRPFRRKSTTLKESSEEKRSSRIDSSRRIDDWIQPEDGFDRLSNSGDAKVRLIESEMFSTSRCHDHQIGKILENPATVAHMDRVVHDQELRRASSAVVDSDLDIDPKVVKAKLDRWNSKDSKVRLIESEKLSSSMFSEHHQIEKGVEKPEVEASVRVVHRELKRGSSIVSPKDAERKQVAAGWPSWLVSVAGESLVDWAPRRANTFEKLEKIGQGTYSSVYRARDLLHNKIVALKKVRFDLNDMESVKFMAREIIVMRRLDHPNVLKLEGLITAPVSSSLYLVFEYMDHDLLGLSSLPGVKFTEPQVKCYMRQLLSGLEHCHSRGVLHRDIKGSNLLIDSKGVLKIADFGLATFFDPAKSVSLTSHVVTLWYRPPELLLGASHYGVGVDLWSTGCILGELYAGKPILPGKTEVEQLHKIFKLCGSPTENYWRKQKLPSSAGFKTAIPYRRKVSEMFKDFPASVLSLLETLLSIDPDHRSSADRALESEYFKTKPFACDPSNLPKYPPSKEIDAKMRDEAKRQQPMRAEKQEDKTL

SEQ ID NO: 141774 - DNA, 1095 bp, Bombyx mori; identical to SEQ ID NO: 140112
  CDS (1)..(1095)

SEQ ID NO: 141775 - protein, 364 aa, Bombyx mori; identical to SEQ ID NO: 140113

SEQ ID NO: 141776 - DNA, 1083 bp, Bombyx mori
  CDS (1)..(1083)
atgcctcgtttccataaagtagaaattaataaaactgaatggatagtcccggagcgatatcagatgcttacacctgtaggttccggcgcttacggtcaggtttgttctgcaatagatgcccaacatagtatgaaagtggctattaaaaagttagccagaccttttcaatcagctgttcatgcaaagagaacatacagagagttgcgaatgttgaaacatatgaaccatgagaatgttattggattgctggatgtgtttacaccggagaaaacattagaagattttcagcaagtatacttagtgacccatctaatgggtgctgatctgaataacatcgtacggacacagaagctttctgatgaccacgttcagtttctggtataccagattttacgtggactcaaatacatacattcggctggcatcattcatagggatttaaaaccctctaacatagctgtgaatgaggactgtgagttaaaaatcttagattttggcttggcgagacccactgagactgaaatgacaggttatgtggcaacaagatggtatcgtgcgccagagataatgctcaattggatgcattataaccaaactgtggacatttggtctgtgggttgtattatggctgagttgctgacaggaagaactttgttccccggtactgaccatattcatcaattgaatttaatcatggagatactcggcacgcccgctcaggagtttatgcagaaaatatcgtccgagtctgcacgtaactacatccagtctctgccggctttgaagagacgcgacttccgcgaggtgttccgcggcgcgaacccactcgccatcaacctgctggaactgatgctcgaactggatgccgataaacgcataacggcagaacaagcgctcgcgcacgagtacttggctcagtacgcggacccgaccgacgagccggtttctgcgccctacgaccagagcttcgaagacatggagctgcctgtagacaagtggaaagagctggtgtggaaagaagtagtggagtttaagccgcatccgcagcacatgaataccgtggtcgaggtgaacccatcgtaa

SEQ ID NO: 141777 - protein, 360 aa, Bombyx mori
MPRFHKVEINKTEWIVPERYQMLTPVGSGAYGQVCSAIDAQHSMKVAIKKLARPFQSAVHAKRTYRELRMLKHMNHENVIGLLDVFTPEKTLEDFQQVYLVTHLMGADLNNIVRTQKLSDDHVQFLVYQILRGLKYIHSAGIIHRDLKPSNIAVNEDCELKILDFGLARPTETEMTGYVATRWYRAPEIMLNWMHYNQTVDIWSVGCIMAELLTGRTLFPGTDHIHQLNLIMEILGTPAQEFMQKISSESARNYIQSLPALKRRDFREVFRGANPLAINLLELMLELDADKRITAEQALAHEYLAQYADPTDEPVSAPYDQSFEDMELPVDKWKELVWKEVVEFKPHPQHMNTVVEVNPS

SEQ ID NO: 141778 - DNA, 1677 bp, Oryza sativa (japonica cultivar-group)
  CDS (1)..(1677)
atggggtgcgtcttcgggcgcccgtcgtcgtcgccaccggcggcggcggcgaggaaggggaggaggaagaagaggtcgtccccgatgccggcaccctccacggactctcccgcggcggaccagtccccggggaggggaaggccgcgccggaggctgggacgcaagccggggcccaggcaggggtgcgtccccgcgccagcggccgcagagcagctcgccgcggggtggccgccgtggctcgtcgccgtcgccggggaggccctccgcgggtggacgccccgccgcgccgacaccttcgagaagctcaacaagatagggtcgggcacctatagcaacgtgtaccgcgcgagggacaccgtctccggccgcatcgtggcgctgaagaaggtccggttcgacaatctcgagcccgagagcgtcaaattcatggccagggagatcctgatcctgaggaaactcgaccatcccaatgttatcaagctggaggggttggtcacgtcgaggatgtcatgcagcctgtacctggtgttcgagtatatggagcatgaccttgctggcctggcagcgagcccggacgtcaagtttactctgccgcagataaaatgctatgtgcagcagctattgtcagggcttgagcattgccacaataataatgtattgcatcgggatatcaagggatcaaacttattgttggataacaatgggattcttaagatcgccgactttggcctggcaacattctttgacccacgacataaacgaccaatgacgagccgcgtggtcacgttgtggtaccggccacctgaattgttgttgggggcgacagactatggtgttggtgtggatttgtggagtgccgggtgcattctggcagagctcttgcatgggaagcccatcatgcctgggcgtactgaggtagaacagttgcacaagattttcaagctatgtggctccccctcagaggagtattggaaaaagtccaagctgccacatgctacaatattcaaacctcagcagccctataagcgttgtatcagagaagcatttaaagattttcctccatcttccttgccgttggttgaaactctgcttgcaattgatccagctgagcgccaaactgctacatctgccttgcaaagtgaattctttgcaactgagccttatgcatgtgatccatcaagcttgccgacatatccaccaagtaaggagatggatgctaagatgagagatgaggaagctagaaggctacgagcagctgcaaaggccaaaggagagggggtaaaaaggactcgaacgcgggatcgatctcaaagggcaggaccagctccagaggctaatgcagagcttcaagcaaacctagatcagaggcgacgcatgataacgcatgccaatgccaagagcaaaagtgagaagttccccccacctcatcaggatggagctatgggtaacccattgggatccagtcgtcatatggagcctatgtatgagcaccaggatgcttccttcagcacagtagtccccatccagaaggggtcctcacaaacatggtctggaccattggttgatccagcagctctagggcaatcgaggcggaagaagcaaactgccctagatgcgaaggctgcagcttattcaaagcagctccagaaggacaagggcggaacaagagcacgataa

SEQ ID NO: 141779 - protein, 558 aa, Oryza sativa (japonica cultivar-group)
MGCVFGRPSSSPPAAAARKGRRKKRSSPMPAPSTDSPAADQSPGRGRPRRRLGRKPGPRQGCVPAPAAAEQLAAGWPPWLVAVAGEALRGWTPRRADTFEKLNKIGSGTYSNVYRARDTVSGRIVALKKVRFDNLEPESVKFMAREILILRKLDHPNVIKLEGLVTSRMSCSLYLVFEYMEHDLAGLAASPDVKFTLPQIKCYVQQLLSGLEHCHNNNVLHRDIKGSNLLLDNNGILKIADFGLATFFDPRHKRPMTSRVVTLWYRPPELLLGATDYGVGVDLWSAGCILAELLHGKPIMPGRTEVEQLHKIFKLCGSPSEEYWKKSKLPHATIFKPQQPYKRCIREAFKDFPPSSLPLVETLLAIDPAERQTATSALQSEFFATEPYACDPSSLPTYPPSKEMDAKMRDEEARRLRAAAKAKGEGVKRTRTRDRSQRAGPAPEANAELQANLDQRRRMITHANAKSKSEKFPPPHQDGAMGNPLGSSRHMEPMYEHQDASFSTVVPIQKGSSQTWSGPLVDPAALGQSRRKKQTALDAKAAAYSKQLQKDKGGTRAR

SEQ ID NO: 141780 - DNA, 1209 bp, Oryza sativa (japonica cultivar-group)
  CDS (1)..(1209)
atggaccagccggcgccggcgccggagccgatgctgctcgacgcgcagccgcccgccgccgtcgcctgcgacaagaagcagcaggagggggaggcgccgtacgcggaggggaatgacgcggtgaccgggcacatcatctccaccaccatcgggggcaagaacggcgagcccaagaggacaattagctacatggcggagcgcgttgtgggcactggttctttcggtatcgtctttcaggctaaatgcttggagacaggagagactgttgccattaagaaggtattgcaggaccgacggtacaagaaccgtgagcttcagcttatgcgcgccatggaccaccccaatgtcatctccctgaagcattgcttcttctcaaccacaagtagggatgagctgttcctcaatcttgtcatggaatatgttccagaaacactctaccgtgtgcttaagcactacagcaatgccaaccaccggatgccacttatctacgtcaagctttacatgtatcagttatttagggggcttgcgtacattcatactgttccaggggtctgtcatagggatgtgaagccacaaaatgttttggtggatcctctaactcatcaagtcaagctctgtgactttgggagcgcaaaaacactggtcccaggtgaacccaatatatcatatatatgctcacgctactaccgagcaccggagctcatatttggtgcaactgaatatactacatcaatagatatatggtcagctgggtgtgttcttgcagagctactccttggtcagccattgtttccaggggagagtgcagtcgatcagcttgtagagataattaaggttcttggtacaccaacccgtgaggaaatacgttgcatgaacccgaactatacagagtttaggtttccacagataaaagctcacccttggcacaaggttttccacaagaggatgcctcctgaagcaatagacctcgcttcacgccttcttcaatattcaccgagtctccgctgcactgctcttgatgcatgtgcacatcctttctttgatgagctgcgagagccgaatgcacgcttgccaaacggacgtccatttccaccactattcaacttcaaacacgaactagcaaattcttctcaagagctcatcagcaggctcataccagaacatgttcgacggcaagctacccacaacttcttcaatactgggagctaa

SEQ ID NO: 141781 - protein, 402 aa, Oryza sativa (japonica cultivar-group)
MDQPAPAPEPMLLDAQPPAAVACDKKQQEGEAPYAEGNDAVTGHIISTTIGGKNGEPKRTISYMAERVVGTGSFGIVFQAKCLETGETVAIKKVLQDRRYKNRELQLMRAMDHPNVISLKHCFFSTTSRDELFLNLVMEYVPETLYRVLKHYSNANHRMPLIYVKLYMYQLFRGLAYIHTVPGVCHRDVKPQNVLVDPLTHQVKLCDFGSAKTLVPGEPNISYICSRYYRAPELIFGATEYTTSIDIWSAGCVLAELLLGQPLFPGESAVDQLVEIIKVLGTPTREEIRCMNPNYTEFRFPQIKAHPWHKVFHKRMPPEAIDLASRLLQYSPSLRCTALDACAHPFFDELREPNARLPNGRPFPPLFNFKHELANSSQELISRLIPEHVRRQATHNFFNTGS

SEQ ID NO: 141782 - DNA, 1725 bp, Oryza sativa (japonica cultivar-group)
  CDS (1)..(1725)
atgggctgcgtgcacggccgcccctccacctccagccccgccgccgccaacgcctcacgtcgccgcgaccacccgcctccgcctgcggaggcgcagaagcagggggcggatgcttctgcggaggcggatgctgctgcgggcgagaagggcgagcagccggccgtcgccgtcgccgcggcggggccgccggtgaagagggagcggcgctcgcggtcgtcgaggtcggcgcacgcgcacgcgcacgccgaggtgcgcatcggggggagcttcgcgaacaaggcgcgcggcgagcaggtggccgcgggctggcccgcctggctctccgccgtcgccggcgacgccatcgacggctggacccctcgccgcgccgactccttcgagaagatcgacaagatcgggcaaggcacgtacagcaacgtgtacaaggcgcgggactcggtgagcggcaagatcgtggcgctcaagaaggtgcgcttcgacaacctggagcccgagagcgtgcgcttcatggccagggagatcctcatcctccgccgcctcgaccaccccaatgtcatcaagctcgacggcctcgtcacctcccgcatgtcctgcagcctctacctcgtcttcgactacatggtccacgacctcgccggcctcgccgccagccccgagatcaagttcaccctgccccaggtcaagtgctatgtgcaccagctgttgtcgggattggagcactgccacgaccggggggtgctgcaccgcgacatcaaggggtcgaacctgcttttggacaacaatggcgtgctgaagatcggggactttggtctcgcgtcgttcttcgacccgaaccataagcagccgatgacgagtagggtggtgacgctctggtaccggccaccagagttgctgttgggcgcgacggattatggcgtaggcgtggacttgtggagcgcgggatgtatccttgctgaattgctcgcagggaaacctatcatgcctgggcggaccgaggtggaacagctgcataaaatttttaagttgtgtggttcccccacagaagaatattggaaaaaatcgaagttgcctcatgcaactatattcaagccccaacaaccttacaaaaggcgaatagctgatacattcaaagatttcccacaatcagcactgcgacttattgaaacactacttgcaatcgacccagctgatcgtttaacagcgacttctgcgttagaaagtgaattctttaaaacggaaccacatgcatgtgatccatcaagtttaccccaataccccccaagcaaagagatggatgcaaaacgaagagacgaagaagccagacgtttaagagctgctggtggtagagttaatggggaaggagctaggaagacaaggacaagggaaagacctagggctgttccagcaccggaagcaaatgctgagcttcaagcaaatattgataaaagaagactaataacacatgcaaatgcgaagagcaagagtgaaaagttccctccgccacatcaggatggcgcacttggatatcctttgggttgttcaaatcatatggaacctgcatttgagccgccagatccatcttcattcagcactgtgttcccctacgagaaaggctctgtgcctacttggtctggaccattggccgatccttcttcaggcaaccagaagcgaaaacacaagtctggccgctcttcaaaacaaccggctaccgcccgtgctcgatga

SEQ ID NO: 141783 - protein, 574 aa, Oryza sativa (japonica cultivar-group)
MGCVHGRPSTSSPAAANASRRRDHPPPPAEAQKQGADASAEADAAAGEKGEQPAVAVAAAGPPVKRERRSRSSRSAHAHAHAEVRIGGSFANKARGEQVAAGWPAWLSAVAGDAIDGWTPRRADSFEKIDKIGQGTYSNVYKARDSVSGKIVALKKVRFDNLEPESVRFMAREILILRRLDHPNVIKLDGLVTSRMSCSLYLVFDYMVHDLAGLAASPEIKFTLPQVKCYVHQLLSGLEHCHDRGVLHRDIKGSNLLLDNNGVLKIGDFGLASFFDPNHKQPMTSRVVTLWYRPPELLLGATDYGVGVDLWSAGCILAELLAGKPIMPGRTEVEQLHKIFKLCGSPTEEYWKKSKLPHATIFKPQQPYKRRIADTFKDFPQSALRLIETLLAIDPADRLTATSALESEFFKTEPHACDPSSLPQYPPSKEMDAKRRDEEARRLRAAGGRVNGEGARKTRTRERPRAVPAPEANAELQANIDKRRLITHANAKSKSEKFPPPHQDGALGYPLGCSNHMEPAFEPPDPSSFSTVFPYEKGSVPTWSGPLADPSSGNQKRKHKSGRSSKQPATARAR

SEQ ID NO: 141784 - DNA, 1053 bp, Ciona intestinalis; identical to SEQ ID NO: 62751
  CDS (1)..(1053)

SEQ ID NO: 141785 - protein, 350 aa, Ciona intestinalis; identical to SEQ ID NO: 62752

SEQ ID NO: 141786 - DNA, 1320 bp, Ciona intestinalis
  CDS (1)..(1320)
atggggcaagcagatgagggcatgagcaacggtaaaaataaaggtgctaatgcacctactggtgctgctacgactggcaaagatacagcaaatacagagttctacactgtacaagtatctgattctgtctttactgtgcttaagagatatcagagcctgaaaccaattggttctggtgcacaaggaatggtatgtgccgcccatgatacagtacttggccaacatgtagccataaagaaactcagtcgtccgttccaaaatccgacacatgcgaagcgtgcctaccgcgagcttgtccttatgcgcgctgtcaaccacaaaaatatcatcggtttactgaacgttttttcaccccaatctagttatgaagatttttcccatgtgtatcttgtcatggaacttatggatgctagtttatgccaggtgattcaaatggatcttgaccacgaaagactctcctatcttctctaccagttactttgtggcattaaacacttgcattctgctggtatcattcacagggacttaaaaccatccaacattgtagtacggtcggactgcacacttaaaattcttgactttggtttggcaagaactgcaggaggttcttttatgatgacgccgtatgtggtgacacgatattacagagcaccagaagtgattttaggaatggggtatcaagaagtagtggacatatggtcagtgggatgtatctttggtgaaatgattagaggtcaggtcctttttcctggaaatgatcacatagatcaatggaataagataacagaacaattaggaactccatcagaggactttatcaacaaactgcagccaacagtgaggaattatgttttgaatcggccattccaaagaggacacccaattcatcgcttgttccctgatagtctcttcccagctgactccgagagcaatggaagactccggtcaagtcaggcacgcgatcttcttgctaagatgttggtagttgacccaattggaagaattactgttgatgatgcactgcaacacccatatattaaaatctggtacgatcccagcgaggtagaaggcccaggtccaaaagtcgacggcggatcaatagacgaggtcgattactcggttgaaaaatggaaagaagtaatttggacagaagtaaaactatgggacacagtggacacaactgtcccgaacccggttataccgctctcgacagctgtaccagatcaacctgctgaaaaactcgaacccgagaaggtagagagtaacccagacgtgcctgctgctactgcacaggttgtgaaagcagaaacggaaggataa

SEQ ID NO: 141787 - protein, 439 aa, Ciona intestinalis
MGQADEGMSNGKNKGANAPTGAATTGKDTANTEFYTVQVSDSVFTVLKRYQSLKPIGSGAQGMVCAAHDTVLGQHVAIKKLSRPFQNPTHAKRAYRELVLMRAVNHKNIIGLLNVFSPQSSYEDFSHVYLVMELMDASLCQVIQMDLDHERLSYLLYQLLCGIKHLHSAGIIHRDLKPSNIVVRSDCTLKILDFGLARTAGGSFMMTPYVVTRYYRAPEVILGMGYQEVVDIWSVGCIFGEMIRGQVLFPGNDHIDQWNKITEQLGTPSEDFINKLQPTVRNYVLNRPFQRGHPIHRLFPDSLFPADSESNGRLRSSQARDLLAKMLVVDPIGRITVDDALQHPYIKIWYDPSEVEGPGPKVDGGSIDEVDYSVEKWKEVIWTEVKLWDTVDTTVPNPVIPLSTAVPDQPAEKLEPEKVESNPDVPAATAQVVKAETEG

SEQ ID NO: 141788 - DNA, 1095 bp, Ciona intestinalis; identical to SEQ ID NO: 140116
  CDS (1)..(1095)

SEQ ID NO: 141789 - protein, 364 aa, Ciona intestinalis; identical to SEQ ID NO: 140117

SEQ ID NO: 141790 - DNA, 1848 bp, Arabidopsis thaliana
  CDS (1)..(1848)
atgcaacaaaatcaagtgaagaagggcacgaaagagatggagtttttcacagagtatggtgatgcaaacagatataggattctggaagttattggtaaaggaagctatggagttgtgtgtgcagctattgatacacatactggagagaaagttgctattaagaagattaatgatgtctttgaacatatttctgatgcgcttcgtattctccgtgaagtgaagcttcttcggcttttacggcatcctgatattgtggagatcaaaagcattatgctgcctccttctaagagagagtttaaagatatctatgttgtgtttgagctcatggaatcagatcttcatcaagttattaaagctaatgatgatttgactcgtgaacaccaccagtttttcctttatcagatgcttcgtgctttaaagttcatgcatacagctaatgtttatcaccgtgatcttaagccaaagaatatacttgcaaacgcaaattgcaagttgaaagtttgtgactttggattggctagagtagcgtttaatgatactcctacgacagtcttttggacggactatgttgccacaagatggtatagagcacctgagctctgtggatcattcttttcgaagtacactccagctatcgacgtttggagcattggctgcatctttgcagaggtactaacagggaagccattgtttccgggaaaaagtgttgtccatcagttggagttgattactgatcttcttggcacaccaaaatcagaaacaatttctggagttcgtaatgataaagctagaaaatacttgactgaaatgaggaagaaaaatcctgtcaccttctcgcaaaaattttccaaagcagatccattagcactccgtcttttgcagaggctgttggctttcgatccaaaggatcgaccgactcctgcagaggcattagctgatccttacttcaagggtctttctaagattgaaagagaaccttcaagtcagcaaatctcgaaaatggagtttgaatttgagaggcgaaggttgacaaaggacgacattagagaactaatatacagagaaatactggagtaccatcctcagttgctcaaggactatatgagcggatctgaggggtctaattttgtatatcctagcgccattggacatcttagacagcagttcacttacttagaggaaaatagcagtagaaatgggccggtcatacctctcgagaggaaacacgcatcactaccgcggtctacggttcactcaactgtagtccattccacctcgcaacccaacttgggtgcaacagatagtagacgtgtttctttcgagccttcaaaaaatggagcttcttctgcaggacatccatcaacttccgcgtatcctactaaatccatcggacctccaccaagagttccaccatcaggtagaccaggtcgtgttgtggaatcatctgtatcttatgagaatggcaggaacctcaaagaagcttatttcagaagcgcggtttcatctcctcattgctacttccgaccaaacaccatgacaaacccggagaaccgcaacatagaagcttcgtcttttccaccaaagccacaaaatcctgtccaccaattcagtcccactgagccaccagctgctacaactaaccaagcagacgttgagactatgaaccacccaaacccttactttcaaccacagctcccgaagacagatcaattaaacaacaacacacatatggccattgatgctaagctgttgcaggcacaatcacagtttggtccagcaggagctgcagcggttgcagtagcagcacaccggaacataggcacaattagttacagcgcagcatcatag

SEQ ID NO: 141791 - protein, 615 aa, Arabidopsis thaliana
MQQNQVKKGTKEMEFFTEYGDANRYRILEVIGKGSYGVVCAAIDTHTGEKVAIKKINDVFEHISDALRILREVKLLRLLRHPDIVEIKSIMLPPSKREFKDIYVVFELMESDLHQVIKANDDLTREHHQFFLYQMLRALKFMHTANVYHRDLKPKNILANANCKLKVCDFGLARVAFNDTPTTVFWTDYVATRWYRAPELCGSFFSKYTPAIDVWSIGCIFAEVLTGKPLFPGKSVVHQLELITDLLGTPKSETISGVRNDKARKYLTEMRKKNPVTFSQKFSKADPLALRLLQRLLAFDPKDRPTPAEALADPYFKGLSKIEREPSSQQISKMEFEFERRRLTKDDIRELIYREILEYHPQLLKDYMSGSEGSNFVYPSAIGHLRQQFTYLEENSSRNGPVIPLERKHASLPRSTVHSTVVHSTSQPNLGATDSRRVSFEPSKNGASSAGHPSTSAYPTKSIGPPPRVPPSGRPGRVVESSVSYENGRNLKEAYFRSAVSSPHCYFRPNTMTNPENRNIEASSFPPKPQNPVHQFSPTEPPAATTNQADVETMNHPNPYFQPQLPKTDQLNNNTHMAIDAKLLQAQSQFGPAGAAAVAVAAHRNIGTISYSAAS

SEQ ID NO: 141792 - DNA, 1719 bp, Arabidopsis thaliana
  CDS (1)..(1719)
atgggttgtgtatttggccgagaggcggcgacaacaacaacagctgaagctaaacaagctaagagctctaaagctagtagtggagtagtagtagtaggagagagtagtgtgactaagagtaatggagttattgctgatgatgtagagaagaagaagaatgaggaggcaaatggtgataaagaaaggaaatcatccaaaggagatcgaagaaggtcgacaaagccgaatccgcggttgagtaatccttccaagcattggcgtggtgaacaggttgctgctggttggccttcttggctttctgatgcttgtggtgaagctttaaatggttgggttcctagaaaggctgatacttttgagaaaattgataagattggacaaggaacatatagtaatgtgtacaaagctaaggatatgttgaccggtaaaatcgttgcgttgaagaaggttcggtttgataacttggagccggaaagtgtgaagtttatggcgagagagattcttgtgttgcggagacttgatcatcctaatgttgtgaagttggaaggtttggttacgtcaagaatgtcttgtagcttataccttgtatttcaatacatggatcatgatttggctggtcttgcttcaagtcctgttgttaagttctcagaatcagaggttaaatgtttgatgcgtcagttgatatctggtttggagcattgtcatagtcgtggtgtacttcatcgtgacatcaaaggatcaaatcttcttattgatgatggtggggtcctaaagattgctgattttggactcgcaacgatttttgatcctaatcacaagcggccaatgactagtcgagtggttacactatggtatcgagctccagagcttctgcttggggctactgattatggtgtaggtattgatctttggagtgccggctgtattttagctgagctattggcgggaagacctattatgcccggtcggacagaggtagagcagctacataagatttacaagctgtgtggttcaccatcagaggattattggaaaaaagggaaattcacacatggagccatatacaaaccccgtgaaccatacaaaagaagcataagagagacatttaaagattttccaccatcatctcttccgctcattgacgctcttctttcaatcgagccagaagaccgccaaactgcatctgctgctttaaaaagtgaattctttacaagtgaaccatatgcctgtgaacctgctgatctgccaaagtatcccccgagcaaagaaattgatgcaaagcgacgagatgaagaaactcggagacaaagagctgctagtaaagcccaaggggatggtgcaaggaagaatcggcacagagatcgttcaaatcgagctcttccagctcctgaagctaatgcagaacttcagtcaaatgtcgatagaaggagattaatcacacacgcaaatgcaaagagcaagagcgagaagtttccgccaccacaccaagatggtggagcaatgggtgtaccattgggtgcctcacagcatatagacccgacatttatcccacgagatatggtcccatccttcacatcctcttctttcaatttttccaaagacgaaccaccaacacaagtccagacgtggtcaggtcctctgggtcatccaatcacaggcgtttcaagaaagaagaaagataacaccaaaagcagtaaaggaaagagagcagtagtggcctga

SEQ ID NO: 141793 - protein, 572 aa, Arabidopsis thaliana
MGCVFGREAATTTTAEAKQAKSSKASSGVVVVGESSVTKSNGVIADDVEKKKNEEANGDKERKSSKGDRRRSTKPNPRLSNPSKHWRGEQVAAGWPSWLSDACGEALNGWVPRKADTFEKIDKIGQGTYSNVYKAKDMLTGKIVALKKVRFDNLEPESVKFMAREILVLRRLDHPNVVKLEGLVTSRMSCSLYLVFQYMDHDLAGLASSPVVKFSESEVKCLMRQLISGLEHCHSRGVLHRDIKGSNLLIDDGGVLKIADFGLATIFDPNHKRPMTSRVVTLWYRAPELLLGATDYGVGIDLWSAGCILAELLAGRPIMPGRTEVEQLHKIYKLCGSPSEDYWKKGKFTHGAIYKPREPYKRSIRETFKDFPPSSLPLIDALLSIEPEDRQTASAALKSEFFTSEPYACEPADLPKYPPSKEIDAKRRDEETRRQRAASKAQGDGARKNRHRDRSNRALPAPEANAELQSNVDRRRLITHANAKSKSEKFPPPHQDGGAMGVPLGASQHIDPTFIPRDMVPSFTSSSFNFSKDEPPTQVQTWSGPLGHPITGVSRKKKDNTKSSKGKRAVVA

SEQ ID NO: 141794 - DNA, 2100 bp, Arabidopsis thaliana
  CDS (1)..(2100)
atgggttgcgttagctcgaagcagacggtctctgtgacgcctgcgatcgatcactcaggcgtcttcaaggataatgaaaatgagtgttctggatcgggtcggattgtggtggaggatccgcctcggccgacgttgaagaagctcgtgtcgtggaggagtaggagcgggaagaggaggagtcagaagagcggtagcgagttagggagtgagtcaggacgtgctagtgactcgcttagttttcgactcggtaatgttagtagataccttgaagctgagcaagtcgctgctggttggcctgcgtggttgagcaacgttgctggtgaagctatccatggttgggtcccacttcgatccgatgcgttcgaaaaactcgaaaagattggacaaggtacttatagcaatgtgtttcgtgcggtggagactgaaactgggaggattgtggcattgaagaaggtgaggtttgataattttgagccggagagtgttaagtttatggcaagagagattttgatacttagaagacttaatcatcccaacattatcaaactggaaggtttgattacttcaaaactatcctgcaacattcaacttgtgttcgagtatatggagcatgatcttactggtcttctttcttcccctgacatcaaatttacgacgccacagattaagtgttacatgaagcaattgttgtctgggcttgatcattgtcattcacgaggcgtgatgcatcgagacataaagggttcgaatcttttgttgagtaatgaagggatattaaaggtggctgattttgggttagcaaacttcagtaatagttctggacacaagaagaaacctcttaccagtcgagttgtgactctgtggtatcgtccaccagaacttttgctcggggcaacggactatggagcatctgttgatttgtggagtgttggttgtgttttcgctgagctgcttcttggaaaacctattctccggggaagaactgaggttgaacagttgcacaagatattcaaactgtgtggatctccaccagaagattactggaaaaagtccaaacttccccatgcaatgcttttcaagccacagcaaacttatgatagttgtctccgcgaaaccttgaaagatttgtctgagactgaaatcaatctgatagaaactcttctttctatagatccccacaaacgcggtactgcctctagtgcccttgtttctcagtattttactacaaagccttttgcttgtgatccctcaagcttgccaatatacccacctagcaaggagatagatacaaagcatcgggacgaagcagcaaggaaaaaaattagcgggaatgggagacgtggtatagatccgaggaagccatcaaggaaggcccattcattcaatagattggcaccagatgtgcggcaccaaactgaaacatttcagaaacgaattggtcatttagttcatagttcgattgaaagtgatgccaggttatgtgggaaactgcaaaacccgttagatcacaagaaagacgaagcttcccatgtgaagcatgcatcacaaggagatgtgcctttctcagggccgttacaagtctctaaatcaaacagttttgcttgggcgaaacgagaaaaagatgacgtatgtgttagggtgcataatcgatctctctcaagaggttacattcctagcttgtcaggacattcccccgcattcaatgggaaaagtgatgttgaatccaagataaataaggatgaaaaggaggacaagacagattctcgaggcgaggagtcatatgagatggtgaagcgttctatgctaaagcagtggagacaacttgaacgtccagattcttttggtgcatctgacgagtatcactcgcaggaactgtcattgggactctatcagagagatgaaatggcaaaaaagatgggtaataatttgggtgatggggacaagatcgaattctcgggccctttgttgtctcaatcttatggagttgatgaactgttggaacgccatgaacgcaacatccgcaagctaattcgaaaaccgtggtttcaaaaagtccaagacaaacaaaaaaagattttgcttttctcatctgaattgtaa

SEQ ID NO: 141795 - protein, 699 aa, Arabidopsis thaliana
MGCVSSKQTVSVTPAIDHSGVFKDNENECSGSGRIVVEDPPRPTLKKLVSWRSRSGKRRSQKSGSELGSESGRASDSLSFRLGNVSRYLEAEQVAAGWPAWLSNVAGEAIHGWVPLRSDAFEKLEKIGQGTYSNVFRAVETETGRIVALKKVRFDNFEPESVKFMAREILILRRLNHPNIIKLEGLITSKLSCNIQLVFEYMEHDLTGLLSSPDIKFTTPQIKCYMKQLLSGLDHCHSRGVMHRDIKGSNLLLSNEGILKVADFGLANFSNSSGHKKKPLTSRVVTLWYRPPELLLGATDYGASVDLWSVGCVFAELLLGKPILRGRTEVEQLHKIFKLCGSPPEDYWKKSKLPHAMLFKPQQTYDSCLRETLKDLSETEINLIETLLSIDPHKRGTASSALVSQYFTTKPFACDPSSLPIYPPSKEIDTKHRDEAARKKISGNGRRGIDPRKPSRKAHSFNRLAPDVRHQTETFQKRIGHLVHSSIESDARLCGKLQNPLDHKKDEASHVKHASQGDVPFSGPLQVSKSNSFAWAKREKDDVCVRVHNRSLSRGYIPSLSGHSPAFNGKSDVESKINKDEKEDKTDSRGEESYEMVKRSMLKQWRQLERPDSFGASDEYHSQELSLGLYQRDEMAKKMGNNLGDGDKIEFSGPLLSQSYGVDELLERHERNIRKLIRKPWFQKVQDKQKKILLFSSEL

SEQ ID NO: 141796 - DNA, 1761 bp, Arabidopsis thaliana
  CDS (1)..(1761)
atggagtttttcactgagtatggtgatgctaatcgttatcggattcttgaagttattgggaaaggaagctatggagttgtatgtgcagctattgatacacaaacaggagagaaagttgctattaagaagattaatgatgtttttgagcatgtctctgatgctcttcgtattctccgtgaggttaagcttctacggcttcttaggcaccctgatatagttgaaatcaaaagtatcatgcttccgccttctaagagggagtttaaagatatatatgttgtttttgagctcatggaatcagatcttcatcaagtcatcaaagctaatgatgatttgactcgtgagcatcaccagttttttctttatcagatgcttcgtgctttgaagtatatgcatacagctaatgtttaccatcgtgatcttaaacccaagaacatactggcaaatgcaaactgcaagttgaaagtctgtgactttggacttgcaagagtgtcgtttaatgatacacctacgacagtcttttggacggattatgttgccacaagatggtacagggcacctgagctctgtggatcattctgttctaagtatactccagcaattgacatttggagcattggctgcatcttcgctgaggtattaacagggaagcctttgtttccaggaaaaagtgttgtccatcagttagacttgattaccgatcttcttggcacaccaaaatcagagaccattgctggggtgcgaaatgaaaaggctagaaaatatttgaacgaaatgaggaagaaaaatcttgtccccttttcgcaaaagtttcctaacgcagatcctttagcattgcgtcttctgcaaagactgttggcttttgatccaaaggataggccgactgctgcagaggcgctggctgatccttattttaagtgccttgctaaggttgaaagagaaccctcttgtcagccgatttcgaagatggaatttgagtttgaaagaagaaggttgacaaaggatgacattagagaactaatatacagggagatactggaataccatccacagctgctcaaggattatatgaactctgaaggctcaagttttctatatcctagtgccatcggtcatttgaggaaacaatttgcgtacctagaggaaaatagtggcaaaagtgggccagtcatacctccagacaggaagcatgcttcacttccacgatctgcagttcattccagtgcagtaaactccaacgctcaacccagtttaaacgcatcagacagtcgacgtgtttctatcgaaccttcaagaaatggagtggttccatcaacttcagcatattcaactaaacctttagggcctccaccaagagtaccatcaggtaaaccaggccgtgttgtggaatcatctgtaacttatgaaaatgacagaaacctcaaagagtcgtcctatgatgcaaggacatcatattacagaagcacagtactccctccacagaccgtatctcctaactgttacttccttccaaacaccatgaatcaagagaagcgcagtggtacagaagctgcatctcagccaaaaccgcagtttgtccccacccaatgcaactctgccaaaccagctgagctgaacccaaacccttatgtccaatcacaacacaaggtgggtattgatgctaagctgttgcatgcacaatcccaatatggtcctgctggagccgccgcggttgcagtagcagcacaccggaacattggagctgttgggtatggcatgtcttag

SEQ ID NO: 141797 - protein, 586 aa, Arabidopsis thaliana
MEFFTEYGDANRYRILEVIGKGSYGVVCAAIDTQTGEKVAIKKINDVFEHVSDALRILREVKLLRLLRHPDIVEIKSIMLPPSKREFKDIYVVFELMESDLHQVIKANDDLTREHHQFFLYQMLRALKYMHTANVYHRDLKPKNILANANCKLKVCDFGLARVSFNDTPTTVFWTDYVATRWYRAPELCGSFCSKYTPAIDIWSIGCIFAEVLTGKPLFPGKSVVHQLDLITDLLGTPKSETIAGVRNEKARKYLNEMRKKNLVPFSQKFPNADPLALRLLQRLLAFDPKDRPTAAEALADPYFKCLAKVEREPSCQPISKMEFEFERRRLTKDDIRELIYREILEYHPQLLKDYMNSEGSSFLYPSAIGHLRKQFAYLEENSGKSGPVIPPDRKHASLPRSAVHSSAVNSNAQPSLNASDSRRVSIEPSRNGVVPSTSAYSTKPLGPPPRVPSGKPGRVVESSVTYENDRNLKESSYDARTSYYRSTVLPPQTVSPNCYFLPNTMNQEKRSGTEAASQPKPQFVPTQCNSAKPAELNPNPYVQSQHKVGIDAKLLHAQSQYGPAGAAAVAVAAHRNIGAVGYGMS

SEQ ID NO: 141798 - DNA, 1743 bp, Arabidopsis thaliana
  CDS (1)..(1743)
atgggatgcgttttatgcaaagaatccaccggagacaaacggaaacacaataatcccgatgaacctcctccggcagacctccgtaatacggaggatttaccttcttcttcttcaaccaccaccgccgccatttctgtcgaaatcggagagaagaagaagaaagatttagattcgattcagattcagccggagagaagaacatggcacactggcgacttctccgccggctcttctcgccgtccggggatgagtctccgtacgccggaaggatggccaccttggcttattgctgcttgtggcgattcgatcaaagacttaacacctcgcagagctaccacatacgaaaagctcgagaagattgggcaaggaacgtatagcaatgtgtacaaggcgaaagatttattgagtgggaagattgtagctttgaagaaagttaggtttgataatttggaagctgagagtgttaaatttatggctagagagattcttgtgttacgacggcttaatcatcctaatgttattaagcttcaaggtttggttacttcacgggtttcctgtagtctctaccttgtttttgagtatatggagcatgatctttctggtcttgctgctacccaaggtctcaagtttgatcttcctcaggttaaatgctttatgaagcagctactatctggattggagcattgccatagtcgaggagtattacatcgggatatcaaaggttctaatcttcttatagataatgatggaatactgaagattgctgatttcgggttggctacgttttatgacccaaagcaaaagcaaacaatgactagtcgtgttgtcacactttggtaccgtcctcccgagcttcttcttggagctaccagttatggaactggtgttgatctttggagtgctggttgtattatggctgagttacttgctggcaagcccgttatgccgggaagaaccgaggtcgaacaacttcataagatattcaaattatgtggctccccttcagattcgtactggaagaagtacagactgccaaacgcaactctttttaagccgcaacatccgtacaaacgttgtgtggctgaagccttcaatggtttcactccatcctctgtgcatctagttgagacacttctcactatagaccctgctgatcgaggaacttctacctcggcattgaatagtgaattctttactactgaaccgttaccttgtgatccttcaagtttaccaaagtatccaccttccaaagaactgaatgtaaagctgagggacgaagagttaagaaggcaaaagggtcttgctggaaaaggtagtggtattgatggagctagaagaataaggtatcgaggggatcgcactgggcgagctattccagccccagaagctaatgccgagagtcaagcaaacttagatagatggagatcgatatcacaaacaaatggaaagagcaagagtgagaagtttccgcctcctcaccaggacggtgcagttgggtacccattggaagatctatcaaagaaaacctcagtatttggtgcaaagactgagacttcttttgggttatcgagatcattaaagtctggggaagggacatcaatgagaaagatttcaaacaaagacggggctcgtggggcttcttctagaaagtacatatggggacttaaacctcctccagcactcgggctatcgatggacttacttttcaggagcagatcagaagtttttgggatccggagatag

SEQ ID NO: 141799 - protein, 580 aa, Arabidopsis thaliana
MGCVLCKESTGDKRKHNNPDEPPPADLRNTEDLPSSSSTTTAAISVEIGEKKKKDLDSIQIQPERRTWHTGDFSAGSSRRPGMSLRTPEGWPPWLIAACGDSIKDLTPRRATTYEKLEKIGQGTYSNVYKAKDLLSGKIVALKKVRFDNLEAESVKFMAREILVLRRLNHPNVIKLQGLVTSRVSCSLYLVFEYMEHDLSGLAATQGLKFDLPQVKCFMKQLLSGLEHCHSRGVLHRDIKGSNLLIDNDGILKIADFGLATFYDPKQKQTMTSRVVTLWYRPPELLLGATSYGTGVDLWSAGCIMAELLAGKPVMPGRTEVEQLHKIFKLCGSPSDSYWKKYRLPNATLFKPQHPYKRCVAEAFNGFTPSSVHLVETLLTIDPADRGTSTSALNSEFFTTEPLPCDPSSLPKYPPSKELNVKLRDEELRRQKGLAGKGSGIDGARRIRYRGDRTGRAIPAPEANAESQANLDRWRSISQTNGKSKSEKFPPPHQDGAVGYPLEDLSKKTSVFGAKTETSFGLSRSLKSGEGTSMRKISNKDGARGASSRKYIWGLKPPPALGLSMDLLFRSRSEVFGIRR

SEQ ID NO: 141800 - DNA, 1386 bp, Arabidopsis thaliana
  CDS (1)..(1386)
atggacaggtacaagttaattaaagaggttggtgatggaacttttggtagtgtttggcgagctataaataagcagacgggtgaagtcgttgcaattaagaaaatgaaaaagaagtactactcttgggatgaatgtattaatctgagagaagttaagtcgctcaggagaatgaatcatccaaacattgtgaagttgaaggaagtaatccgggaaaatgatatcctatactttgtctttgagtacatggagtgcaatctttaccaacttatgaaggatcgacaaaagctttttgcagaagctgatatcaaaaattggtgctttcaagtcttccaaggcctttcttacatgcatcagcgtggttacttccaccgcgatcttaagccagaaaatctgttagtctctaaagacatcattaagattgctgattttggcctggcacgtgaggttaattcgagtccaccttttaccgagtatgtttctacacgctggtacagggctcctgaagtacttctacagtcatatgtatacacatcgaaagttgatatgtgggcgatgggagctattatggctgagttgttgtctcttcgccccatttttcctggggctagtgaagcagatgaaatctacaaaatctgcagtgtcataggcaccccaactgaggagacctggttggagggacttaatcttgcaaacacaataaactatcaattccctcagcttcctggtgtacctctttctagcttgatgccatctgctagtgaagacgcaattaatcttattgagcgactttgctcgtgggatccatccagcagaccgactgctgcagaggtgctgcagcacccgttcttccagagttgcttttatgtcccaccatctcttcgtcccaagccttctgttgcaagaactcctccgcctgtcgggcctaggggatcattcgagcaccaatcagttaaacggtacccagtgtctcttgccaatgctaagccattcaatagctatgtttccccaaagtcaaatgccgcttttggcagtggtgtccagcggaaacttgatatggttaatcaagatgggacgagaaacactaaacccgtgagaagttctgtcagagactccaaatacagaccacccggaaaaaagagtcctccagcagcatcgttgaacaagaaccgggtcactcgtagtagtgtatccgagactgctgataaactcgcaaacatgaccattggagcaactggatctcgaagacactctgtgtctgtggttggacagcatcaacagctgaaaccacctccgatgaaggcaggttgggtaggagaaacacgtgacatgttccttagaccaacacaacccaccaccaatgcctactctaggaaagtcgccggatga

SEQ ID NO: 141801 - protein, 461 aa, Arabidopsis thaliana
MDRYKLIKEVGDGTFGSVWRAINKQTGEVVAIKKMKKKYYSWDECINLREVKSLRRMNHPNIVKLKEVIRENDILYFVFEYMECNLYQLMKDRQKLFAEADIKNWCFQVFQGLSYMHQRGYFHRDLKPENLLVSKDIIKIADFGLAREVNSSPPFTEYVSTRWYRAPEVLLQSYVYTSKVDMWAMGAIMAELLSLRPIFPGASEADEIYKICSVIGTPTEETWLEGLNLANTINYQFPQLPGVPLSSLMPSASEDAINLIERLCSWDPSSRPTAAEVLQHPFFQSCFYVPPSLRPKPSVARTPPPVGPRGSFEHQSVKRYPVSLANAKPFNSYVSPKSNAAFGSGVQRKLDMVNQDGTRNTKPVRSSVRDSKYRPPGKKSPPAASLNKNRVTRSSVSETADKLANMTIGATGSRRHSVSVVGQHQQLKPPPMKAGWVGETRDMFLRPTQPTTNAYSRKVAG

SEQ ID NO: 141802 - DNA, 1245 bp, Drosophila melanogaster
  CDS (1)..(1245)
atgagcgtttcgatgtcactggtacagggtggtgctgccggtggtgcgccacagggcgccagcgcaatcttggccgcagcggctccctactatcaaccgccggctgttccccaggatgttcagccggatcgtcctatcggctatggagcattcggagttgtctgggccgtcacagatcctcgcgatggacgacgagtggcattgaagaagctgccaaatgtgttccaatcgttggtctcatcgaagcgcgtttttcgcgagctgaaaatgctgtgcttcttcaagcatgaaaatgttctttcagctctggacattctacagccaccgcatttggatttctttcaagaaatctatgtgataacggagctgctgcaatcggatctgcacaagataatcgtgtcgccacagcacctgtccgccgaccacatcaaggtgttcctgtaccagatcctgcgcggcctcaaatatctgcactcggcccgcatcctgcatcgcgacatcaagccgggcaatctgctggtcaactcgaattgcgtgctcaagatctgtgactttggattggcccgcgtcgaggagccggatcaggccaagcacatgacccaagaggtggtcacccagtactatcgcgcaccggagattctgatgggcgctcgccactactcgtcggcggtggatgtatggtcggtgggctgcatttttggcgagctgctgggccgtcgcatcctcttccaggcacagaatcctgtgcagcagctggagctgattaccgagctgcttggcacgcccaccatggaggatatgcgtcacgcctgcgagggcgcccgcacccacatgttgcgccgggcgcccaagccgccatccttctcggtgctctacacactcagctcgcatgccacgcacgaggcggtgcacttgctctgccagatgctcgtcttcgatccggataagcgcatctccgtgacagatgccctggcgcatccgtatctggatgaggggcgtctgcgctatcactcgtgcatgtgcaaatgctgcttcactacctcagccggaatgcgtcagtatacggctgattttgagccctccgccggccagcccttcgatgatctgtgggaacgtaagctgacatccgtgcagcaggtcaaagaggagatgcacaagttcattgccgagcagctgcaaacgggtcgtgtgccgctgtgcatcaatccacagagtgcagccttcaagagtttcgccagccaatga

SEQ ID NO: 141803 - protein, 414 aa, Drosophila melanogaster
MSVSMSLVQGGAAGGAPQGASAILAAAAPYYQPPAVPQDVQPDRPIGYGAFGVVWAVTDPRDGRRVALKKLPNVFQSLVSSKRVFRELKMLCFFKHENVLSALDILQPPHLDFFQEIYVITELLQSDLHKIIVSPQHLSADHIKVFLYQILRGLKYLHSARILHRDIKPGNLLVNSNCVLKICDFGLARVEEPDQAKHMTQEVVTQYYRAPEILMGARHYSSAVDVWSVGCIFGELLGRRILFQAQNPVQQLELITELLGTPTMEDMRHACEGARTHMLRRAPKPPSFSVLYTLSSHATHEAVHLLCQMLVFDPDKRISVTDALAHPYLDEGRLRYHSCMCKCCFTTSAGMRQYTADFEPSAGQPFDDLWERKLTSVQQVKEEMHKFIAEQLQTGRVPLCINPQSAAFKSFASQ

SEQ ID NO: 141804 - DNA, 1395 bp, Arabidopsis thaliana
  CDS (1)..(1395)
atggacaggtacaagttaattaaagaggttggtgatggaacttttggtagtgtttggcgagctataaataagcagacgggtgaagtcgttgcaattaagaaaatgaaaaagaagtactactcttgggatgaatgtattaatctgagagaagttaagtcgctcaggagaatgaatcatccaaacattgtgaagttgaaggaagtaatccgggaaaatgatatcctatactttgtctttgagtacatggagtgcaatctttaccaacttatgaaggatcgacaaaagctttttgcagaagctgatatcaaaaattggtgctttcaagtcttccaaggcctttcttacatgcatcagcgtggttacttccaccgcgatcttaagccagaaaatctgttagtctctaaagacatcattaagattgctgattttggcctggcacgtgaggttaattcgagtccaccttttaccgagtatgtttctacacgctggtacagggctcctgaagtacttctacagtcatatgtatacacatcgaaagttgatatgtgggcgatgggagctattatggctgagttgttgtctcttcgccccatttttcctggggctagtgaagcagatgaaatctacaaaatctgcagtgtcataggcaccccaactgaggagacctggttggagggacttaatcttgcaaacacaataaactatcaattccctcagcttcctggtgtacctctttctagcttgatgccatctgctagtgaagacgcaattaatcttattgagcgactttgctcgtgggatccatccagcagaccgactgctgcagaggtgctgcagcacccgttcttccagagttgcttttatgtcccaccatctcttcgtcccaagccttctgttgcaagaactcctccgcctgtcgggcctaggggatcattcgagcaccaatcagttaaacggtacccagtgtctcttgccaatgctaagccattcaatagctatgtttccccaaagtcaaatgccgcttttggcagtggtgtccagcggaaacttgatatggttaatcaagatgggacgagaaacactaaacccgtgagaagttctgtcagagactccaaatacagaccacccggaaaaaagagtcctcataatgcagcagcagcatcgttgaacaagaaccgggtcactcgtagtagtgtatccgagactgctgataaactcgcaaacatgaccattggagcaactggatctcgaagacactctgtgtctgtggttggacagcatcaacagctgaaaccacctccgatgaaggcaggttgggtaggagaaacacgtgacatgttccttagaccaacacaacccaccaccaatgcctactctaggaaagtcgccggatga

SEQ ID NO: 141805 - protein, 464 aa, Arabidopsis thaliana
MDRYKLIKEVGDGTFGSVWRAINKQTGEVVAIKKMKKKYYSWDECINLREVKSLRRMNHPNIVKLKEVIRENDILYFVFEYMECNLYQLMKDRQKLFAEADIKNWCFQVFQGLSYMHQRGYFHRDLKPENLLVSKDIIKIADFGLAREVNSSPPFTEYVSTRWYRAPEVLLQSYVYTSKVDMWAMGAIMAELLSLRPIFPGASEADEIYKICSVIGTPTEETWLEGLNLANTINYQFPQLPGVPLSSLMPSASEDAINLIERLCSWDPSSRPTAAEVLQHPFFQSCFYVPPSLRPKPSVARTPPPVGPRGSFEHQSVKRYPVSLANAKPFNSYVSPKSNAAFGSGVQRKLDMVNQDGTRNTKPVRSSVRDSKYRPPGKKSPHNAAAASLNKNRVTRSSVSETADKLANMTIGATGSRRHSVSVVGQHQQLKPPPMKAGWVGETRDMFLRPTQPTTNAYSRKVAG

SEQ ID NO: 141806 - DNA, 1392 bp, Arabidopsis thaliana
  CDS (1)..(1392)
atgggttgtatttgtgccaccgcccgttcaccaagcgccgccgttaccgataaagatctattagattccagcaaatccatccttcaacttctccctcatcatcccccgtcgtcttcgtcttcatccaagaaggaaggatctttcacacgtacgacttcttcagcttctatcaccattgtggctaatggttatcctgtggcacgccgtccttccacttcatctgatcgaaacagcaccaaaccggtcgttgttgtgggagctccgaccagaaatccaacaagaagagtcaccgctataccggttgcacagccggcacagcagcagccagcacgtgtgatcagcaataaaacggaactccctgctgcagaatggccgtcttggctggcttctgttgctggggaggccattaaaggatgggttcctcgctgcgcagagtcctttgagaagttagacaaaattggacaggggacttacagcagcgtgtacaaagctagagaccttgaaacggggaagattgtggcgatgaagaaagttcggtttgtgaacatggatccagagagtgttcggtttatggccagggagattctcattcttcgtaagcttgatcaccccaatgttatgaagctagaaggtctagttacctctagactctcaggtagcctctaccttgtctttgagtacatggaacacgatctcgcaggtctagctgcaactcctggaatcaaattctctgaacctcagatcaagtgctatatgcagcaattgttccgtgggcttgaacattgccacagacgaggaattcttcaccgtgatattaaaggctcaaatctcttaatcaataatgaaggtgtcttgaagattggtgatttcggattggcgaatttttaccgaggtgatggagatctgcagctgaccagtcgtgttgtgaccttatggtacagagcacctgagctgttgctcggtgccactgagtatggaccagccattgacctgtggagcgccggctgcattctcactgagctcttcgccggaaaacctattatgccaggacgcacagaagtggagcagatgcacaagatctttaagctctgtggttcaccctcggaagattactggagaagagcaacactgccactagcaacaagctttaaacccagtcatccttacaagcctgttcttgctgaaacctttaaccatttcccttcatcagctctgatgctcatcaataagctactggcaatagaacctgaaaaacggggatcggctgcttctaccttgaggagcgaattcttcaccacggagccactccctgcgaatccatcaaacttacctagatatccaccaagcaaggaacttgatgccaagcttcgcaacgaagaagcaagaaagtaa

SEQ ID NO: 141807 - protein, 463 aa, Arabidopsis thaliana
MGCICATARSPSAAVTDKDLLDSSKSILQLLPHHPPSSSSSSKKEGSFTRTTSSASITIVANGYPVARRPSTSSDRNSTKPVVVVGAPTRNPTRRVTAIPVAQPAQQQPARVISNKTELPAAEWPSWLASVAGEAIKGWVPRCAESFEKLDKIGQGTYSSVYKARDLETGKIVAMKKVRFVNMDPESVRFMAREILILRKLDHPNVMKLEGLVTSRLSGSLYLVFEYMEHDLAGLAATPGIKFSEPQIKCYMQQLFRGLEHCHRRGILHRDIKGSNLLINNEGVLKIGDFGLANFYRGDGDLQLTSRVVTLWYRAPELLLGATEYGPAIDLWSAGCILTELFAGKPIMPGRTEVEQMHKIFKLCGSPSEDYWRRATLPLATSFKPSHPYKPVLAETFNHFPSSALMLINKLLAIEPEKRGSAASTLRSEFFTTEPLPANPSNLPRYPPSKELDAKLRNEEARK

SEQ ID NO: 141808 - DNA, 1110 bp, Strongylocentrotus purpuratus; identical to SEQ ID NO: 140118
  CDS (1)..(1110)

SEQ ID NO: 141809 - protein, 369 aa, Strongylocentrotus purpuratus; identical to SEQ ID NO: 140119

SEQ ID NO: 141810 - DNA, 1512 bp, Strongylocentrotus purpuratus
  CDS (1)..(1512)
atggctgtttgcggatctaggatttctcactctcagatggctttcgctaacgggtcctccagcgcccacgaccgtgcaatcctgagtgcaactcagacctactatcagccttctcctgccgcttcgtctgtgcctagaagagaatttgagcccgatcgtccaatcggttatggggcgtttggtgttgtctggtcggtgacggaccctcgcgatggcaagcgggtcgccctcaagaagatgccccacgtcttccagaacctcatctcatgcaaaagggtctaccgggaactcaagatgctcttcttctttaatcatgacaatgtaagtacatgcatgaatctcaatggaccaaatgtggatatcatcgaacaggcatatgttgtaacagagcttctccagagcgacctacacaagatcatcgtatctccccagccactcagctcagatcatgtcaaggtcttcctctaccagatactcagagggctcaagtacttgcattcagcgggcatcctacatagggatatcaaaccaggcaatcttctcgtcaacagtaactgtgtacttaaggtgtgtgactttggtctggcccgagtggaggagcccgacaccagcaaacacatgacccaggaggtcgtgacccagtactaccgcgcccctgagatcctggtagggagcaaacactacacctcggccgtggacatgtggtcggtaggctgcatcttcgcggagctcctcggcagacggatcctcttccaggctcaaagtccaatcacacaactcaatttaatcacagatcttcttgggacgccatctatggaggatatgaagtacgcctgtgacggagcacgggctcacctcctacgcatgccacataaaccgccttgcctctcagctttatatggtctctccagccacgccactcatgaagctgtccacttactcagtagaatgctcgtcttcaatccggacaaaaggatttcatgtatcgacgccctcgcgcacccttaccttgacgaggggcggttacgttaccacacatgcatgtgcaattgctgccacaatacatcggcaggccggcagtacaccggcgagtttgaacccgctgcccctcagaggttcgactgtttgtacgaggatgacctccacacggtatcgcaggtcaaagaagcgctacacaaattcatcaccgacagacatcagggtaacaccgtacctctatgcatcaacccgcaatcagccgccttcaagagttttgcaagtgcatgcacctttgagtggtacaccatcggtggtgcgccagcattcgtcagtagccagtgcatcggagctgcccccatcaccccagccgtgggactgatgagaaggccgggaggggactacgccccgcccccacccaccagccacacccacggcaatcaacgaaaaaacgtcttgtccagatacatccatggcaagtggtgcttacagatccagaaagaagtccctcccaacacaactcaccaggctcaatga

SEQ ID NO: 141811 - protein, 503 aa, Strongylocentrotus purpuratus
MAVCGSRISHSQMAFANGSSSAHDRAILSATQTYYQPSPAASSVPRREFEPDRPIGYGAFGVVWSVTDPRDGKRVALKKMPHVFQNLISCKRVYRELKMLFFFNHDNVSTCMNLNGPNVDIIEQAYVVTELLQSDLHKIIVSPQPLSSDHVKVFLYQILRGLKYLHSAGILHRDIKPGNLLVNSNCVLKVCDFGLARVEEPDTSKHMTQEVVTQYYRAPEILVGSKHYTSAVDMWSVGCIFAELLGRRILFQAQSPITQLNLITDLLGTPSMEDMKYACDGARAHLLRMPHKPPCLSALYGLSSHATHEAVHLLSRMLVFNPDKRISCIDALAHPYLDEGRLRYHTCMCNCCHNTSAGRQYTGEFEPAAPQRFDCLYEDDLHTVSQVKEALHKFITDRHQGNTVPLCINPQSAAFKSFASACTFEWYTIGGAPAFVSSQCIGAAPITPAVGLMRRPGGDYAPPPPTSHTHGNQRKNVLSRYIHGKWCLQIQKEVPPNTTHQAQ

SEQ ID NO: 141812 - DNA, 1077 bp, Strongylocentrotus purpuratus; identical to SEQ ID NO: 140154
  CDS (1)..(1077)

SEQ ID NO: 141813 - protein, 358 aa, Strongylocentrotus purpuratus; identical to SEQ ID NO: 140155

SEQ ID NO: 141814 - DNA, 1251 bp, Nasonia vitripennis
  CDS (1)..(1251)
atggatcaagcctttgtttggagttctgccctgtttgttcctggcaatgccttagcgattattttccgaaatgtatctacaaacgagcataatgttaatagaaccatctggtggagaggacaaaggatccaaggcatccggccgatcggctacggtgcgtttggcgtagtctgggccgtcaccgacccgcgagacggcaaacgagtagccttaaaaaagttgccaaatgtctttcagagtctggttagcagtaagcgggtgtttagagaattgaaaatgctatgcttcttcaagcacgacaacgtactttccgcgctcgacattttgcagcctccgcacttagattttttccaagagatatatgtcattacggaacttcttcagagcgatcttcacaagataatcgttagtccacagcaccttagctcggatcacattaaagtgttcctttatcaaattcttaggggacttaagtatttgcattctgcccgaattttgcatcgcgacatcaagccgggcaacctgctggtgaacagcaactgcgtgctgaagatttgcgacttcgggctggcgcgcgtggaggagccggacaagaacaaacacatgacccaagaggtggtcacgcaatattaccgagcgccggaaattctgatgggagcgcgacactataccaacgcggtcgacatctggagcgtcggctgcatcttcggcgagctgctgcgacgtcgaatcctcttccaggcgcagagccctgtccagcagctggaactgatcacggagctgctgggcactccgactctcgaggacatgaagtacgcttgcgagggcgcacgatctcacatgctccgacgaactccgaagccgccgtctttgactgccctctactcgctcagcagccaggcgactcacgaagccgtgcatttactctgccaaatgttagttttcgatccggataagcgaatctccgtaaccgacgctctggctcatccatacttagacgagggaagactgagataccactcgtgcatgtgcacttgctgctacacaacgagcgccggcatgagacactacactcgggaattcgagcccgtcactccgcataccttcgatgatctctgggagcgcaaactcacgagtgttcagcaagttaaggaggagatgcgcaagttcatagctgagcaacttaatacttcacgtgttccactttgcataaatccgcaatcagcagcgttcaagagtttcgcgagataa

SEQ ID NO: 141815 - protein, 416 aa, Nasonia vitripennis
MDQAFVWSSALFVPGNALAIIFRNVSTNEHNVNRTIWWRGQRIQGIRPIGYGAFGVVWAVTDPRDGKRVALKKLPNVFQSLVSSKRVFRELKMLCFFKHDNVLSALDILQPPHLDFFQEIYVITELLQSDLHKIIVSPQHLSSDHIKVFLYQILRGLKYLHSARILHRDIKPGNLLVNSNCVLKICDFGLARVEEPDKNKHMTQEVVTQYYRAPEILMGARHYTNAVDIWSVGCIFGELLRRRILFQAQSPVQQLELITELLGTPTLEDMKYACEGARSHMLRRTPKPPSLTALYSLSSQATHEAVHLLCQMLVFDPDKRISVTDALAHPYLDEGRLRYHSCMCTCCYTTSAGMRHYTREFEPVTPHTFDDLWERKLTSVQQVKEEMRKFIAEQLNTSRVPLCINPQSAAFKSFAR

SEQ ID NO: 141816 - DNA, 1305 bp, Nasonia vitripennis
  CDS (1)..(1305)
atggctccgcgttatacagaagacatctgcgccactgccaagcattatcttatgtcgactacccgactatccaccatgttctacacggtcgaggtcggggacaccaagttcaccatcctcaagagatacaccaacctcaagcccatcggctcgggggcccagggtatcgtttgcgcggcgttcgacacagtgactcagcagaatgtggccatcaagaagctctcgaggccctttcagaacgtcacgcacgccaagagggcatatcgggagttcaagctcatgaagctcgtcaaccacaaaaacataatcggactgctgaacgccttcacgccgcagaggtgcttggacgagtttcaggacgtctatctggtgatggagctcatggacgcgaacctctgccaagtcatccagatggacctggaccacgagcgcatgtcctacctgctctaccagatgctctgcggcatcaagcatttgcattccgccgggatcatacacagggatttgaagcctagcaatattgtcgtcaagtcagactgcaccctcaagatattggacttcggcctcgcgaggacggctggcacgaccttcatgatgacgccctacgtcgtgacgaggtactacagggcgcccgaggtcatcctcggcatgggatacaaggaaaatgtcgacatctggtccgttggctgcatcatgggtgagatgattcgcggtggtgtcctcttccccggcaccgatcacatcgatcagtggaacaaaattatagagcaattgggaactccggcgcaagagttcatgcagcgactacagcccaccgtgaggaactacgtggagaaccggccacgctatcccggctaccccttcgagaggctatttccggacgtcctctttccctcggactcctcggagcacaatcgtttgaaagcgagccaggccagggatctattgtcgcgaatgttggtcatcgatccggaacggcgcatctccgtcgatgacgccctgcttcataattacataaatgtttggtacgacgagggtgaagtgaacgcccccgccccgggtccgtacgatcacagcgtcgacgagagagagcataccgtcgaccagtggaaggaactcatctaccaagaggtcatggaatacgagaccagccacaacactgcgtccgcttcgcaatcgccagatacgctgccagcaacacgtcctctctccctggccgtcgctgatactgcgtcgacggcccagagtaagccccagcaacggctcaagataaaaagaatactaccagtcccacctaatgtttaa

SEQ ID NO: 141817 - protein, 434 aa, Nasonia vitripennis
MAPRYTEDICATAKHYLMSTTRLSTMFYTVEVGDTKFTILKRYTNLKPIGSGAQGIVCAAFDTVTQQNVAIKKLSRPFQNVTHAKRAYREFKLMKLVNHKNIIGLLNAFTPQRCLDEFQDVYLVMELMDANLCQVIQMDLDHERMSYLLYQMLCGIKHLHSAGIIHRDLKPSNIVVKSDCTLKILDFGLARTAGTTFMMTPYVVTRYYRAPEVILGMGYKENVDIWSVGCIMGEMIRGGVLFPGTDHIDQWNKIIEQLGTPAQEFMQRLQPTVRNYVENRPRYPGYPFERLFPDVLFPSDSSEHNRLKASQARDLLSRMLVIDPERRISVDDALLHNYINVWYDEGEVNAPAPGPYDHSVDEREHTVDQWKELIYQEVMEYETSHNTASASQSPDTLPATRPLSLAVADTASTAQSKPQQRLKIKRILPVPPNV

SEQ ID NO: 141818 - DNA, 1248 bp, Magnaporthe grisea 70-15; identical to SEQ ID NO: 140120
  CDS (1)..(1248)

SEQ ID NO: 141819 - protein, 415 aa, Magnaporthe grisea 70-15; identical to SEQ ID NO: 140121

SEQ ID NO: 141820 - DNA, 1071 bp, Magnaporthe grisea 70-15; identical to SEQ ID NO: 140122
  CDS (1)..(1071)

SEQ ID NO: 141821 - protein, 356 aa, Magnaporthe grisea 70-15; identical to SEQ ID NO: 140123

SEQ ID NO: 141822 - DNA, 1113 bp, Gibberella zeae PH-1
  CDS (1)..(1113)
atggccgagtttgtacgcgcccagatcttcggaaccacgttcgagattacctcgagccctccattcatcgcaatactgactcgtcttgcgcgcagatactccgatctccagcccgttggcatgggagcttttggtctcgtatgctctgctcgagatcagctcaccaaccaaaatgtcgccgtcaagaagatcatgaagcctttcagcacacctgtgcttgccaagcgcacataccgtgagctcaagctgctcaagcatcttaagcacgaaaacgttatttctctcagtgacatcttcatctcacccttggaagatatttatttcgtcacagaactcctcggtaccgatctccaccgattattgacttcgcgccctctcgaaaagcagttcattcagtatttcctctaccagatcatgcgtggactcaagtacgtgcattcggccggtgttgtccaccgtgacctcaagcctagcaacattctcgtcaacgaaaactgcgatttgaagatctgcgactttggtcttgcccgaatccaggacccccagatgactggctatgtttctacacgatactaccgagctcccgagattatgctcacctggcaaaaatacgacgttgaagttgatatctggagtgctggctgcattttcgctgagatgcttgagggcaagcctcttttccctggaaaggatcacgtcaaccaattctccatcatcaccgagctcctcggcaccccccctgatgatgttatcaacaccatcgccagtgagaacactcttcggtttgtcaagtcgctacccaagcgcgagagacagcccctccgtaacaagttcaagaacgcagacgactcagccattgaccttctcgaacgcatgcttgtctttgaccccaagaagcgaataactgccactgaggctctcgctcacgactacctttctccctaccatgaccctacagacgagcctgtggctgaggaaaaattcgactggagtttcaacgacgccgatctgcctgttgatacatggaagatcatgatgtactcggaaattctcgactatcataatgttgaagccggtgtcaccaacatggaagagcagtttaatggacaatag

SEQ ID NO: 141823 - protein, 370 aa, Gibberella zeae PH-1
MAEFVRAQIFGTTFEITSSPPFIAILTRLARRYSDLQPVGMGAFGLVCSARDQLTNQNVAVKKIMKPFSTPVLAKRTYRELKLLKHLKHENVISLSDIFISPLEDIYFVTELLGTDLHRLLTSRPLEKQFIQYFLYQIMRGLKYVHSAGVVHRDLKPSNILVNENCDLKICDFGLARIQDPQMTGYVSTRYYRAPEIMLTWQKYDVEVDIWSAGCIFAEMLEGKPLFPGKDHVNQFSIITELLGTPPDDVINTIASENTLRFVKSLPKRERQPLRNKFKNADDSAIDLLERMLVFDPKKRITATEALAHDYLSPYHDPTDEPVAEEKFDWSFNDADLPVDTWKIMMYSEILDYHNVEAGVTNMEEQFNGQ

SEQ ID NO: 141824 - DNA, 1251 bp, Gibberella zeae PH-1; identical to SEQ ID NO: 140124
  CDS (1)..(1251)

SEQ ID NO: 141825 - protein, 416 aa, Gibberella zeae PH-1; identical to SEQ ID NO: 140125

SEQ ID NO: 141826 - DNA, 1116 bp, Apis mellifera; identical to SEQ ID NO: 140126
  CDS (1)..(1116)

SEQ ID NO: 141827 - protein, 371 aa, Apis mellifera; identical to SEQ ID NO: 140127

SEQ ID NO: 141828 - DNA, 1389 bp, Apis mellifera
  CDS (1)..(1389)
atggcagtagttgggcccagccgacactcgcgagtgtccatgagcgtgtctatgtcgctaatgcaggggggtggggcgggagcgacaggcggtggcgggacaacgggggcccacccgggacaagcggtcctcgcggcggcggcccaggcaccccccacctactaccaccctaccgctcctgcgcccccgccaccgccgccagcccaggatctcgttcagcccgacagacccatcggatatggtgccttcggcgtcgtctgggcagtgacagatccgagggatggtaggagagtggccttgaaaaaactgccgaatgtctttcagagcctcgtgagcagcaaacgagtcttcagggagttgaagatgctctgtttcttcaaacacgaaaacgttctctcggccctggacatccttcaaccacctcatctggacttcttccaagaaatatatgtgatcacggagctgcttcagagcgatttgcacaagattatcgtcagccctcagcatctaagtcccgaccacatcaaggtcttcctgtatcaaattctcagaggcctcaagtaccttcactcagccagaatcttgcacagggatattaagccgggcaatttactcgtgaacagcaattgcgtgctgaagatctgcgacttcggtttggcccgagtggaagaaccggatcagaacaagcacatgacccaggaagtggtgacgcagtattatcgcgcgccggagatcctaatgggggcgcgacactacacggccgcagtggacgtttggagcgtcggttgcatattcggcgaacttcttcgtcgaaggatccttttccaggcacagagccctgtgcaacagctggaactgatcacagaattgctgggcacgccaaccctcgaggacatgaggttcgcgtgcgagggtgcgagatcccacatgctgaggcgcgcgccgaagccaccctcgttgacggcactctacacccttagcagccaggcgacgcacgaggccgtccatttgctctgccagatgctagtcttcgatcctgacaagaggatcacggtggtggatgcactggcgcatccctatctggacgaagggagactgagatatcactcgtgcatgtgcacgtgctgttacacgaccagcggcggtttgagacagtacacgggtgatttcgagccggccacgtcgcatccgttcgacgatctttgggaacggaagctcaccactgtgcagcaggtgaaagaggaaatgcacaaatttatagcggaacagctgaacacgtcgcgcgtgccgctctgcataaatccgcagtccgcggcgttcaagagctttgcaagctccacagtggctcatccttcggaactgccaccctctcctcaccagtgggaataa

SEQ ID NO: 141829 - protein, 462 aa, Apis mellifera
MAVVGPSRHSRVSMSVSMSLMQGGGAGATGGGGTTGAHPGQAVLAAAAQAPPTYYHPTAPAPPPPPPAQDLVQPDRPIGYGAFGVVWAVTDPRDGRRVALKKLPNVFQSLVSSKRVFRELKMLCFFKHENVLSALDILQPPHLDFFQEIYVITELLQSDLHKIIVSPQHLSPDHIKVFLYQILRGLKYLHSARILHRDIKPGNLLVNSNCVLKICDFGLARVEEPDQNKHMTQEVVTQYYRAPEILMGARHYTAAVDVWSVGCIFGELLRRRILFQAQSPVQQLELITELLGTPTLEDMRFACEGARSHMLRRAPKPPSLTALYTLSSQATHEAVHLLCQMLVFDPDKRITVVDALAHPYLDEGRLRYHSCMCTCCYTTSGGLRQYTGDFEPATSHPFDDLWERKLTTVQQVKEEMHKFIAEQLNTSRVPLCINPQSAAFKSFASSTVAHPSELPPSPHQWE

SEQ ID NO: 141830 - DNA, 1083 bp, Apis mellifera; identical to SEQ ID NO: 140128
  CDS (1)..(1083)

SEQ ID NO: 141831 - protein, 360 aa, Apis mellifera; identical to SEQ ID NO: 140129

SEQ ID NO: 141832 - DNA, 1467 bp, Candida glabrata CBS 138; identical to SEQ ID NO: 140132
  CDS (1)..(1467)

SEQ ID NO: 141833 - protein, 488 aa, Candida glabrata CBS 138; identical to SEQ ID NO: 140133

SEQ ID NO: 141834 - DNA, 1074 bp, Candida glabrata CBS 138
  CDS (1)..(1074)
atgggcaagaaaattgtcttcaacatttccagcgacttccaacttaaatcactgttgggagaaggcgcttatggagttgtttgttctgcggttcataagcctacgggtgaaattgtagctataaagaaaattgttccatttgataagccgttgtttgcattgcggacattaagggaaataaagatactaagaaggtttcaacatgaaaatataatttcaatctttgatatacagaaaccagaaagttttgagaaatttaacgaggtctacattattcaagagttaatgcaaactgatttacatcgagtcattgccacacaaacactaactgatgatcacatccaatattttatctatcaaactttaagggcaatcaaaacattgcatggatcaaatgttatacaccgtgaccttaaacctagtaatatattgatcaactcaaattgtgatttaaaggtttgtgactttggattagctaggataatagatagcggggagaatggtgataatgaggtcgacaagatcggaatgacggaatatgttgcaactcgatggtatcgagcaccagaagtgatgttaacaaatgccaagtattcaagagcgatggacatatggtcttgtggatgcatacttggggagttatttttgaaacgaccactatttcctgggaaggattacagacaccaattgttgctaatttttggattaattggtacgccagactcatctgacaaaagcatggaatgcatagagtcgagaagagcgagacaatatattgcatctctgcaaaaatatccgcctgttcggccattgcagaaagcatttccgggagttaatcccgtgggtgtggatcttttatctcgcatgctagtatttgaccctagagagcgaatatcagctgatgacgctttggcacatccttatctgtctacttatcatgttccagaggatgagcctgccggtgaacctatacctcctgatttctttcagtttgatcagtacaaggaagttcttaccacaaaggatctaaagaaattgttgtggaacgaaatctttcatgaacaagcaacttaa

SEQ ID NO: 141835 - protein, 357 aa, Candida glabrata CBS 138
MGKKIVFNISSDFQLKSLLGEGAYGVVCSAVHKPTGEIVAIKKIVPFDKPLFALRTLREIKILRRFQHENIISIFDIQKPESFEKFNEVYIIQELMQTDLHRVIATQTLTDDHIQYFIYQTLRAIKTLHGSNVIHRDLKPSNILINSNCDLKVCDFGLARIIDSGENGDNEVDKIGMTEYVATRWYRAPEVMLTNAKYSRAMDIWSCGCILGELFLKRPLFPGKDYRHQLLLIFGLIGTPDSSDKSMECIESRRARQYIASLQKYPPVRPLQKAFPGVNPVGVDLLSRMLVFDPRERISADDALAHPYLSTYHVPEDEPAGEPIPPDFFQFDQYKEVLTTKDLKKLLWNEIFHEQAT

SEQ ID NO: 141836 - DNA, 1083 bp, Debaryomyces hansenii CBS767; identical to SEQ ID NO: 140140
  CDS (1)..(1083)

SEQ ID NO: 141837 - protein, 360 aa, Debaryomyces hansenii CBS767; identical to SEQ ID NO: 140141

SEQ ID NO: 141838 - DNA, 1071 bp, Yarrowia lipolytica CLIB122; identical to SEQ ID NO: 140146
  CDS (1)..(1071)

SEQ ID NO: 141839 - protein, 356 aa, Yarrowia lipolytica CLIB122; identical to SEQ ID NO: 140147

SEQ ID NO: 141840 - DNA, 1086 bp, Aspergillus nidulans FGSC A4
  CDS (1)..(1086)
atggtgcagcagatgccgcctcagggaggctcaaggaagatttcctttaacgtctcagatcaatatgagattcaagacgtcattggtgaaggcgcctatggtgttgtttgctctgctatccacaagccctctggccagaaggtagccatcaagaagatcaccccctttgaccattcgatgttttgcctgcgaaccctacgagagatgaagctgctccgctacttcaaccatgagaatatcatctccattttggacatccagaggccgcgaaactatgagagtttcaacgaagtctacctcattcaggaattgatggaaacagatatgcaccgcgttatccgcacgcaagacctgtcagatgaccactgccagtactttatttaccaaactttgcgtgcgctgaaggccatgcactccgctaacgtcctccaccgtgatctcaaaccatcgaaccttctcctcaatgcaaattgtgacctgaaggtctgcgactttggtctagctcgatctgcggcttcgactgacgataattctggtttcatgacggaatacgtggcgacgcgctggtaccgtgcacctgaaatcatgttgacgttcaaggaatacacaaaggcaattgatgtgtggagtgtgggctgcattcttgcagagatgctgagcgggaagcccttgttccctggaaaggactatcaccatcaattgactctaattctggatgttcttggaacacctaccatggaagactactacggaatcaagtcccgacgggctcgggagtacatccgttctctcccattcaagaagaagattccgttcaaggcactgttccctaagagcaacgacctagctctggatctgctagagaagcttttggccttcaacccgacgaagcgaatcaccgtggaggaggctctgcgtcacccgtacctggaaccatatcatgatccagatgacgagccaacagcgcccccaatcccggaaggcttctttgacttcgacaagaataaggatgctctcagcaaagagcagttgaaaagtaagtatctggcgccaatcgactccataagttatgcgacaatcaactaa

SEQ ID NO: 141841 - protein, 361 aa, Aspergillus nidulans FGSC A4
MVQQMPPQGGSRKISFNVSDQYEIQDVIGEGAYGVVCSAIHKPSGQKVAIKKITPFDHSMFCLRTLREMKLLRYFNHENIISILDIQRPRNYESFNEVYLIQELMETDMHRVIRTQDLSDDHCQYFIYQTLRALKAMHSANVLHRDLKPSNLLLNANCDLKVCDFGLARSAASTDDNSGFMTEYVATRWYRAPEIMLTFKEYTKAIDVWSVGCILAEMLSGKPLFPGKDYHHQLTLILDVLGTPTMEDYYGIKSRRAREYIRSLPFKKKIPFKALFPKSNDLALDLLEKLLAFNPTKRITVEEALRHPYLEPYHDPDDEPTAPPIPEGFFDFDKNKDALSKEQLKSKYLAPIDSISYATIN

SEQ ID NO: 141842 - DNA, 1044 bp, Aspergillus nidulans FGSC A4
  CDS (1)..(1044)
atggccgagttcattcgctctgatatcttgggaaccacctttgagaccaccagcagatatgcgaacttgcagcccgttggcctcggcactgcaggagttgtatgttccgcttacgacttgatctcggaacaagtggttgcgatcaagaagatgatgaagccatttcacagcacttcggttgcgaagcggacatatcgagaagtgaaacttctgaggcatcttcgacatgataatctgatcaatatgagcgatatcttcatctcgccactagaagatgtgtatcttgtcaccgaactcttagggacagatctgcacagactgctcaacggaaagccactcgaaagcaaatttgcccagtacttcacctatcaaatcctgcgcggactgaaatacatacactcagcaggcgtaatccaccgagacctcaaaccgggaaatctcctcatcaatgagaactgtgatcttaagatctgcgattttgggctggcccgtgtccaggagccgcagatgactggttatgtttcaacaagatactaccgcgcgccggagatcatgctgacatggcaacggtatgggagcaaggttgatctgtggagtgtgggctgtattcttgcggagatgttgctgggccggccgctgtttccgggcactgaccacattaaccagttctggctgattacagacctgctaggaaatccgccggacgaggtgattgaccggataacaacgaataatgtacgtaaccccgccccggatcttcaaccctccaaccatctggagcccgctaacggaaatcgccggatagactcgtcgggtgcactaaaccttctcgacaacctcctcgtctttgaccctgaccgacgtatctccgccgagcaggggctcatgcacccttggatggccccctatcacgatcccacagatgaacccgtcgcaactgagcaattcgactggtcttttaatgacgctgatctacctttggatacgtggaaaattatgatgtacgttcaccactgttcggatgtagtttctttcacgctgtaa

SEQ ID NO: 141843 - protein, 347 aa, Aspergillus nidulans FGSC A4
MAEFIRSDILGTTFETTSRYANLQPVGLGTAGVVCSAYDLISEQVVAIKKMMKPFHSTSVAKRTYREVKLLRHLRHDNLINMSDIFISPLEDVYLVTELLGTDLHRLLNGKPLESKFAQYFTYQILRGLKYIHSAGVIHRDLKPGNLLINENCDLKICDFGLARVQEPQMTGYVSTRYYRAPEIMLTWQRYGSKVDLWSVGCILAEMLLGRPLFPGTDHINQFWLITDLLGNPPDEVIDRITTNNVRNPAPDLQPSNHLEPANGNRRIDSSGALNLLDNLLVFDPDRRISAEQGLMHPWMAPYHDPTDEPVATEQFDWSFNDADLPLDTWKIMMYVHHCSDVVSFTL

SEQ ID NO: 141844 - DNA, 1272 bp, Candida albicans SC5314; identical to SEQ ID NO: 140148
  CDS (1)..(1272): transl_table=12

SEQ ID NO: 141845 - protein, 423 aa, Candida albicans SC5314; identical to SEQ ID NO: 140149

SEQ ID NO: 141846 - DNA, 1119 bp, Candida albicans SC5314
  CDS (1)..(1119): transl_table=12
atgaagaaatctactggccccactcaaactcgccaagtagtattcaacatatctcaaaactttaaagtgctcaagattttgggagagggtgcttatggcattgttgctttggcagtacatttacccacagagactaaggtggccatcaaaaaaatcgaaccatttgaaagaccattattctgtcttcgtacgttacgagaaatcaaattattaacaaaattcaagaaccacgacaatatagttcgattatacgatgtacaaaaaccaatgaattatgacagcttcaatgaagtttatcttattcaggaatacatgcctctggatttgcataatatcatacacacacatcttttgagcgatcaacacgttcagtattttatctatcagatcctcaaaggattaaagatgattcatagtgcaagagtaatacaccgtgatttgaaaccatccaacattttggtcaatgaaaaatgtgatttgaagatttgtgattttggcttagctcgcttagataccaaacattacaattttgatgaagcacctagaatttcaatgctaactgaatacgtcgctacaagatggtatcgagctccagaaatcatgttgagtgcatccaattattcgacggctatcgatctttggtcggtgggctgtatattggctgaacttttgacttacagggccttgttccctggatctgactacattaatcaattgaaattaatctttgaagtacttggaacaccaaccgatgaagacttgcagatcatcaaatcagaacgtgcacaaaagtttatcagatctctaccaacaaaggtcaagattgacttgagtgaattcattaataatcatccatatagaaatattaaacatcgtggtcgagaccaagtgaacccattagccatagatttattggaaaagttattggttttcgacccagctaaaagaatcaccgttcaagaggcattagaacacccttatttaaattcataccacgaacaacttgatgagcctgttacactgccaatacctatagaagagtttgattttgatatagataagaagaatttggacaccaatgacttgaaaaaacaaattttcgaaatagtcatgtcgtaa

SEQ ID NO: 141847 - protein, 372 aa, Candida albicans SC5314
MKKSTGPTQTRQVVFNISQNFKVLKILGEGAYGIVALAVHLPTETKVAIKKIEPFERPLFCLRTLREIKLLTKFKNHDNIVRLYDVQKPMNYDSFNEVYLIQEYMPSDLHNIIHTHLLSDQHVQYFIYQILKGLKMIHSARVIHRDLKPSNILVNEKCDLKICDFGLARLDTKHYNFDEAPRISMLTEYVATRWYRAPEIMLSASNYSTAIDLWSVGCILAELLTYRALFPGSDYINQLKLIFEVLGTPTDEDLQIIKSERAQKFIRSLPTKVKIDLSEFINNHPYRNIKHRGRDQVNPLAIDLLEKLLVFDPAKRITVQEALEHPYLNSYHEQLDEPVTSPIPIEEFDFDIDKKNLDTNDLKKQIFEIVMS

SEQ ID NO: 141848 - DNA, 1602 bp, Ustilago maydis 521; identical to SEQ ID NO: 140152
  CDS (1)..(1602)

SEQ ID NO: 141849 - protein, 533 aa, Ustilago maydis 521; identical to SEQ ID NO: 140153

SEQ ID NO: 141850 - DNA, 1065 bp, Ustilago maydis 521
  CDS (1)..(1065)
atgtcacatgcccacggacagcagcccaaccactcgaccaccttcaaagtaggcgagacgtacaaggtcgtcgatgtggtcggcgagggagcttacggtgttgtgtgctcggccatccacgttccctcgagctctcgtgtcgccattaagaagatcaccccattcgatcactccatgttctgtcttcgaaccctacgcgagatcaagctgctgcgtcacttcaaccacgaaaacatcatttcaatcctcgacattgtcaagcccgatgattacgacagcttttccgaagtttacctcatccaagaacttatggagaccgacatgcatcgcgtcattcgcacccaggagctctccgatgaccactgtcagtactttatttatcaaacactgcgtggcttgaaggcgctccactcggcgcaagtgctgcatcgcgatttgaaaccctcaaacctcttactcaacgctaactgcgatctcaagatctgcgatttcggtctagcccgttccgcaaaccaacccgaagccgaagggacgggtttcatgaccgaatacgttgccacacgatggtatcgcgcaccggaaatcatgttgacgttcaaagagtatacaaaggccatcgatgtttggtccgtgggctgcattctggccgagatgcttgccggaaaaccgctcttccctggtagagactaccaccaccagctttcgctcaccttggagatcctcggaacgccttcgttggacgacttctacgcaatcacttctactcgctcccgagattacatcagggcactacctttccgaaaacgacgcaacctttcgctcatgtttcccaatgccaatcctctggccgtcgatctgatggaaaagtgtctcacctttagccccaggaagcgcatcaccgtggaagaggcgttagcacatccatatttggaaccctatcatgatcccgaagacgaaccgacagctgaaccgctcgatcctagcttcttcgactttgactactgcaaagagcaactctcaaggtccgaactcaagaggttgatttataacgagatcatgcgttga

SEQ ID NO: 141851 - protein, 354 aa, Ustilago maydis 521
MSHAHGQQPNHSTTFKVGETYKVVDVVGEGAYGVVCSAIHVPSSSRVAIKKITPFDHSMFCLRTLREIKLLRHFNHENIISILDIVKPDDYDSFSEVYLIQELMETDMHRVIRTQELSDDHCQYFIYQTLRGLKALHSAQVLHRDLKPSNLLLNANCDLKICDFGLARSANQPEAEGTGFMTEYVATRWYRAPEIMLTFKEYTKAIDVWSVGCILAEMLAGKPLFPGRDYHHQLSLTLEILGTPSLDDFYAITSTRSRDYIRALPFRKRRNLSLMFPNANPLAVDLMEKCLTFSPRKRITVEEALAHPYLEPYHDPEDEPTAEPLDPSFFDFDYCKEQLSRSELKRLIYNEIMR

SEQ ID NO: 141852 - DNA, 1206 bp, Cryptococcus neoformans var. neoformans B-3501A; identical to SEQ ID NO: 140206
  CDS (1)..(1206)

SEQ ID NO: 141853 - protein, 401 aa, Cryptococcus neoformans var. neoformans B-3501A; identical to SEQ ID NO: 140207

SEQ ID NO: 141854 - DNA, 1158 bp, Strongylocentrotus purpuratus
  CDS (1)..(1158)
atggcaggcaccaagctcaaccaccatcagcctaaccatcatcagttcaactatcatcaactcaactcacagttctaccatgtcactgttggagatacacatttccagatcctcaagagatacaagaacctcaagagtgttggcagcggcgcccaaggtctagtcgtagctgcatatgatgtcctcacaaaccagagtgttgctatcaagaagctaagtcgaccgttccagaatgtgacgcatgccaagcgagcgtacagagagtatatcctcatgaaattgtgcaatcataaaaatattattggtctcctgaatgtgttcacgccgcagcggacgtttgatgactttgcagatatttacctagtgatggaactaatggacgctagtctggtccaagtcgttcagatggacctggaccatgagaggatctcctaccttctctatcagatgctatgtggcatcaaacacttacacagtgcagggattatccacagagacttgaaacccagcaatatcgtagtaaagacagactgttcgctgaagatcctggactttggtctcgccaggacagctagtactagcttcatgatgaccccttacgtcgttaccaggtactacagagcaccagaggtcatcctaggcatgggctacaaggagaacgttgatatctggtccataggctgtatatttggtgagatgatcagaggacaagtgatgttccccggctcagatcacattgaccaatggaacaagatcgctgacctcctagggaccccaacggacattttcctgagcagactccaacccatggtcaagcagtacgttgagaacaggacaaagtgtccgggctattcctttgagatgttgttccctgatgaactcttctaccaagctgagagcagtacggagaagaccaaactgtgtgttgcacaagccagaaatctgctctcaaaaatgctcatcgtggaccccgaacagaggatatcagttgatgaagctcttcagcacccctacatcaacgtatggtttgacccaggagaagtgtatggacctcctccaattccttatgaccattcaatagacgacggcggtgatcatatattagaagaatggaaagacgagagggagcacacattggaacagtggaaaggcttttga

SEQ ID NO: 141855 - protein, 385 aa, Strongylocentrotus purpuratus
MAGTKLNHHQPNHHQFNYHQLNSQFYHVTVGDTHFQILKRYKNLKSVGSGAQGLVVAAYDVLTNQSVAIKKLSRPFQNVTHAKRAYREYILMKLCNHKNIIGLLNVFTPQRTFDDFADIYLVMELMDASLVQVVQMDLDHERISYLLYQMLCGIKHLHSAGIIHRDLKPSNIVVKTDCSLKILDFGLARTASTSFMMTPYVVTRYYRAPEVILGMGYKENVDIWSIGCIFGEMIRGQVMFPGSDHIDQWNKIADLLGTPTDIFLSRLQPMVKQYVENRTKCPGYSFEMLFPDELFYQAESSTEKTKLCVAQARNLLSKMLIVDPEQRISVDEALQHPYINVWFDPGEVYGPPPIPYDHSIDDGGDHILEEWKDEREHTLEQWKGF

SEQ ID NO: 141856 - DNA, 1119 bp, Tribolium castaneum; identical to SEQ ID NO: 140156
  CDS (1)..(1119)

SEQ ID NO: 141857 - protein, 372 aa, Tribolium castaneum; identical to SEQ ID NO: 140157

SEQ ID NO: 141858 - DNA, 1368 bp, Tribolium castaneum
  CDS (1)..(1368)
atgacagtgaagatgtatttgatggctgtggtgggccccagccgccactcaagggtgtccatgtccgtgtccatgagtctgatgcagggtaccgccggccccaccgccggggggcagcaagggggcctgcacgcggcgcagccctactaccacccccagcatgcagcggccccggcgcacacccaggagcaggtccagccggaccgaccgatcggatacggagctttcggagtcgtttgggcggtgacggatccccgcgacggcaggagggtcgccctgaagaagttaccgaatgtgttcgcatcgttagtttcatcgaaaagagtgtttagagaactgaaaatgctctgctttttcaaacacgaaaacgttctttccgccttagatatcctccaaccgcctcacttagacttcttccaggaaatatatgtaataacggaattgcttcaaagcgatttacacaaaattatagtatcacaccagcctctttcctcggatcacatcaaggtgtttctctaccagatacttagaggtttaaaatatttacattcggctaggatattacatagagacataaaacctggaaaccttttagtaaacagcaattgtgttcttaagatctgtgattttggtttagcgagagtagaagaacccgactcgtccaaacatatgacccaagaagtggtaacgcagtattacagagctccggaaattctaatgggagcgaaacattacacggcggctgtggacgtgtggtctgtcgggtgcattttcggggaattactgggccggaggatactgttccaggcccaaaatcccgtacaacaattagaattaataacggaattgttaggaacgccgtcgttggacgatatgaaatacgcctgcgaaggcgccaagacgcatatgctgaggagggcgcccaagccgccttcgttatcggctttttacacgctgagttcacaggcgacgcacgaagtggtccatctgctctgtcagatgctcgtttttgacccggacaaacgtatctcggtagtggacgccttggcgcacccctatttggacgagggccgtctgcggtaccactcgtgcatgtgcaaatgctgctacacgacagccagcggcatgagacaatacacgtccgaatttgaaacgaccgccccccaaggattcgacgatcattgggaaaagaagctgacgtctgtacaacatgtgaaagaggagatgcataagttcatagcagagcaactgaatactagtagagttcctctttgcataaacccccaatctgcggcgttcaagagtttcgccagttcgactgtagctcacccatccgagttgcctccttcgccccaccaatgggattga

SEQ ID NO: 141859 - protein, 455 aa, Tribolium castaneum
MTVKMYLMAVVGPSRHSRVSMSVSMSLMQGTAGPTAGGQQGGLHAAQPYYHPQHAAAPAHTQEQVQPDRPIGYGAFGVVWAVTDPRDGRRVALKKLPNVFASLVSSKRVFRELKMLCFFKHENVLSALDILQPPHLDFFQEIYVITELLQSDLHKIIVSHQPLSSDHIKVFLYQILRGLKYLHSARILHRDIKPGNLLVNSNCVLKICDFGLARVEEPDSSKHMTQEVVTQYYRAPEILMGAKHYTAAVDVWSVGCIFGELLGRRILFQAQNPVQQLELITELLGTPSLDDMKYACEGAKTHMLRRAPKPPSLSAFYTLSSQATHEVVHLLCQMLVFDPDKRISVVDALAHPYLDEGRLRYHSCMCKCCYTTASGMRQYTSEFETTAPQGFDDHWEKKLTSVQHVKEEMHKFIAEQLNTSRVPLCINPQSAAFKSFASSTVAHPSELPPSPHQWD

SEQ ID NO: 141860 - DNA, 1059 bp, Tribolium castaneum; identical to SEQ ID NO: 140158
  CDS (1)..(1059)

SEQ ID NO: 141861 - protein, 352 aa, Tribolium castaneum; identical to SEQ ID NO: 140159

SEQ ID NO: 141862 - DNA, 1218 bp, Puccinia triticina
  CDS (1)..(1218)
atggcttctgctgctgtagctctcccgagctctgccaccggtggatcaatgaatcctactgcgcccgcctcaacctctgtcaacgccactactatcaacatcaccaatgccccagccaacaagccaaagcaagctggatcccgggccgtcggcgaacctagaagggtcaggttcaacgttgggtcgaaatatcacgttatggatgtcatcggcgagggtgcctacggggtggtctgctcggccatacatcgcccaactggccagaaggtcgccatcaagaagattgtccccttcgaccactcaatgttctgtcttagaaccttgcgagaattgaagttgctcaagtatttccaagaacacaacgtctctgaaaacattgtttcgattgtggacatcatccgacctcctaccatcgaagccttcaaggaggtctatcttatccaagaattgatggagaccgacatgcaccgagtcatcagaacgcaagttttatcggatgaccattgccaatacttcatctacccgacgctgcgagccatgaaggccctccattcggcagatgtgatccatcgggatttgaagccatcgaaccttttactgaacgccaactgtgacctcaaggtctgcgaatttggattggctcgctcgattcggactgccgagcaggagacgggcttcatgactgaatacgtggccacccgatggcacagagcccccgagatcatgctcaccttcaagcaatacaccaaagccatcgacgtctggtccgtcggctgcatcttgggcgagatgctctccggacgccccttgttcccgggccgggactaccatcaccaactgacgttgatcctggacgtgcttggtaccccaactcttgacgagttctacgccatcaactctcgccgttctcgggactacatccgagcccttcccctccgcaagaagcgtcccttcgccaccatctaccccaacgcttcacccttggctatcgacttcctcaccaaaaccctcaccttcgaccccaagaagcgactcactgtcgaggaagctctacagcatccttacctggaggcctaccacgaccctgaagacgagccaactgctcccccacttgatgaagacttctttgcctttgaccgacagaaagacgagatcagcaaggaggaactcaagcggctattatttgaggaaatcaacagctttcactttaccacttga

SEQ ID NO: 141863 - protein, 405 aa, Puccinia triticina; identical to SEQ ID NO: 140161

SEQ ID NO: 141864 - DNA, 1128 bp, Citrus sinensis; identical to SEQ ID NO: 140162
  CDS (1)..(1128)

SEQ ID NO: 141865 - protein, 375 aa, Citrus sinensis; identical to SEQ ID NO: 140163

SEQ ID NO: 141866 - DNA, 1419 bp, Dunaliella salina; identical to SEQ ID NO: 140168
  CDS (1)..(1419)

SEQ ID NO: 141867 - protein, 472 aa, Dunaliella salina; identical to SEQ ID NO: 140169

SEQ ID NO: 141868 - DNA, 1254 bp, Cochliobolus heterostrophus
  CDS (1)..(1254)
atgccactcctcgggatgcctgctcacgccttccaggtcttcaaccaagagttcattgtcgacgagcgctacaatgtaacaaaagaactcggacagggtgcctacggcatcgtatgtgcggccaccaacaaccagacgggcgagggcgtagccatcaagaaggtcaccaacgtcttcagcaagaaaattcttgccaagcgtgccctgcgcgagatcaagctgctccaacacttcagaggacatcgcaacataacatgtctctacgatatggacattcctcgccctgataacttcaacgagtgctacctctacgaggagctcatggaatgcgacctggcagccatcatccgatccggccagcccctgaccgacgctcacttccagtccttcatctaccaaatcctatgtggtctcaagtacatccactcggcaaatgttctgcaccgcgacctgaagcccggtaacctgcttgtcaatgccgactgtgaactcaagatttgcgattttggactggcaagaggattctccatggaccctgaggagaacgcaggctacatgaccgagtatgtcgctacccgatggtacagagcccctgaaatcatgttgagcttccagagctacacaaaagccattgatgtgtggtctgtagggtgtattctcgctgagctgcttggaggcaagcccttcttcaagggccgtgactacgtcgaccagctcaaccagattttgcactacctgggaacaccaaacgaagaaaccctgtcgcgaataggttctcctcgtgcacaggactatgtccggaatctgccatacatgcagaagatgtcattccagtctctcttcaaaaacgcaaaccccgatgcgcttgacctactagaccgcatgcttgctttcgacccatctagccgtatttcagttgaggaggccctggagcacaggtacctgcaaatttggcatgatgcatccgacgaaccttcatgcccgacgacttttgactttcagtttgaagtcgttgaagagattccagagatgaagaagatgatcttggatgaggtcagccgtttccgccaaatggttcgcgtacagcccggtgcaggcgccggtgcagcccaggcccctcaggttccgatacccaacaattacgatcgtacaggatatgaggagccaaggccacaggaggcatttaaccagggagggtggaatggcagtgatctcgagcgcgatcttcagggactggatggccgaatgcgatag

SEQ ID NO: 141869 - protein, 417 aa, Cochliobolus heterostrophus
MPLLGMPAHAFQVFNQEFIVDERYNVTKELGQGAYGIVCAATNNQTGEGVAIKKVTNVFSKKILAKRALREIKLLQHFRGHRNITCLYDMDIPRPDNFNECYLYEELMECDLAAIIRSGQPLTDAHFQSFIYQILCGLKYIHSANVLHRDLKPGNLLVNADCELKICDFGLARGFSMDPEENAGYMTEYVATRWYRAPEIMLSFQSYTKAIDVWSVGCILAELLGGKPFFKGRDYVDQLNQILHYLGTPNEETLSRIGSPRAQDYVRNLPYMQKMSFQSLFKNANPDALDLLDRMLAFDPSSRISVEEALEHRYLQIWHDASDEPSCPTTFDFQFEVVEEIPEMKKMILDEVSRFRQMVRVQPGAGAGAAQAPQVPIPNNYDRTGYEEPRPQEAFNQGGWNGSDLERDLQGLDGRMR

SEQ ID NO: 141870 - DNA, 1074 bp, Gibberella intermedia
  CDS (1)..(1074)
atggccgagttcgtacgcgcccaaatctttggcaccacattcgagatcacctccagatactccgatctccagcctgttggcatgggagcttttggcctcgtttgctctgcccgggatcaacttaccaaccaaaatgtcgcagtcaagaagatcatgaagcctttcagcacacctgtgctcgcaaagcgcacataccgtgaactcaagctgctcaagcacctcaagcacgaaaatgtcatttctctcagcgacatctttatttctcctctggaagatatctattttgtcacagagctcctcggcaccgatcttcaccgattattgacatcgcgccctcttgagaagcagttcatccagtacttcctctaccagattatgcgaggtctgaagtacgtgcattcggccggcgttgtccaccgcgatctcaaacccagcaatatcctcgtcaacgaaaactgtgatctcaagatttgcgactttggtcttgcacgaatccaggaccctcagatgactggttatgtctccacacgatactaccgagcccccgaaatcatgctcacctggcaaaaatacgacgtcgaggttgatatttggagtgctggttgcatctttgctgagatgcttgaaggcaaacctttgttccccggaaaagatcacgtcaaccaattctctatcatcactgagctacttggtacccctcctgatgatgttatcaacactatcgccagcgagaacacactgcggttcgtgaagtcgctgcccaaacgcgagcgacagcctcttcgtaataagttcaagaatgccgacgattcggctattgatctgctggagcgcatgcttgtcttcgaccctaagaagcgaataactgccacagaggccctctctcacgactatctctctccctaccacgatcccacagacgagcctgtggcggaggagaagcttgactggagcttcaacgacgccgatctgcccgttgatacatggaagatcatgatgtactcggaaattctcgattatcataacgtggaagctggagttaccaacatggaggagccattcaacggacaataa

SEQ ID NO: 141871 - protein, 357 aa, Gibberella intermedia
MAEFVRAQIFGTTFEITSRYSDLQPVGMGAFGLVCSARDQLTNQNVAVKKIMKPFSTPVLAKRTYRELKLLKHLKHENVISLSDIFISPLEDIYFVTELLGTDLHRLLTSRPLEKQFIQYFLYQIMRGLKYVHSAGVVHRDLKPSNILVNENCDLKICDFGLARIQDPQMTGYVSTRYYRAPEIMLTWQKYDVEVDIWSAGCIFAEMLEGKPLFPGKDHVNQFSIITELLGTPPDDVINTIASENTLRFVKSLPKRERQPLRNKFKNADDSAIDLLERMLVFDPKKRITATEALSHDYLSPYHDPTDEPVAEEKLDWSFNDADLPVDTWKIMMYSEILDYHNVEAGVTNMEEPFNGQ

SEQ ID NO: 141872 - DNA, 1107 bp, Medicago truncatula
  CDS (1)..(1107)
atggcaacgttagttgaacccccttacagaattaagccaaagggaaagcattattatagaatatcaaaaacattgtttgaggttgatatgaagtatgttccaattaaggctattggcagaggaacatatggtgtggtgtgctcatccatcaataaagatactgatgagaaagttgcaattaagaagattagcaatatatttgataattgtattgattcagtgagaactttaagggagatgatgctgcttagaaatattcgacacgagaatgtgattgctttgaaagatgttatgatgccggtacatagaacaagttttaaggatgtctacttggtttatgaactcatggaaacagatcttcatcaaattatcaagtctactcagccactttctaatgatcattgcaaatatttcttgtttcagctactacgtggtcttaattatattcactctgcaaagattcttcaccgagatttgaagcctagtaatctgcttgtcaatagcaattgtgatttgaagatatgtgactttgggcttgcccgaaccaatggagtgtatggcgagtttatgacggagtatgttgtcacacgctggtatcgtgctcccgagcttctattaagttgtgacagttacggaacctccatcgatgtgtggtccgtaggatgcattcttgctgagattcttggtagaaagccaatcttccctggaactagtagtttggatcaactgaaactaattgtaagtgttcttgggagtccgcatgaatatgatctcgagttcattgatactcaaagagagaggatgtttatcaaatcatttccttatacacgaggggtacacttctctaatctattcccacaagcggatccattagccatagacttgttacaaaaaatgcttgtgttcgatccgacgagaagaattactgtctcagaagcacttcaacatccatatatggctgatctatatgatccatggtgtaatactcctgctgaagtccctataaatctcgacattgatgaaaattggggcgaacaaatgattagagaaatgatgtggaatgagatgctacatcaccatcctgaagttgcttatgccaatgcataa

SEQ ID NO: 141873 - protein, 368 aa, Medicago truncatula
MATLVEPPYRIKPKGKHYYRISKTLFEVDMKYVPIKAIGRGTYGVVCSSINKDTDEKVAIKKISNIFDNCIDSVRTLREMMLLRNIRHENVIALKDVMMPVHRTSFKDVYLVYELMETDLHQIIKSTQPLSNDHCKYFLFQLLRGLNYIHSAKILHRDLKPSNLLVNSNCDLKICDFGLARTNGVYGEFMTEYVVTRWYRAPELLLSCDSYGTSIDVWSVGCILAEILGRKPIFPGTSSLDQLKLIVSVLGSPHEYDLEFIDTQRERMFIKSFPYTRGVHFSNLFPQADPLAIDLLQKMLVFDPTRRITVSEALQHPYMADLYDPWCNTPAEVPINLDIDENWGEQMIREMMWNEMLHHHPEVAYANA

SEQ ID NO: 141874 - DNA, 1128 bp, Vitis vinifera
  CDS (1)..(1128)
atgtctatggagtcgagcgctggttcagttgaagggaatatcagaggagtgtcgactcatggtggacggtatgttcagtacaatgtgtatgggaacctcttcgaagtttctaggaagtacgtgccgccaattcggcctgtgggtcgtggtgcttatggtatcgtgtgcgctgcgatgaactcagagacacgggaggaagttgccattaagaagattggtaatgcatttgataataggatagatgccaaacggacattacgggaaattaagcttcttcgccacatggatcatgaaaatgttattgtcttgaaagacatcatacggccacctaagagggagaacttcaatgatgtctacattgtttatgaattaatggacactgatctgcatcagataatacgttccaaccaaccactgaatgatgaccactgccggtacttcctgtatcaggtgttacgaggacttaaatatgtacactcagcaaatgtcttgcatcgtgatttgaagccgagtaatttgcttctgaatgcaaattgtgatcttaagattggggattttggacttgcgaggacgacatctgaaacagacttcatgactgagtatgttgttacccgatggtatcgtgcaccagaattgctccttaattgttcagaatacactgcggcaattgatatttggtcagtgggttgtatccttggagaaatcatgacaaggcaacctctgtttcctggcagagattatgtccatcagctgagacttatcacagagcttataggttcacctgatgactctagccttgggtttcttcgaagtgataatgcccgaagatatgttaggcagctaccacaatacccgagacaacaatttcaggctagatttcctaatatgtctcctggagctattgatttgctagaaaaaatgcttgtatttgatccaaacaggcgcattacagttgaaggggcactgtctcatccatacttggcacctcttcatgatatcaatgaggagcccgtttgtccaaggccttttgtttttgatttcgagcaaccatcatttactgaagagaatatcaaagaactcatctggagggaatccgtaaaattcaatccagacccaccagttcattga

SEQ ID NO: 141875 - protein, 375 aa, Vitis vinifera
MSMESSAGSVEGNIRGVSTHGGRYVQYNVYGNLFEVSRKYVPPIRPVGRGAYGIVCAAMNSETREEVAIKKIGNAFDNRIDAKRTLREIKLLRHMDHENVIVLKDIIRPPKRENFNDVYIVYELMDTDLHQIIRSNQPLNDDHCRYFLYQVLRGLKYVHSANVLHRDLKPSNLLLNANCDLKIGDFGLARTTSETDFMTEYVVTRWYRAPELLLNCSEYTAAIDIWSVGCILGEIMTRQPLFPGRDYVHQLRLITELIGSPDDSSLGFLRSDNARRYVRQLPQYPRQQFQARFPNMSPGAIDLLEKMLVFDPNRRITVEGALSHPYLAPLHDINEEPVCPRPFVFDFEQPSFTEENIKELIWRESVKFNPDPPVH

SEQ ID NO: 141876 - DNA, 1977 bp, Vitis vinifera
  CDS (1)..(1977)
  misc_feature (264)..(264): r is g or a
  misc_feature (292)..(292): r is g or a
  misc_feature (321)..(321): w is a or t
  misc_feature (350)..(350): y is t or c
  misc_feature (360)..(360): k is g or t
  misc_feature (669)..(669): s is g or c
  misc_feature (971)..(971): y is t or c
  misc_feature (1572)..(1572): r is g or a
  misc_feature (1911)..(1911): r is g or a
atggcggctggaagagtcggtgtttccaggaggaatgatttttacaatcgagatcgcgatcgcgatcggggcgttacgggtaggaatgggttcgattcgttgtcgagggtgagcagtgatgttggtggtcgtcgtaatgtgttccgtgttaggatcggtgaaaaagagcttggtaagttatcctctgggcgtaaaattggatctcagatggtggatagtgagacttctgaggttgataatggggttaagatgaactgtgatagraagaggaagttttcgcctattgtgtggracgcggagaaggaagtgaggatttcgtcwaagaatggggttgtatctatgagcactgygttgtctcakcctaaattgttgggtgaagttgtttcagatgaggttgttgcggtgcacagtgatgctgatcggattcagtgcttgcagtcttctattatagagtcccatgtggtgagcggctctgctgaaactgctgttgtggagcctcctgcatgtttgtcttctctgatgcctggtcagcgctgtgggaggagtggtgaagaagtggagcatctggaggaggaagttgtttgttcctggaatatcgccacatctaggtgggcatctgaaagtgattctccaagagaaaaatgtttctctgataatggaaatatgccsaagcgaagtaaaatgagttctcctatggattcaccttcaagaactctattagatggaaaggcatccagtcctgagagtggggagtttcaaagagaagactcagaaggagatagggctgaatcttctgtaaccgatgaagttggtattttcatagggcgtgctggtggagaagaatgttctggaaatgaattagacaacaatgattgtatggaaatcaatgacggtgaggatgagactcgtgttgattatcagtcgggcttggattctgaggatggtaatgaggttcatcttccagtagagtygctgcctcccccacaaaggagtgtaaacatgcttcaggaatgtagaagtgtgtttgaatatgataggctcaataaaataaacgaaggtgcatatggtgtagtgtatagagccagggacaaaaaaacgggggaaatcgtggcattgaagaaaatgaaaatgaagatagcagaaacagatggtttccctatgtcagctttgagggaaataaacattctcttgtcttttcatcacccctcgattgtggatgttaaagaagttgttatggatgactttggtactgtttacatggttatggagtacatggaacatgaccttaagcggctgattgaattgaagaaacggtctttctctttaagtgaagttaaaggcctgatgctacagctgttggagggtgtccagcatcttcatcataattgggtgctacacagggatttgaagacatcaaatcttcttttgaacgacaatggtgagttgaaaatctgtgactttgggttgtctcgccagtatgcaagcccatctaaaccatatactcagttggtggtcactctatggtacagggctcctgaacttctgctgggaacaaaacaatactcaacggcrattgacatgtggtctgtgggttgtataatggctgaacttttagcgaaagagccactattccaagggaaaactgaattggatcagcttgacaagatttttaagattcttggaacacccaataaaacgatttggccaggggtttccaatttgcctggattcaaagccaactttgtcaagcaaccgtataatctgttgaggaagaaatttccagctacatctttcactggatttccagttctctctgattcagggtttgacctgttgagcaaacttctaacctacgaccctgagaagcgaataaccgcagaagctgcattggaccatgactggtttcatgargtaccccttcccaaatgtgaaggtttcatgccttttttccctgctcaacatgctcaggacaggtag

SEQ ID NO: 141877 - protein, 658 aa, Vitis vinifera
  misc_feature (117)..(117): The Xaa at location 117 stands for Ala, or Val.
  misc_feature (120)..(120): The Xaa at location 120 stands for Gln, or His.
  misc_feature (324)..(324): The Xaa at location 324 stands for Leu, or Ser.
MAAGRVGVSRRNDFYNRDRDRDRGVTGRNGFDSLSRVSSDVGGRRNVFRVRIGEKELGKLSSGRKIGSQMVDSETSEVDNGVKMNCDRKRKFSPIVWBAEKEVRISSKNGVVSMSTXLSXPKLLGEVVSDEVVAVHSDADRIQCLQSSIIESHVVSGSAETAVVEPPACLSSLMPGQRCGRSGEEVEHLEEEVVCSWNIATSRWASESDSPREKCFSDNGNMPKRSKMSSPMDSPSRTLLDGKASSPESGEFQREDSEGDRAESSVTDEVGIFIGRAGGEECSGNELDNNDCMEINDGEDETRVDYQSGLDSEDGNEVHLPVEXLPPPQRSVNMLQECRSVFEYDRLNKINEGAYGVVYRARDKKTGEIVALKKMKMKIAETDGFPMSALREINILLSFHHPSIVDVKEVVMDDFGTVYMVMEYMEHDLKRLIELKKRSFSLSEVKGLMLQLLEGVQHLHHNWVLHRDLKTSNLLLNDNGELKICDFGLSRQYASPSKPYTQLVVTLWYRAPELLLGTKQYSTAIDMWSVGCIMAELLAKEPLFQGKTELDQLDKIFKILGTPNKTIWPGVSNLPGFKANFVKQPYNLLRKKFPATSFTGFPVLSDSGFDLLSKLLTYDPEKRITAEAALDHDWFHEVPLPKCEGFMPFFPAQHAQDR

SEQ ID NO: 141878 - DNA, 1731 bp, Vitis vinifera
  CDS (1)..(1731)
atggggtgtgtacttggtcgtgaagtgttgtcgaacgtggtggtttcggaggctaatggggcggagaagagtatcaaggagaagaggagtaattcgagtgtcaattcgaataggaagttggatgatgtgacgaagaaaagtgatagtaaggttgaggttggtaacggagagacccaaaaggaggagaagactgatggtagtcaacggccccgaggtgataagaaaaaattgaggtcaaatccgaagttgagtaatctgcccaatcatgtgcgtggagagcaagttgcagctgggtggccgtcttggttatcggatgttgcagggccagcacttaatggctggatacctcggcgagcagacactttccagaaacttgataagattggacaaggaacatatagcaatgtgtataaagctagagatatgttaacgggcaaaattgttgcactaaagaaagttcgatttgataatttggaacctgagagtgtgaaatttatggctagagagattgtcattttgcggcgcttggatcatcccaatgttgtaaaattggagggtttggtgacttcaaggctgtcctgcagtttgtatcttgtatttgagtatatggagcatgatttggctggacttgctgcaagcccgggtatcaaattcactgaacctcaggtcaaatgttacatgaaacaactactatctggcctagagcattgtcacaaccgcggtgtgcttcaccgtgacatcaaaggatcaaatctccttcttgataatggaggagtacttaagattgctgattttggcttggctgctatatttgatcctaattacaagcacccaatgacgagtcgggtggtaaccttatggtatcgacctccagagcttctgcttggggctaatgactatggcgtcggtgtggacttgtggagtgcaggctgcattttagctgagttattggctgggaagcccatcatgcctggtcgtacagaggtagagcaattacataagatatacaagctatgtggctcaccttctgatgaatactggaaaaaatatagattgccaaatgcaaccttattcaagcctcgagagccttacaaacgatgcatagcagagacattcaaagacttcccaccatcttcactgccacttattgaaactcttcttgcaattgatccagtggaacgtcggacagccacagctgcattaaactgtgaattcttcacaacgaaaccttatgcttgtgaaccatctagccttccgcaatatcctccaagcaaggagatggatgccaagaggcgagatgatgaagctcgaaggcaaaaaaccgctagcaaagcccacggtgatggtgcgaagaaaatgcgtccacgcgctagggcaatgcctggaccagaagccaatgctgagcttcaatctaatcttgatcgaagacgcctaatctcccatgcaaatgcaaagagtaagagtgaaaagtttcctccacctcaccaggacggagcggttggcttccccttgggtgcttcacaacacattgatcctgcttttgtccctggtgatgtgccattcagttctacatcatttacatcttcaaaagatcatgcccagacctggtctggtccaataggcgaccctgctgccattggagctctaaggcgaaagaagaacacttatggtgatgctcgagaaccgaaaaaaccagcagcaaagcaggagtttgctaccacacttgtgtga

SEQ ID NO: 141879 - protein, 576 aa, Vitis vinifera
MGCVLGREVLSNVVVSEANGAEKSIKEKRSNSSVNSNRKLDDVTKKSDSKVEVGNGETQKEEKTDGSQRPRGDKKKLRSNPKLSNLPNHVRGEQVAAGWPSWLSDVAGPALNGWIPRRADTFQKLDKIGQGTYSNVYKARDMLTGKIVALKKVRFDNLEPESVKFMAREIVILRRLDHPNVVKLEGLVTSRLSCSLYLVFEYMEHDLAGLAASPGIKFTEPQVKCYMKQLLSGLEHCHNRGVLHRDIKGSNLLLDNGGVLKIADFGLAAIFDPNYKHPMTSRVVTLWYRPPELLLGANDYGVGVDLWSAGCILAELLAGKPIMPGRTEVEQLHKIYKLCGSPSDEYWKKYRLPNATLFKPREPYKRCIAETFKDFPPSSLPLIETLLAIDPVERRTATAALNCEFFTTKPYACEPSSLPQYPPSKEMDAKRRDDEARRQKTASKAHGDGAKKMRPRARAMPGPEANAELQSNLDRRRLISHANAKSKSEKFPPPHQDGAVGFPLGASQHIDPAFVPGDVPFSSTSFTSSKDHAQTWSGPIGDPAAIGALRRKKNTYGDAREPKKPAAKQEFATTLV

SEQ ID NO: 141880 - DNA, 1116 bp, Vitis vinifera
  CDS (1)..(1116)
atggcaactccagttgagcctccaaatgggactagatgcgaaggaaaacattattattcaatgtggcagactttgtttgagattgatacaaaatatgtgcccatcaagccaataggtcggggagcatacggtatcgtgtgctcttctgtgaacaaggaaaccaatgagaaagttgcaattaagaagatacataatgcgtttgataaccgtgttgatgcactgagaactttgcgtgagattaaacttcttcggcatcttcgacatgaaaatgtgattgctttaaaagatgtcatgatgcctatacacaggagaagtttcaaggatgtctatctggtttatgaactcatggatacggatttgcaccagattattaagtcctcccaagcgcttactaatgaccactgccaatattttctgttccagttgctccgaggcctgaagtatctccactcagcaaacatcctccaccgagacttgaagcctggaaaccttcttatcaatgcaaactgtgacctaaaaatatgtgattttgggctagctcgaactagcactggcaagggccagttcatgactgagtatgtggtcactcgctggtacagggccccagaactcctcctctgctgtgacaactatggaacctccattgatgtgtggtctgttggatgcatctttgcggagcttctcggccggaaacctatattccctggcacagagtgtcttaaccagctcaaactgatcatcaacatccttgggagccagagggaggctgatattgaattcattgacaaccccaaagcaaggaaatacatcaagtctctcccgttctcaccagggacgcctttttcccgtctttacccaaatgcccatcccatggcaattgatctgctgcagaagatgctaatttttgacccctcaaagaggattggtgtcaccgaagcactccaacaccctttcatgtcctcactgtatgatcccagtaagaaccctccagcacaggtccccattgatctggacatagacgaggatttaggggaagagatgataagggagatgatgtggaaggaaatgctccattatcatcctgaagctgttacaagcaatggggaggcaagttag

SEQ ID NO: 141881 - protein, 371 aa, Vitis vinifera
MATPVEPPNGTRCEGKHYYSMWQTLFEIDTKYVPIKPIGRGAYGIVCSSVNKETNEKVAIKKIHNAFDNRVDALRTLREIKLLRHLRHENVIALKDVMMPIHRRSFKDVYLVYELMDTDLHQIIKSSQALTNDHCQYFLFQLLRGLKYLHSANILHRDLKPGNLLINANCDLKICDFGLARTSTGKGQFMTEYVVTRWYRAPELLLCCDNYGTSIDVWSVGCIFAELLGRKPIFPGTECLNQLKLIINILGSQREADIEFIDNPKARKYIKSLPFSPGTPFSRLYPNAHPMAIDLLQKMLIFDPSKRIGVTEALQHPFMSSLYDPSKNPPAQVPIDLDIDEDLGEEMIREMMWKEMLHYHPEAVTSNGEAS

SEQ ID NO: 141882 - DNA, 1107 bp, Vitis vinifera
  CDS (1)..(1107)
  misc_feature (118)..(118): m is a or c
  misc_feature (126)..(126): y is t or c
  misc_feature (229)..(229): y is t or c
  misc_feature (691)..(691): r is g or a
  misc_feature (760)..(760): m is a or c
  misc_feature (801)..(801): r is g or a
atggccactcgagttgagcctccaaatgggtttaggtcacaagggaagcattattacacaatgtggcaaacattgttcgaaattgatacgaagtatgttccaatcaaacccataggtmgaggatcytatggtgtagtgtgctcttccgtaaacatggaaacaaatgagaaagttgcaatcaagaagatcaataatgtatttgagaaccgtgttgatgctctgagaacaytgagggagttgaagcttcttcgacacattcagcatgagaatgtgattgctttgaaggatgtgatgatgcctacccatcagacaagtttcaaagatgtctatctagtatacgaactgatggatacggatctgcatcatattatcaagtccccgcagccacttgtgaatgaacactgcaaatatttcatctttcagttgcttcgagggttgaagtatctccactcggcaaatatccttcaccgtgacttgaagcctgggaacctccttgtgaatgcaaattgtgacctgaagatttgtgattttgggctggcaagaaccagcaaagacaatggccaattcatgactgagtatgttgtcacccgctggtaccgtgcaccagagcttctcctctgctgtgacaattatggaacctctattgatgtgtggtctgtaggatgcatatttgcagagattcttggccggraaccaatattccctggaactgagtgcctcaaccagcttaaactaattatcaatgttcttggcacccagmatgaagctgatcttcaattcattgataatccaaaggccagraagtatatcaaatcactcccatattttagaggggttcacttttctcatctttaccccagggctgaccctttagctattgatttgttgcggagaatgcttgtgttcgatccaaccaagagaattacagttacagaggcacttcaacatccatatctatcaaatctgtatgatccaagctgtaacccttctgcccaggtctcaatcaatcttgacatagatgaaagcttggaggtgcggatgattagggagatgatgtggagagaaatacttcattaccatcctgaagctgtttgttctcatgcctag

SEQ ID NO: 141883 - protein, 368 aa, Vitis vinifera
  misc_feature (231)..(231): The Xaa at location 231 stands for Glu, or Lys.
  misc_feature (254)..(254): The Xaa at location 254 stands for Asn, or His.
MATRVEPPNGFRSQGKHYYTMWQTLFEIDTKYVPIKPIGRGSYGVVCSSVNMETNEKVAIKKINNVFENRVDALRTLRELKLLRHIQHENVIALKDVMMPTHQTSFKDVYLVYELMDTDLHHIIKSPQPLVNEHCKYFIFQLLRGLKYLHSANILHRDLKPGNLLVNANCDLKICDFGLARTSKDNGQFMTEYVVTRWYRAPELLLCCDNYGTSIDVWSVGCIFAEILGRXPIFPGTECLNQLKLIINVLGTQXEADLQFIDNPKARKYIKSLPYFRGVHFSHLYPRADPLAIDLLRRMLVFDPTKRITVTEALQHPYLSNLYDPSCNPSAQVSINLDIDESLEVRMIREMMWREILHYHPEAVCSHA

SEQ ID NO: 141884 - DNA, 885 bp, Vitis vinifera
  CDS (1)..(885)
  misc_feature (809)..(809): y is t or c
atgtaccagtatgaaaaagttgagaagattggtgaaggaacctatggtgtggtttataaggctcgtgatcgtgtgactaatgagactatagccttgaagaagatccgcttggagcaggaagatgaaggagtaccaagcactgctatcagagagatttccctcttgaaagagatgcaacatggtaacattgtcaggctacaggatgtagtgcacagtgagaagcggttatatctagtttttgagtatctggacttggatctgaagaagcacatggattcatctccggattttgccaaagatttacgtctgataaagatgttcctgcatcagattctccgtggtattgcttattgtcattctcatagggttcttcatcgagatttgaagccccagaacttactcatagatcgtcgtaccaatgcattaaagctggcagactttggattggcaagagcatttggtattcctgttaggacatttacacatgaggtggtgaccctgtggtacagagcacccgaaatactgcttggatcacgccactattctactcctgttgatgtgtggtctgtgggctgtatatttgctgagatggtgaaccagcgaccattgtttcctggggactcggagattgatgaattgttcaagatcttcagggtattgggcacaccaaatgaggatacatggccaggagtgacttctttgcctgattttaagtctgcctttcctaagtggcctcctaaggatcttgcaactgttgtcccaaatctcgaatcagctggcattgatctcctttctaaaatgttgtgccyggatcccaacagaagaataactaccaggagtgctcttgagcatgagtacttaaaagatattaggtttatgccctga

SEQ ID NO: 141885 - protein, 294 aa, Vitis vinifera
  misc_feature (270)..(270): The Xaa at location 270 stands for Leu, or Pro.
MYQYEKVEKIGEGTYGVVYKARDRVTNETIALKKIRLEQEDEGVPSTAIREISLLKEMQHGNIVRLQDVVHSEKRLYLVFEYLDLDLKKHMDSSPDFAKDLRLIKMFLHQILRGIAYCHSHRVLHRDLKPQNLLIDRRTNALKLADFGLARAFGIPVRTFTHEVVTLWYRAPEILLGSRHYSTPVDVWSVGCIFAEMVNQRPLFPGDSEIDELFKIFRVLGTPNEDTWPGVTSLPDFKSAFPKWPPKDLATVVPNLESAGIDLLSKMLCXDPNRRITTRSALEHEYLKDIRFMP

SEQ ID NO: 141886 - DNA, 1182 bp, Nicotiana attenuata
  CDS (1)..(1182)
atggatggttcaggtcagcagacggacacgatgatgtctgatgcgggggcggagcagccacctccggcgccgcagccggtggccggtatggataatattccggcgacgttgagccacggtggcaggttcattcaatacaatatatttggtaatatatttgaagttactgctaagtataagcctcctattttgcctattggtaaaggtgcttacggcatcgtttgttctgctttgaactcggagacaattgagaatgtagcgataaagaaaatcgcgaatgcttttgataacaagattgatgccaagaggactttgagagagatcaagcttcttcggcatatggatcatgaaaacattgttgcgatcagagatataattccaccaccgcagagagaagcctttaatgatgtttatattgcgtatgagcttatggatactgatctccatcaaattattcgctctaatcagggtttatctgaggagcactgtcagtatttcttgtatcagatcctccgtgggttgaaatacatacattctgcgaatgttctgcacagggacttgaagcctagcaatctcctcttgaatgccaactgtgatttaaagatatgtgattttgggctagctcgtgtcacttctgaaactgactttatgacggaatatgttgtgacaagatggtatcgtccacctgagctgttgttaaattcgtctgactatactgctgcaattgatgtatggtcagtgggttgcattttcatggaattgatggacaggaaacccctatttcctggtagagatcacgtacaccagctgcgtcttattatggagttgattggtactccttcagaggctgaaatggagtttttaaatgagaatgcaaaacgatacatccgacaacttcctcttaaccgtcgacaatcattcactgaaaagtttccacatgtacacccagctgcaattgatcttgtcgagaaaatgctgacatttgatcccagaaggagaataacagttgaaggtgcacttgcacatccttacctgaactcgctccacgatattagtgacgagcccatttgcatgactccctttagcttcgactttgaacagcatgcccttacggaggaacagatgaaggagctgatttacagggagtcgcttgcatttaatcctgaataccagcacatgtga

SEQ ID NO: 141887 - protein, 393 aa, Nicotiana attenuata
MDGSGQQTDTMMSDAGAEQPPPAPQPVAGMDNIPATLSHGGRFIQYNIFGNIFEVTAKYKPPILPIGKGAYGIVCSALNSETIENVAIKKIANAFDNKIDAKRTLREIKLLRHMDHENIVAIRDIIPPPQREAFNDVYIAYELMDTDLHQIIRSNQGLSEEHCQYFLYQILRGLKYIHSANVLHRDLKPSNLLLNANCDLKICDFGLARVTSETDFMTEYVVTRWYRPPELLLNSSDYTAAIDVWSVGCIFMELMDRKPLFPGRDHVHQLRLIMELIGTPSEAEMEFLNENAKRYIRQLPLNRRQSFTEKFPHVHPAAIDLVEKMLTFDPRRRITVEGALAHPYLNSLHDISDEPICMTPFSFDFEQHALTEEQMKELIYRESLAFNPEYQHM

SEQ ID NO: 141888 - DNA, 1128 bp, Nicotiana attenuata
  CDS (1)..(1128)
atggctgatgcaaatatgggtgccggtggtggtcaattccctgattttccttcggttctaactcacggcggacaatatgtacagtatgatatttttggtaatttctttgagatcactaccaagtatcgccctcctattatgcctattggtcgtggtgcttatggaattgtctgctcggtgctgaatacggagctgaatgagatggttgcagttaagaaaatcgcgaatgcgtttgacaattacatggatgctaagaggactctccgtgagattaagcttcttcgccatttagatcatgaaaatgtaattggtttaagagacgtgattcctccaccgttacgaagggagttttctgatgtttacattgctactgaactcatggatactgatcttcaccaaataattagatccaaccaaggtttatcagaggatcactgccagtacttcatgtatcagctcctccgtggcctaaaatacatacattccgcgaatgttcttcatagagatctcaaaccaagcaaccttttgctaaatgcaaattgtgatcttaagatatgtgactttggtcttgctaggccaaacatagagaacgagaatatgacggaatatgttgtaaccagatggtacagggcaccagagcttttgttgaactcttcagattacactgctgctatagatgtttggtctgtcggttgcatcttcatggaacttatgaatagaaaacctttgtttgctggaaaagatcatgtacatcaaatacgcttgttaactgagcttctcggcaccccaacagaagctgatcttggcttcctccaaaatgaagacgcaaagagatacatcaggcaactcccacaacatcctcgccagcagttagcaaaagttttccctcatgtgaacccattggctattgatcttgtcgataaaatgttgacactcgatcctactagaagaattacagttgaggaagcattagatcatccctaccttgcaaagctccacgatgcaggtgatgaaccggtctgccctgttccattctccttcgactttgagcaacaaggaataggagaagagcaaattaaggacatgatatatcaggaagctttgtcactgaatcctgaatatgcttaa

SEQ ID NO: 141889 - protein, 375 aa, Nicotiana attenuata
MADANMGAGGGQFPDFPSVLTHGGQYVQYDIFGNFFEITTKYRPPIMPIGRGAYGIVCSVLNTELNEMVAVKKIANAFDNYMDAKRTLREIKLLRHLDHENVIGLRDVIPPPLRREFSDVYIATELMDTDLHQIIRSNQGLSEDHCQYFMYQLLRGLKYIHSANVLHRDLKPSNLLLNANCDLKICDFGLARPNIENENMTEYVVTRWYRAPELLLNSSDYTAAIDVWSVGCIFMELMNRKPLFAGKDHVHQIRLLTELLGTPTEADLGFLQNEDAKRYIRQLPQHPRQQLAKVFPHVNPLAIDLVDKMLTLDPTRRITVEEALDHPYLAKLHDAGDEPVCPVPFSFDFEQQGIGEEQIKDMIYQEALSLNPEYA

SEQ ID NO: 141890 - DNA, 1119 bp, Gossypium hirsutum
  CDS (1)..(1119)
atggcaactccagttaagcctcctaacggtattcattaccaaggaaaacattactattcgatgtggcaaacgacgttcgaaatcgacaccaaatatgtgccgatcaagcctattggaagaggggcgtatgggatcgtttgctcttctgtgaatcgcgaaaccaatgaaaaagttgccattaaaaagataaacaacgcctttgagaaccgtgttgatgctctcagaactttgcgtgaattgaagcttctcaggcatcttagacatgagaatgtgattgcttcgaaagatgtcatgatgccgactcataggagaagcttcaaggatgtttatctggtttacgaacttatggataccgatttgcatcaaatcattaagtcttctcaagtgcttaccaatgatcactgtcagtatttcctcttccagttgctccgaggcctgaaatatcttcactcagcaaatattcttcacagagatctgaagcctggaaaccttcttatcaatgcaaattgtgaccttaaaatttgtgactttggactggcacgcactagcaatgccaagggtcaattcatgacagagtatgttgtcactcgttggtacagggcccctgagcttctcctctgctgtgacaactatggaacgtctattgatgtttggtctgttggatgcatctttgcggagcttcttggccggaaacccatcttccctggtacagaatgtctcaatcaacttaagctgatcatcaacatccttggcagccagaaggaggaggatcttgaatttatagataaccctaaggcaaggaaatacatcaaatcacttccatattcccttggaagccccttttcccatctttatccgaatgcccatcctttggcaattgatttgttgcaaaagatgcttgtttttgacccttcaaaaaggattagtgtaactgaagcactccaacacccttacatggcaccattgtatgatccgaacagcaacccttcagcccaggtgccactcgatcttgacatagatgaggatttaggggaagagatgatcagagagaagatgtggaaggaaatgcttcattaccatcccgaagctgctacagccaatggcggggtgtgcctctaa

SEQ ID NO: 141891 - protein, 372 aa, Gossypium hirsutum
MATPVKPPNGIHYQGKHYYSMWQTTFEIDTKYVPIKPIGRGAYGIVCSSVNRETNEKVAIKKINNAFENRVDALRTLRELKLLRHLRHENVIASKDVMMPTHRRSFKDVYLVYELMDTDLHQIIKSSQVLTNDHCQYFLFQLLRGLKYLHSANILHRDLKPGNLLINANCDLKICDFGLARTSNAKGQFMTEYVVTRWYRAPELLLCCDNYGTSIDVWSVGCIFAELLGRKPIFPGTECLNQLKLIINILGSQKEEDLEFIDNPKARKYIKSLPYSLGSPFSHLYPNAHPLAIDLLQKMLVFDPSKRISVTEALQHPYMAPLYDPNSNPSAQVPLDLDIDEDLGEEMIREKMWKEMLHYHPEAATANGGVCL

SEQ ID NO: 141892 - DNA, 1188 bp, Sarcophaga crassipalpis
  CDS (1)..(1188)
atggcggaggcggcggctagtgtaccaactgcagcaggcagttctaaccagcaacagcagcaacaacaacagcccagtaacaatggtgctactgcagcaatagtgcattcggataatcctaatgctgaagttattcgtggacaaatttttgaagttggtcctcgatatcgtcatttgtcctatattggtgaaggtgcctatggtatggtggtatctgcctgcgatacactaacaaacacaaaggtggctattaaaaaaatatcaccatttgagcatcaaacttattgccaacgtactttgcgtgaaataaaaattctaactcgttttaaacatgaaaatatcattgatatacgtgatattttgcgtgtagacagtatagagcaaatgcgggatgtatatattgtacagtgtttaatggagactgatctatataaattacttaaaacacagaggctaagcaatgatcatatctgctattttctgtaccaaatattacgtggtttaaaatatatacactcggccaatgtattgcatagagatttgaagccaagcaatttactgttaaatacaacgtgcgacttaaaaatttgtgattttggattagctcgtgttgcagatcctgaacatgatcacactggctttttgaccgagtatgttgctacacgctggtatcgtgctccagagattatgcttaactcaaagggttataccaaatcaatagatatttggtcagtaggatgcattttagcagaaatgcttagcaatagacctatttttccaggcaaacattatttagatcaattaaatcatatattaggagtattaggctcaccctctaaagaggatctagaatgtattataaatgaaaaggcccgcaactatttggaatcattaccatttaaaccgaaagtgccatggtcgcggttatttcctaatgctgatcctttggcactagatttattgggtaaaatgttaacatttaatccccacaatagaatacctgttgaagaagcgttagcgcatccttatttggaacagtattacgatccaggagatgagcctgttgctgaagtacctttccgaattggcatggaactcgacgatcttccaagagaaacattaaaaactttaatattcgaagagactctcaaatttaaagaacggcaacccgatcagcaagcagtataa

SEQ ID NO: 141893 - protein, 395 aa, Sarcophaga crassipalpis
MAEAAASVPTAAGSSNQQQQQQQQPSNNGATAAIVHSDNPNAEVIRGQIFEVGPRYRHLSYIGEGAYGMVVSACDTLTNTKVAIKKISPFEHQTYCQRTLREIKILTRFKHENIIDIRDILRVDSIEQMRDVYIVQCLMETDLYKLLKTQRLSNDHICYFLYQILRGLKYIHSANVLHRDLKPSNLLLNTTCDLKICDFGLARVADPEHDHTGFLTEYVATRWYRAPEIMLNSKGYTKSIDIWSVGCILAEMLSNRPIFPGKHYLDQLNHILGVLGSPSKEDLECIINEKARNYLESLPFKPKVPWSRLFPNADPLALDLLGKMLTFNPHNRIPVEEALAHPYLEQYYDPGDEPVAEVPFRIGMELDDLPRETLKTLIFEETLKFKERQPDQQAV

SEQ ID NO: 141894 - DNA, 1086 bp, Sarcophaga crassipalpis
  CDS (1)..(1086)
atgataaaattttataaagtgacaataaatcgcacagaatgggaaataccagaaatctatcagcaattacagcccgtggggtctggtgcttatggacaggtgtgcaaggctttggtaaaaggtacaaatatgtatgttgccataaaaaaattggcacgccctttccaatcggctgtgcacgctaaacgtacttatcgagaactgagactactgaagcatatggatcatgaaaatgttattgggctgttagatgtgttccatccccatccgcctaatgtaactttggaaaatttccaacaggtgtacttggttactcatctaatggatgctgatttaaataatattataaggactcagcgattgtcagacgatcacgtacaatttttaatttatcaaatattacgtggactgaaatatatacacagcgctggaattatacatcgcgatctaaaaccatccaatatagcggtgaacgaagattgtgaattaagaattttggatttcggtttggcacgtcctacagaaaatgaaatgactggttatgtagctacacgttggtatcgagcaccagaaattatgctcaactggatgcactacaatcaaactgtggatatttggtctgtgggctgtattatggctgaattacttacagggcgtactttgttccctggttccgatcatattcaccaattaaatttgataatggaaatattgggaacacctcccgatgattttatgcaaaaaatttcatctgagagtgcacgcaactacattaagtctttgccacccatgaaacgtcgtgatttcaaacagttcttcaaaggtgccaatcctttagccatcgacttattagagaaaatgctagaactagatgctgaaaaacgcataactgctgaacaagccttggcacattcttatatggagaagtactcggaaccaagtgatgaacaaacttcgccactatacgatcaaagttttgaagacatggatttaccagtggaaaagtggaaggaattgattttcaaagaagtaatcaattttaaaccacctccttcctttacaaaaatattacaggatataaaataa

SEQ ID NO: 141895 - protein, 361 aa, Sarcophaga crassipalpis
MIKFYKVTINRTEWEIPEIYQQLQPVGSGAYGQVCKALVKGTNMYVAIKKLARPFQSAVHAKRTYRELRLLKHMDHENVIGLLDVFHPHPPNVTLENFQQVYLVTHLMDADLNNIIRTQRLSDDHVQFLIYQILRGLKYIHSAGIIHRDLKPSNIAVNEDCELRILDFGLARPTENEMTGYVATRWYRAPEIMLNWMHYNQTVDIWSVGCIMAELLTGRTLFPGSDHIHQLNLIMEILGTPPDDFMQKISSESARNYIKSLPPMKRRDFKQFFKGANPLAIDLLEKMLELDAEKRITAEQALAHSYMEKYSEPSDEQTSPLYDQSFEDMDLPVEKWKELIFKEVINFKPPPSFTKILQDIK

SEQ ID NO: 141896 - DNA, 1182 bp, Nicotiana tabacum
  CDS (1)..(1182)
atggatggttctggtcagcagacggacacgatgatgtctgatgcgggggcggagcagccacctacggcgccgcagccggtggccggtatggataatattccggcgacgttgagccacggtggcaggttcattcaatacaatatatttggtaatatatttgaagttactgctaaatataagcctcctattttgcctattggtaaaggtgcttacggcatcgtttgttctgctttgaactcggagacaattgagaacgtagcgataaagaaaatcgcaaatgcttttgataacaagattgatgccaagaggactttgagagagatcaagcttcttcggcatatggatcatgaaaacattgttgcgatcagagatataattccaccaccacagagagaggcctttaatgatgtttatattgcgtatgagcttatggatactgatctccatcaaattattcgctctaatcagggtttatctgaggagcactgtcagtatttcttgtatcagatcctccgagggttgaaatacatacattctgcgaatgttctgcacagggacttgaagcctagcaatctcctgttgaatgccaactgtgatttaaagatatgtgattttgggctagctcgtgtcacttctgaaactgactttatgacggaatatgttgtgacaagatggtatcgtccacctgagctgttgttaaattcgtctgactatactgcagcaattgacgtatggtcagtgggttgcattttcatggaattgatggacaggaaacccctatttcctggtagagatcacgtacaccagctgcgtcttattatggagttgattggtactccttcagaggctgaaatggagtttttaaatgagaatgcaaaacgatacatccgccaacttcctctttaccgtcgacaatcattcactgaaaagtttccacatgtacacccaactgcaattgatcttgtcgagaaaatgctgacatttgatcctagaaggagaataacagttgaaggtgcacttgcacatccttacctgaactcgctccacgatattagtgacgagcccatttgcatgactccctttagcttcgactttgaacagcatgcccttacggaggaacagatgaaggagctgatttacagggagtcgcttgcatttaatcctgaataccagcatatgtga

SEQ ID NO: 141897 - protein, 393 aa, Nicotiana tabacum
MDGSGQQTDTMMSDAGAEQPPTAPQPVAGMDNIPATLSHGGRFIQYNIFGNIFEVTAKYKPPILPIGKGAYGIVCSALNSETIENVAIKKIANAFDNKIDAKRTLREIKLLRHMDHENIVAIRDIIPPPQREAFNDVYIAYELMDTDLHQIIRSNQGLSEEHCQYFLYQILRGLKYIHSANVLHRDLKPSNLLLNANCDLKICDFGLARVTSETDFMTEYVVTRWYRPPELLLNSSDYTAAIDVWSVGCIFMELMDRKPLFPGRDHVHQLRLIMELIGTPSEAEMEFLNENAKRYIRQLPLYRRQSFTEKFPHVHPTAIDLVEKMLTFDPRRRITVEGALAHPYLNSLHDISDEPICMTPFSFDFEQHALTEEQMKELIYRESLAFNPEYQHM

SEQ ID NO: 141898 - DNA, 1116 bp, Petroselinum crispum
  CDS (1)..(1116)
atggctaaccccggcgatggtcaatacaccgattttccggcgattcaaacacacggaggacagttcattcagtacaatatatttggaaatttattccaagttacgaagaagtatcggcctccgatcatgcctattggccgtggtgcttacggtatcgtctgttcaattatgaatacggagacgaatgagatggttgcggtcaagaagattgctaatgcttttgataattacatggatgccaagcgaactttgagggagattaagcttcttcgtcatttggatcatgagaatgtcatagcaattactgatgtaattcctccacctttaaggagggaattcactgatgtttacattgctactgaactaatggacactgatcttcaccaaatcattcgatctaatcaaggtctatcagaggaacactgtcagtatttcttgtatcaactgcttcgaggactaaaatatattcattctgcaaacatcatccatcgagacttaaagcccagcaatttgttgttgaatgcaaactgtgatctgaaaatttgtgattttggtcttgctcgtcataatacggacgatgagttcatgacagaatatgttgtcactcgatggtatagagcacctgagctgctgttgaactcttccgattatactgttgcaatagatgtttggtcagtgggttgcatatacatggagctaatgaacaggaaacctttgtttgcgggtaaagatcatgtgcaccagatgcggttgttgaccgagcttcttggctcaccgaccgaagcagatcttggatttgttcgaaatgaggatgcaaaaagatttattctgcagcttcctcgacaccctcgtcagcctctaaggcagctgtatccacaagtccatcctttggccattgaccttattgataaaatgcttacgtttgatccctctaaaagaattacagttgaagaagcattagcccatccgtacttggcaagattacatgatatagctgatgaaccaatttgcacaaaaccgttctcgtttgaatttgagactgcacatcttggagaagagcagataaaggacatgatttaccaggaggcattagcctttaacccagactgtgcataa

SEQ ID NO: 141899 - protein, 371 aa, Petroselinum crispum
MANPGDGQYTDFPAIQTHGGQFIQYNIFGNLFQVTKKYRPPIMPIGRGAYGIVCSIMNTETNEMVAVKKIANAFDNYMDAKRTLREIKLLRHLDHENVIAITDVIPPPLRREFTDVYIATELMDTDLHQIIRSNQGLSEEHCQYFLYQLLRGLKYIHSANIIHRDLKPSNLLLNANCDLKICDFGLARHNTDDEFMTEYVVTRWYRAPELLLNSSDYTVAIDVWSVGCIYMELMNRKPLFAGKDHVHQMRLLTELLGSPTEADLGFVRNEDAKRFILQLPRHPRQPLRQLYPQVHPLAIDLIDKMLTFDPSKRITVEEALAHPYLARLHDIADEPICTKPFSFEFETAHLGEEQIKDMIYQEALAFNPDCA

SEQ ID NO: 141900 - DNA, 885 bp, Allium cepa
  CDS (1)..(885)
atggatcagtatgagaaagtggagaagattggagaaggaacttatggagttgtttacaaagcacgtgatcggctgactaatgaaacgattgctttgaagaagattaggttggagcaggaagatgagggagttcctagtactgccattagagaaatatcactgttgaaggaaatgcagcatgctaacattgtcaggctgcaagacgtagttcatagtgagaagcgaatatatcttgtgttcgagtatctagatctggaccttaagaagcatatggattcatgcccagattttgctaaagattctcgtttggctaaaacatttctctatcagcttctccgaggaattgcttattgtcactcacaccgagttcttcatcgtgacttaaagcctcaaaatttattgatcgacagacgtaccaattcattaaagcttgctgactttggacttgcaagggcatttggtatcccagtccgaaccttcacacacgaggttgtgacactgtggtatagggcacctgaaatcctcttaggtgctcgtcagtattctactcctgtagacatatggtctgtgggatgtatctttgctgaaatggtgaaccaacgacctctattccctggggactctgagatcgacgagctgttcaaaatatttagaattatgggtaccccaaacgaagacacatggccaggtgttacttccttgcccgacttcaagtctgcttttccaaagtggccggcaaaggacttggcaactatagttccaaagcttgattcagctggaattgatcttctttataaaatgctgcaccttgaaccgagcaaaagaatcactgctcggaaggctcttgagcatgaatacttcagggatcttgggacaattccatga

SEQ ID NO: 141901 - protein, 294 aa, Allium cepa; identical to SEQ ID NO: 62864

SEQ ID NO: 141902 - DNA, 1116 bp, Medicago sativa
  CDS (1)..(1116)
atggccagagttaaccaaaacggcgtcgctgagtttccggcggttcaaactcacggcggacagttcgttcagtacaacgtgttcggtaatcttttcgaggttacggcgaagtatcgtcctccgatcatgccgattggtcgtggtgcttacggaatcgtttgttcgttgttgaatacggagacgaatgagttggttgctgtgaagaagatagcgaatgcttttgataatcatatggatgcgaagcgtacgctacgtgagattaagcttcttaggcatttagatcatgaaaatgtaattggtttaagagatgttattcctccacccttgcgtagagagtttaatgatgtctacataaccaccgaactcatggatactgatcttcaccagattattcgctccaatcaaaatctctctgatgaacactgccagtactttttgtatcagattcttcgtgggctaaggtatatacattccgcaaacataatccatagagatttgaaaccaagcaacctgttgttgaatgcaaattgcgacttgaagattattgattttggtcttgcgcggccaactatggaaagtgacttcatgacagaatatgttgtcacaagatggtatagggctcctgaattattgttgaactcctcagattacacctctgcaatagatgtctggtctgttggttgcatttttatggagcttatgaataaaaagcccctgtttcctggcaaagatcatgtgcatcaaatgcgcttattgacagagcttcttggcactccaactgacgctgatgtggggttagtaaaaaatgacgatgcgagaagatatatccgacaacttcctcagtatcctcgtcaacctttgaacagggttttcccccatgttcatcccttagccattgatcttgttgataaaatgttgacaattgatcctaccagaagaattacagttgaagaagcactggcccatccataccttgaaaaactgcatgatgtagccgatgaacctatctgcatggagccattctcatttgagtttgagcaacagcatttggatgaagaacaaataaaggagatgatatacagggaggcattagcactcaatcctgagtatgcttaa

SEQ ID NO: 141903 - protein, 371 aa, Medicago sativa
MARVNQNGVAEFPAVQTHGGQFVQYNVFGNLFEVTAKYRPPIMPIGRGAYGIVCSLLNTETNELVAVKKIANAFDNHMDAKRTLREIKLLRHLDHENVIGLRDVIPPPLRREFNDVYITTELMDTDLHQIIRSNQNLSDEHCQYFLYQILRGLRYIHSANIIHRDLKPSNLLLNANCDLKIIDFGLARPTMESDFMTEYVVTRWYRAPELLLNSSDYTSAIDVWSVGCIFMELMNKKPLFPGKDHVHQMRLLTELLGTPTDADVGLVKNDDARRYIRQLPQYPRQPLNRVFPHVHPLAIDLVDKMLTIDPTRRITVEEALAHPYLEKLHDVADEPICMEPFSFEFEQQHLDEEQIKEMIYREALALNPEYA

SEQ ID NO: 141904 - DNA, 885 bp, Solanum lycopersicum
  CDS (1)..(885)
atggaccagtatgaaaaagttgagaagattggggaaggaacatatggtgtagtgtacaaggctcgtgatcgtgtaactaatgaaactattgcactgaagaaaataaggttggagcaggaagacgagggggtaccaagcacagctattagagaaatatctctcttgaaagagatgcaacatgctaatattgtgaggttgcaggatgtggtgcacagtgaaaagcgattgtatctagtgtttgaatatcttgacttggacttgaagaagcacatggattcgtgtcctgaattctctaaggatccacgtctggttaaaatgttcttgtatcaaatactccgtggtattgcttattgtcattctcatagagttcttcatagagatttgaagcctcagaacttactaatagatcgacgtacaaatgctttaaagctggcagactttggtttggctagagcatttggtattcctgtcagaactttcactcatgaggtggtgacattgtggtacagggcaccagaaatactgcttggatcacgccattactctactcctgttgatgtgtggtcagttggttgcatatttgctgagatggtgaatcagccgcctctgtttcctggtgactctgagattgatgaacttttcaagattttcagagtattgggtactccaaatgaggatacatggcctggagtgacttctctgcctgattacaaatctgccttcccaaaatggcctcctaaggacctggcaattattgtaccaaatgttgatggagcaggccttgatcttcttggtaaaatgctctccttggatcccagtaagagaatcaccgcgaggaatgcccttgagcatgagtacttcaaggatattgggtatgtgccgtga

SEQ ID NO: 141905 - protein, 294 aa, Solanum lycopersicum; identical to SEQ ID NO: 62870

SEQ ID NO: 141906 - DNA, 885 bp, Solanum lycopersicum
  CDS (1)..(885)
atggaccagtatgaaaaagttgaaaagattggtgaaggaacgtacggcgtagtgtacaaagctcgtgatcgtgtaactaatgaaactattgcactgaagaaaattcggctggagcaggaagacgagggtgtgccaagcacggctattagagaaatctccctcttgaaagagatgcagcatggaaacattgtgaggttgcaagatgtggttcacagtgagaagcgattatatctagtgtttgaatatctcgacttggatttgaagaagcatatggactcatgtcctgagttctctaaggatccgcgtctggtaaaaatgtttttgtatcaaattctccgtggaattgcttattgtcattctcatagagttcttcaccgagacttgaagcctcagaacttgctgatagatagacgtacaaacgttctaaagcttgcagactttggattggctagagcattcggcattcctgtcagaactttcacccacgaggtggtgacgttatggtacagggcaccagaaatactgctaggatcacgccactactctactcctgttgatgtttggtcagtaggctgcatatttgctgagatggtgaaccagcggcctctgtttcctggtgactccgagattgacgaacttttcaagattttcagagttgtcggtactccaaatgaggatacatggcctggagtgacttctttgcctgattttaaatctgcttttccaaagtggccatctaaggacttaggaactgtagtacctaatcttggtgcagcaggccttgatctcattggtaaaatgcttaccttagaccccagcaagagaatcactgcccgaagcgcccttgagcatgagtacttcaaggacattgggttcgtaccatga

SEQ ID NO: 141907 - protein, 294 aa, Solanum lycopersicum; identical to SEQ ID NO: 62872

SEQ ID NO: 141908 - DNA, 1092 bp, Pisaster ochraceus; identical to SEQ ID NO: 140170
  CDS (1)..(1092)

SEQ ID NO: 141909 - protein, 363 aa, Pisaster ochraceus; identical to SEQ ID NO: 140171

SEQ ID NO: 141910 - DNA, 1110 bp, Triticum aestivum
  CDS (1)..(1110)
atggacggcgctccggtggccgagttccggccgacgatgacgcacggcggccgcttcctcctctacaacatattcggcaaccagttcgagatcacggccaagtaccagccgccgatcatgcccatcggccgcggcgcctacgggatcgtctgctcggtgatgaacttcgagacgagggagatggtggcaagtaagaagatcgccaacgccttcgacaacaacatggacgccaagcgcacgctccgggagatcaagctcctcaggcacctcgaccacgagaacatagtaggcctccgagatgtgatcccgccggcgatcccgcagtccttcaacgacgtctacatcgccactgagctcatggacacggacctccaccacatcatccgctccaaccaagaactctcggaagaacactgccagtacttcctgtaccagctgctgcgcggcctcaagtacatccactcggcgaacgtgatccaccgcgacctcaagccgagcaacctgctgctgaacgccaactgtgacctcaagatctgcgacttcggcctggcgcggccgtcatcggagagcgacatgatgacggagtacgtggtcacgcggtggtaccgggccccggagctgctgctcaactccaccgactactccgcggccatcgacgtctggtccgtcggctgcatcttcatggagctcatcaaccgcgcgccgctcttcccggggagggaccacatgcaccagatgcggctcatcacggaggtgatcggcacccccaccgacgacgacctgggattcatccggaacgaggacgccaggaggtacatgaggcacctgccgcagttccctcgccggtccttcccgggccagttccccaaggtgcagcccgccgcgctggacctcatcgagaggatgctcacctttaacccgctgcagaggatcacagttgaagaggcgctggagcacccttacctagagcggcttcacgacgtcgccgacgagcccatctgcacggaccccttctcctttgacttcgagcagcaccctctgacggaagaccagatgaagcaactcatattcaacgaagccctggagttgaaccccaacttccgatactag

SEQ ID NO: 141911 - protein, 369 aa, Triticum aestivum; identical to SEQ ID NO: 140173

SEQ ID NO: 141912 - DNA, 885 bp, Pisum sativum
  CDS (1)..(885)
atggaacagtatgagaaggttgagaaaataggagaaggtacatacggtgtggtgtacaaggctagggaccgtgttaccaatgagaccattgctttgaagaagattcgactcgaacaggaagatgagggggttcctagcactgccataagagagatttctcttttgaaagaaatgcagcatcggaacattgttaggttgcaggatgttgtgcatagtgagaagcgattgtatcttgtttttgagtaccttgacttagatctaaagaagcatatggattcatctccggaattttccaaagatcaacgtcaagtaaaaatgttcctctatcaaattctctgtggcattgcttactgtcattctcatagagttcttcaccgagacctgaaaccacaaaatctgttgatagatcgcagctctaatgcgctaaagcttgcagattttgggttggctagagcatttggaattcctgttaggacatttacacatgaggtggtgacactatggtacagagctccagaaatattgcttgggtcccgtcattattctaccccagttgatgtttggtcagtgggatgcatatttgcagagatgataaaccagcgaccacttttccctggggattctgagattgatgaattgtttaaaatattcagaatcacgggtacaccaaatgaagatacatggcctggagtgacttcattgcctgattttaaatccgcctttcccaagtggccatctaaggacctggcaactctggtcccaagtcttgagccatctggtcttgatctgttatctagtatgcttcgcttggatcccagcagaagaattactgccaggggcgctcttgagcacgaatacttcaaagacattaaatttgtcccctga

SEQ ID NO: 141913 - protein, 294 aa, Pisum sativum; identical to SEQ ID NO: 62874

SEQ ID NO: 141914 - DNA, 885 bp, Brassica napus
  CDS (1)..(885)
atggatcagtacgagaaagttgagaagatcggcgaaggaacttacggtgttgtgtacaaggcacgagacaaggtcaccaatgagactattgctttgaagaagatccgcctcgagcaggaggatgaaggtgttcctagcactgccattagagaaatctctcttttgaaggaaatgcagcacagcaacattgtcaagctgcaggatgtagtgcacagcgagaagcgtttgtatcttgttttcgagtatcttgacttggatctcaaaaagcacatggactcttctcctgatttctccaaggatcttcatatgatcaaaaggtatgtttaccagattctccgtggaatcgcgtattgccactctcacagggttctccatcgtgacctcaagccacagaatttgttgattgatcgccgcaccaactcactaaagcttgctgattttggactggccagagctttcggtatccctgtcaggacttttactcatgaggtggttactctctggtaccgagcaccagagatacttctagggtctcatcactactctacaccggttgatatttggtctgtgggatgcatatttgccgagatgatcagccaaaagcccttgtttcctggagactccgagattgatcaactcttcaagatattcagaatcatgggaactccaacggaggatacatggcctggggtaacttcgctgccggattataaatctgctttcccaaaatggaaaccaacggacttggaatcttttgtcccaaacctggatcctaatggcatagatctcctttctaaaatgctgttgatggatccaaccaaaagaatcaacgcaagagccgccctggagcatgattacttcaaggatattggcgtcatgccgtag

SEQ ID NO: 141915 - protein, 294 aa, Brassica napus; identical to SEQ ID NO: 62876

SEQ ID NO: 141916 - DNA, 1530 bp, Medicago sativa
  CDS (1)..(1530)
atgacaatggcgggtccagggcaattgaacgtgatcgaatcaccttcgcgtggatctcgtagcgtcgattgctttgagaaactcgaacaaatcggcgaaggcacttatggtatggtttatatggctcgagagatcgaaactggtgaaattgttgctctcaagaaaatacgtatggataacgagagagaagggtttcctattactgctatacgtgaaatcaaaattctaaagaaactacatcatgaaaatgtaatcaagttaaaggaaatcgtgacatcgccaggccccgaaaaagatgatcaaggaaggccagatggcaacaaatacaaagggggcatatatatggtcttcgaatatatggatcatgatttaacaggtcttgcagaccggcctggcatgagatttactgtcccccagattaagtgttacatgaggcagcttttgacgggacttcactattgtcatgtcaatcaagtgcttcatcgtgatatcaaaggctcaaatcttctcatagacaacgaaggtaatctgaagctggcagattttggattggcaaggtcattttcaaacgagcataatgcaaaccttacaaatcgagtcatcactttatggtacagaccccctgagttactattggggacaacaaggtacgggccagctgttgatatgtggtctgttgggtgcattttcgctgagcttctgcacgggaagcccatctttcctggaaaagatgagccagagcagttgaacaagatttttgagttgtgtggagcaccggatgaggtgaactggcctggagttaccaagaccccttggtacaatcaatttaagccatcaagaccgatgaaaaggcgtctgagggaagtttttagacattttgatcgccatgcattggaattgttggagaagatgctcacacttgatccagctcagagaattcctgccaaagacgcacttgatgctgagtacttctggactgatccattaccatgtgatcccaagagtttacccaagtacgagtcatcacatgagtttcagaccaagaaaaagcgtcagcagcaacggcaaaatgaagaaaatgccaagcgtcttaaaatgcagaatccacagcagcatacccgtcttcctccgattcaacagggtggacatgcccaaatgcggcaaggtcctaaccaccttattcatggctctcaaccagcaggtgctgcaggacctagccatcattatgggaagcctcgaggtccctctggtggtccaggaaggtatcctccgggtgggaaccccagtgggggatacaatcatccaaatcgtggaggtcaaggagggggtgcgggttatggcagtggaccatatcctcctcaagggaggggggcaccttatgggtctagtggtatgcctgcaggaactggtggtggtcctcgtggtggaggtggctttggagctccaaattatcctcaaggtggtcctccatatggtggatcggctgctggtcgtgggaatcgcaaccaacagtatggctggcagcagtag

SEQ ID NO: 141917 - protein, 509 aa, Medicago sativa
MTMAGPGQLNVIESPSRGSRSVDCFEKLEQIGEGTYGMVYMAREIETGEIVALKKIRMDNEREGFPITAIREIKILKKLHHENVIKLKEIVTSPGPEKDDQGRPDGNKYKGGIYMVFEYMDHDLTGLADRPGMRFTVPQIKCYMRQLLTGLHYCHVNQVLHRDIKGSNLLIDNEGNLKLADFGLARSFSNEHNANLTNRVITLWYRPPELLLGTTRYGPAVDMWSVGCIFAELLHGKPIFPGKDEPEQLNKIFELCGAPDEVNWPGVTKTPWYNQFKPSRPMKRRLREVFRHFDRHALELLEKMLTLDPAQRIPAKDALDAEYFWTDPLPCDPKSLPKYESSHEFQTKKKRQQQRQNEENAKRLKMQNPQQHTRLPPIQQGGHAQMRQGPNHLIHGSQPAGAAGPSHHYGKPRGPSGGPGRYPPGGNPSGGYNHPNRGGQGGGAGYGSGPYPPQGRGAPYGSSGMPAGTGGGPRGGGGFGAPNYPQGGPPYGGSAAGRGNRNQQYGWQQ

SEQ ID NO: 141918 - DNA, 1380 bp, Ostreococcus tauri
  CDS (1)..(1380)
atgagcacgacggaggacgaagacagcgcgtgcgggtcggagagctcgagcgcggcgacggggacgacggatggaagcgagagcgatgattgggacgggtcggacgcggacggcggacgaagacggagtcgacgacgggagcacgcgggtggggatgatgacgtggtgcgggcggcgagaacgaagcggaggaaggcgcggaaggagcgggagcggcggagggagtccggaggtgaagcaaagaaggcggtgacgagtaaattcgcggtgtgcgggacggtgttcgaggtggacgcgaagtacgcgccgataaagcccgtgggtaaaggcgcgtacggggtcgtgtgcagcgctcgggaggtggagacaaatcggaaggttgcgattaagaagattgtgaatgtattcgagaatgtagtggacgcaaagaggacgctgcgggagattaagttgttgaggcacctgcggcacgaaaacgtcatagacatcatcgattgcgtgcgaccggaagcgatggacgcgttcgaggacgtgtatctcatgtatgatctcatggacaccgatctgtaccaaatcatccgcagcagccaatctctgacggatgagcactgccaatattttttgtatcaaattttacgcggactgaagtacattcacagcgccgacgtcttgcacagagacttgaagcctggaaatttattgctcaacgcgaactgcgatctgaagatttgtgatttcggcctcgctcgcaccgcactcgtggatgcggaggcgtctgagtttatgactgagtacgtcgtcacgagatggtatcgagcgccagagctcttgctctcgtgcgccgagtacacgagcgctatcgacgtctggagcgtgggttgtatctttgccgagctactcggtcgtaagactctgttcccggggaaggattacgtgcaccagctgaatcttatcatgcgcgtcatcggaacgccgcgagacgattcagagctcgatttcatcaacaacgaaaaggcgcggcgttacatcaaatcgcttccggtcacggcaagatgtaactttcggaagctcttcccgaacgcgtcgccaaaagcggtggatctcgtggacaagatgctcgtactcgatcccgctcgtcggatcaccgtggaggacgctttggcgcatccgtacctggagtcgttacacgacgaagtcgacgagccgtgcgccgagacgccgttcacgttcaatttcgaggaagacggtcgatacctcaccggtacggacattcgtgagctgatttataccgagctttgctccctctcagatgaatttgaggtgaagatgcagcaactgtctcttcgcagtgatactgattcatcgacgtttgccgtgtag

SEQ ID NO: 141919 - protein, 459 aa, Ostreococcus tauri
MSTTEDEDSACGSESSSAATGTTDGSESDDWDGSDADGGRRRSRRREHAGGDDDVVRAARTKRRKARKERERRRESGGEAKKAVTSKFAVCGTVFEVDAKYAPIKPVGKGAYGVVCSAREVETNRKVAIKKIVNVFENVVDAKRTLREIKLLRHLRHENVIDIIDCVRPEAMDAFEDVYLMYDLMDTDLYQIIRSSQSLTDEHCQYFLYQILRGLKYIHSADVLHRDLKPGNLLLNANCDLKICDFGLARTALVDAEASEFMTEYVVTRWYRAPELLLSCAEYTSAIDVWSVGCIFAELLGRKTLFPGKDYVHQLNLIMRVIGTPRDDSELDFINNEKARRYIKSLPVTARCNFRKLFPNASPKAVDLVDKMLVLDPARRITVEDALAHPYLESLHDEVDEPCAETPFTFNFEEDGRYLTGTDIRELIYTELCSLSDEFEVKMQQLSLRSDTDSSTFAV

SEQ ID NO: 141920 - DNA, 1524 bp, Ostreococcus tauri
  CDS (1)..(1524)
atgaccgcccgcgagcgcgagagcgcggcgagcacggcgtcgagagatgagttcttcgccaccgcgtcgtggaccgcgaacgagagccagcggtacgagctcctggaggtgatcggcaaggggtcgtacggcgtcgtgtgcgcggcgatcgatcgagagagtggacaaaaggttgcgataaaaaaggttcgaaacgcgttcgatcacgcgagcgatgcgacgcggatcctgcgagaggtgacgctgctgcgacacctgaaacatccggacattgtggaggtgttgaacatcatgttgccgccgaatccgagggaatttaacgaggtgttcatcgtgttcgagctcatggggacggatttgcatcaggtgatcaaggcgaacgatgacttgacggatgagcatcatcagtttttcctgtatcagttgctcagggggttgaagtacatgcacagcgcgaatgtgtttcatcgagacttgaagccaaaaaatatcttggcgaacagcgactgtaagctcaagatttgtgatttcgggctcgcgcgggcgatgacggcgaagacgggaccgcagatgattttctggaccgactacgtggcgaccagatggtatcgcgcgcccgaactctgcgggagcttcttcaccaagtacacgccagccatcgatatttggggcgtcgggtgcatattcgcggagcttctacgaggtcgacctctgtttccggggaagaacgtcgtgaagcagttggagctcatcacagatttgctcgggacgccgacgccgctgcaaatcgcgaaagtgcgcaacgaaaaggcgagacgtttcctgcagcaaatgcgtattaaaccggcgacgccgctgtcggaaaaatttcccggtgtcgacagcaaggcgcttaatttactcgaaaaacttttggcgttcgacccggacgatcgcccgaccgcggcgcaggcgctggcagatccgtatttcgaagggttggcggatgtctcgagagaaccgtcgcgccatccgctcccaaagtcagtcttcgcctgggaccaacgaaagttgagtcgcgaagaggttcgagagcttttgtacgaagagatcctccactatcatcctcaggcgaagcgcgagtacgatgggagcgaaaagaagagtgggttcgactatcccagcggtatcgcagacatgtctcgcaagtttgattcgctcgagcagggtggtccagaggcgaagttccaaacgtctaaatcgctgccaaagcacgcggttggcgagtatcgagacaaagcggcgcaattcgccggaggcatcgacgcgttgtcacgttcagatagcgtcaaacccggcggctcgcctggactcgctcgcatggactcggacgacgtcgagtacgaagaacctcaaacagacgatgtcgacagattcgatctcgctgaggtcgttcaggcgatgtctctcgatgccgaagacgcgagggcgctcaagatggaggccgaggcgctcttggaagaaggcggcgaaatcgcgggttga

SEQ ID NO: 141921 - protein, 507 aa, Ostreococcus tauri
MTARERESAASTASRDEFFATASWTANESQRYELLEVIGKGSYGVVCAAIDRESGQKVAIKKVRNAFDHASDATRILREVTLLRHLKHPDIVEVLNIMLPPNPREFNEVFIVFELMGTDLHQVIKANDDLTDEHHQFFLYQLLRGLKYMHSANVFHRDLKPKNILANSDCKLKICDFGLARAMTAKTGPQMIFWTDYVATRWYRAPELCGSFFTKYTPAIDIWGVGCIFAELLRGRPLFPGKNVVKQLELITDLLGTPTPLQIAKVRNEKARRFLQQMRIKPATPLSEKFPGVDSKALNLLEKLLAFDPDDRPTAAQALADPYFEGLADVSREPSRHPLPKSVFAWDQRKLSREEVRELLYEEILHYHPQAKREYDGSEKKSGFDYPSGIADMSRKFDSLEQGGPEAKFQTSKSLPKHAVGEYRDKAAQFAGGIDALSRSDSVKPGGSPGLARMDSDDVEYEEPQTDDVDRFDLAEVVQAMSLDAEDARALKMEAEALLEEGGEIAG

SEQ ID NO: 141922 - DNA, 1137 bp, Ostreococcus tauri
  CDS (1)..(1137)
atgacgacgacgacgggcgcggacgcggggtcgatcgcggcgctcacgacgagagatgtggtgtacgagacggtgaaaattgatggcgatccgaatgaggtcggacacgtcgtgcacacgggcgcgccgggggcgagcggggagatcagctacgagacggtgcgcgtggtgggacacgggtcgttcggcgtggtgtatcaggctcggtgcagggagaacggccaggaggtggcgattaaaaaggtgcttcaggataagaggtttaagaatcgtgagctgcagatcatgaaggcggtggagcatccgaacgtggtgaagctgatacacagttactatcacacgactgcggaggaagaggtgtacctgaacttggttttagagtttgtcccggacacggtgtacaggatcggtaagcactactccaagaacaaccagcgagtgccggggttactggtgaagttgtacacctatcagatggcgcgagcgctagcgagcgtgcacaagttgggaatttgtcaccgggacatcaaaccgcaaaacttgctcgtcgacagcaagactcacgttttgaaaatctgcgatttcggtagcgcgaagatcctcgcaccgacagaaccaaacatttcgtacatctgctcgaggtactacagagcgcccgagttgattttcggcgctgtgcactacacgacggcgatcgacatctggagcatcggatgcgtcacggcggagctgcttctcggctcaccgttgttcccgggagatagtggagtcgatcagctcgtggagatcatcaaaattttaggcacaccgaccaaggaacagatattgcacatgaatccgggctacactgacttcacgttcccacagctcaaaccgcacgcgtggtcaaaggtattctcgaagaatgccgatccgctggcgatagacttgatctcaaaaatcctagtttacgtcccacaggagcgcttcaactgcatggagctctgcgcacacgagtatttcgatgagttacgcgatgaatcgacgaggttacccgacggcagcgcgctgccgccactgttcaacttttcagacgacgagttgagttcgctcgacgataatctcaaggcaaagctcatcccagcgcacgctagatga

SEQ ID NO: 141923 - protein, 378 aa, Ostreococcus tauri
MTTTTGADAGSIAALTTRDVVYETVKIDGDPNEVGHVVHTGAPGASGEISYETVRVVGHGSFGVVYQARCRENGQEVAIKKVLQDKRFKNRELQIMKAVEHPNVVKLIHSYYHTTAEEEVYLNLVLEFVPDTVYRIGKHYSKNNQRVPGLLVKLYTYQMARALASVHKLGICHRDIKPQNLLVDSKTHVLKICDFGSAKILAPTEPNISYICSRYYRAPELIFGAVHYTTAIDIWSIGCVTAELLLGSPLFPGDSGVDQLVEIIKILGTPTKEQILHMNPGYTDFTFPQLKPHAWSKVFSKNADPLAIDLISKILVYVPQERFNCMELCAHEYFDELRDESTRLPDGSALPPLFNFSDDELSSLDDNLKAKLIPAHAR

SEQ ID NO: 141924 - DNA, 1110 bp, Festuca arundinacea
  CDS (1)..(1110)
atggtgatgatggtggaccctccgaacggcatgggcaaccacggcaagcactactacaccatgtggcagaccatgttcgagatcgacaccaagtacgtgcctatcaagcccatcgggcgaggggcctacgggatcgtctgctcctccatcaaccaggagaccaacgagaaggtcgccatcaagaagatcaacaacgtcttcgacaaccgcgtcgacgcgctcaggacgctgcgcgagctcaagctcctccgccacctgcgtcacgagaatgtgatttgcttgaaggatataatgatgcccatccacaggaggagcttcaaggatgtgtacctggtctccgagctcatggacactgatctgcatcagattgtcaagtcgtcgcagccgctttccaatgaccactgccagtatttcctttttcagctactccgagggctgaagtaccttcattcagcagggattctccatagagacctgaaaccagggaaccttctggttaatgcaaactgtgatctgaagatctgtgactttggcctggctcgcacaaacaacactaaaggtcagtttatgactgaatatgttgtcacccgctggtatagagctcctgagctgctgctctgctgcgacaactatggcacctccatagatgtctggtctgttggctgcatatttgctgagccacttggccgcaagccgatctttccgggaaccgagtgcctaaatcagcttaaacttatagtcaatgttcttggcaccatgagtgacagtgaccttgagttcattgacaaccggaaagctcgcaactacatcaaatcccttccatacactccagggattcccctctctaacatgtacccacaggcgcaccctcttgccattgatctgttgcagaagatgctggtctttgatccttccaaaaggattagtgtccttgaggctctggcgcacccctacatgtctgcgctgtatggtccagccgcaaaccctcctgcccaggtacccattgatctcgatatagatgaaaacattggcgtagagacgatccgagaaatgttgtggcaggagatgctccagtaccaccctgaggccgccacaatggtgaatatgtga

SEQ ID NO: 141925 - protein, 369 aa, Festuca arundinacea
MVMMVDPPNGMGNHGKHYYTMWQTMFEIDTKYVPIKPIGRGAYGIVCSSINQETNEKVAIKKINNVFDNRVDALRTLRELKLLRHLRHENVICLKDIMMPIHRRSFKDVYLVSELMDTDLHQIVKSSQPLSNDHCQYFLFQLLRGLKYLHSAGILHRDLKPGNLLVNANCDLKICDFGLARTNNTKGQFMTEYVVTRWYRAPELLLCCDNYGTSIDVWSVGCIFAEPLGRKPIFPGTECLNQLKLIVNVLGTMSDSDLEFIDNRKARNYIKSLPYTPGIPLSNMYPQAHPLAIDLLQKMLVFDPSKRISVLEALAHPYMSALYGPAANPPAQVPIDLDIDENIGVETIREMLWQEMLQYHPEAATMVNM

SEQ ID NO: 141926 - DNA, 2148 bp, Penicillium marneffei
  CDS (1)..(2148)
atggctcaaggtcagaattccacccatggagggtcgaggaagatttcgttcaatgtatcggatcagtatgatattcaggatgtgattggagagggagcgtatggcgttgtttgctctgcgctacacaaaccatcgggccagaaagtcgccatcaaaaaaatcactccgtttgaccactccatgttttgtcttcgaactctccgagagatgaagctgttaagatatttcaaccatgagaacatcatttcgatcctcgatattcagagacctcgtagttacgacagctttaccgaggtctatctcatccaagaactgatggaaactgacatgcaccgagtgatccgcacacaagacttgtccgacgaccattgccaatatttcatttaccagacactgcgcgcactgaaagcgatgcactcagccaatgtcttgcaccgagacttgaaaccttcgaatcttctactcaacgccaactgcgacttgaaggtttgcgattttggtctggctcgttcggcggcttctaccgacgacaattctggtttcatgactgaatatgttgccacacgttggtaccgtgctcctgaaattatgttgaccttcaaagagtacaccaaggcgatcgacgtatggagtgtgggatgtatcctggcagaaatgcttagcggaaaacccttattcccaggcaaggactaccaccaccaactcactctgatcctcgacgtactcggcacgccaaccatggaagattactacggaatcaaatctcgccgtgctcgtgaatacattcgatctctcccattcaagaagaagattcctttcaaacatctattcccgaaaaccaccgacctcgcgcttgatcttctagagaagttattggccttcaaccctgccaagcgtatcacggtcgaggaagctttgcgtcatccgtacctcgagccataccatgaccctgatgacgagcccactgcggatcccatcccagaagaattctttgatttcgacaagaacaaagataccctcagcaaagaacaactgaaactctgtagggataacccgggctcttccttcacactcactcaatccgacctcgaactcaatccatcaaggtatggaatcaaacactcaaaaatctcacgttcccctccaactctctcagagctagccgagaagcttcaaggctccctcagcgccaactatgaacgttcttctgtcaccgtggtcccctgcctagaccttcgtgagccacctttcctgctcgcgcacgagggtctttcgggcgatgagaaagtcgcggacgtcggtggccagacacacctgtatccgcggccgatgagggataagacctatgcactaatctcaattagtagggaaatggaaattgaggttggcgaatcccatgagcaggtaatgatcatcggcgcgggagcaggatcgtctgatattgttggtcagaactgtgagatggccatcaatttcggatggcgctatggtggtggtggtggtggtggtggtggtggtggtggtggcgtaccgcaagggtcatggcgtcataacggtgggcgttatgttaagattgagcctgggactgactctgtgcttttggagaagacggattctgcgagatggtggtttgggttgatggggaatctttttgcctcggatggggggcccggggatgtactcaagattactgcccgcaaacgtgttggggaagaggggagttttacagagtgtattcgaaaggcactccatgccgcctatggagattctcagatcgtcagtcttggtggtgtgttcgtgattaaatctgggaaagcgcgatatcatatcatgcctgattttccaccagaagaactgccatttcgagacaggcaacggttcaatgactggttgacgtaccacgatttcaaggggccgatgacttgtttaacggtattgcattctgttgacccggacaaaaagttggggttacggatggagcatacacatgcgttatcaacggtgggtgagaatgcaggtgggcattatcattacgatgttgaggaggagaaggaggagattgagtatgagggttattttaatacggccaaggcgttatatcgaattgataagcctgaattcagcttggagcaggttttacaaaagtaa

SEQ ID NO: 141927 - protein, 715 aa, Penicillium marneffei
MAQGQNSTHGGSRKISFNVSDQYDIQDVIGEGAYGVVCSALHKPSGQKVAIKKITPFDHSMFCLRTLREMKLLRYFNHENIISILDIQRPRSYDSFTEVYLIQELMETDMHRVIRTQDLSDDHCQYFIYQTLRALKAMHSANVLHRDLKPSNLLLNANCDLKVCDFGLARSAASTDDNSGFMTEYVATRWYRAPEIMLTFKEYTKAIDVWSVGCILAEMLSGKPLFPGKDYHHQLTLILDVLGTPTMEDYYGIKSRRAREYIRSLPFKKKIPFKHLFPKTTDLALDLLEKLLAFNPAKRITVEEALRHPYLEPYHDPDDEPTADPIPEEFFDFDKNKDTLSKEQLKLCRDNPGSSFTLTQSDLELNPSRYGIKHSKISRSPPTLSELAEKLQGSLSANYERSSVTVVPCLDLREPPFLLAHEGLSGDEKVADVGGQTHLYPRPMRDKTYALISISREMEIEVGESHEQVMIIGAGAGSSDIVGQNCEMAINFGWRYGGGGGGGGGGGGGVPQGSWRHNGGRYVKIEPGTDSVLLEKTDSARWWFGLMGNLFASDGGPGDVLKITARKRVGEEGSFTECIRKALHAAYGDSQIVSLGGVFVIKSGKARYHIMPDFPPEELPFRDRQRFNDWLTYHDFKGPMTCLTVLHSVDPDKKLGLRMEHTHALSTVGENAGGHYHYDVEEEKEEIEYEGYFNTAKALYRIDKPEFSLEQVLQK

SEQ ID NO: 141928 - DNA, 1710 bp, Oryza sativa subsp
  CDS (1)..(1710)
atggatttcttcagcgaatatggtgatgctaacagatacaaaatacaggaagtcattggcaaaggaagctatggtgtagtttgttcagctattgaccaacatactggcgacaaggttgcaatcaagaaaatacacaatatctttgagcacttatctgatgctgcccgaatcctccgtgagatcaaattactccggctattacggcatcctgatatagttgagatcaagcatataatgctacctccatcaaggagggacttcaaggacatatatgttgtctttgagctgatggataccgatctccaccaagtcatcaaggcaaatgatgacttaaccaaagaacatcatcagttctttctttatcagatgcttcgtgctttgaaatatattcatactgctaatgtctatcatcgtgatttgaagccaaagaacatattggcaaacgctaactgtaaactcaaaatatgcgatttcggtctagcacgagtggcatttaatgacactcctacaacggtattctggacggattatgttgctactagatggtatagggctcctgagttgtgtggttctttctttactaagtattcaccagctattgacatatggagtattggctgcatttttgctgagattttaactgggaagcctttgtttcctggtaaaaatgtggttcaccagttggatctgatgactgatctcttgggtactccatcaatggatactgttacaaggattcggaatgagaaagcaaggaggtacttgagcagtatgaggaaaaagcagccagtacctttttctgagagattcccaaaagcagatcctgctgcactcaaacttctgcagaggcttttagcattcgacccgaaggatagaccaactgccgaagaggcgttggctgatccatattttaaaggccttgcgaaagcagagagagaaccatcatgccagccaataacaaagatggagtttgagtttgagcggagaaaggtgactaaagaggatgtgaaggaacttatattccgtgaaatactggagtatcatcctcaacttcttaaggattacatgaatggaaccgaaaaaacaaacttcctatatcctagtgcccttgacaactttcggagacaatttgctaacctggaagaaaatggagggaagaatggagatgctgttccatcagacaggaaacatgtttcgctcccaaggactactacagttcattctgctccaattcctcccaaagatcatcaaaatataacttcccaagtaccccaaaggattccaggtagaacaggacgaggagcttgccctgtaataccatttgagaatttgagtgcaatgggcccatacaatcaacgaagggtggtaaggaatccagtgcttcctccagccaccaccaacctatcagcacatgcctaccaccgtaaatcggatagctcagaaagagagctccagcaggagcttgagaaagatcgcatgcggtaccagccatcagagcatttcatggatgctaaggtggtgtcacatatgtcccatgatttgagagcttcctcttactacgtttcaaaggcgaaatctgatgtagcagacagagctgccttacaatccaacatgatgcagggaattggcccttttaatggcattgctgcagttggaggtaactacaataaagtcagtactgttcagtatggggtctcgaggatgtattag

SEQ ID NO: 141929 - protein, 569 aa, Oryza sativa subsp
MDFFSEYGDANRYKIQEVIGKGSYGVVCSAIDQHTGDKVAIKKIHNIFEHLSDAARILREIKLLRLLRHPDIVEIKHIMLPPSRRDFKDIYVVFELMDTDLHQVIKANDDLTKEHHQFFLYQMLRALKYIHTANVYHRDLKPKNILANANCKLKICDFGLARVAFNDTPTTVFWTDYVATRWYRAPELCGSFFTKYSPAIDIWSIGCIFAEILTGKPLFPGKNVVHQLDLMTDLLGTPSMDTVTRIRNEKARRYLSSMRKKQPVPFSERFPKADPAALKLLQRLLAFDPKDRPTAEEALADPYFKGLAKAEREPSCQPITKMEFEFERRKVTKEDVKELIFREILEYHPQLLKDYMNGTEKTNFLYPSALDNFRRQFANLEENGGKNGDAVPSDRKHVSLPRTTTVHSAPIPPKDHQNITSQVPQRIPGRTGRGACPVIPFENLSAMGPYNQRRVVRNPVLPPATTNLSAHAYHRKSDSSERELQQELEKDRMRYQPSEHFMDAKVVSHMSHDLRASSYYVSKAKSDVADRAALQSNMMQGIGPFNGIAAVGGNYNKVSTVQYGVSRMY

SEQ ID NO: 141930 - DNA, 1110 bp, Oryza sativa subsp
  CDS (1)..(1110)
atggacggggcgccggtggcggagttcaggccgacgatgacgcacggcggccggtacctgctctacgacatcttcgggaacaagttcgaggtgacgaacaagtaccagccgcccatcatgcccattggccgcggcgcctacgggatcgtctgctccgtgatgaactttgagacgagggagatggtggcgataaagaagatcgccaacgcgttcaacaacgacatggacgccaagcgcacgctccgggagatcaagctcctcaggcacctcgaccacgagaacatcataggcatcagggatgtgatcccgccgccgatccctcaggcgttcaacgacgtctacatcgccacggagctcatggacaccgacctccatcacatcatccgctccaaccaagaactgtcagaagagcactgccagtatttcctgtaccagatcctgcgggggctcaagtacatccactcggcgaacgtgatccaccgcgacctgaagccgagcaacctgctgctgaacgccaactgcgacctcaagatctgcgacttcgggctggcgcggccgtcgtcggagagcgacatgatgacggagtacgtggtcacccggtggtaccgcgcgccggagctgctgctcaactccaccgactactccgccgccatcgacgtctggtccgtcggctgcatcttcatggagctcatcaaccgccagccgctcttccccggcagggaccacatgcaccagatgcgcctcatcaccgaggtgatcgggacgccgacggacgacgagctggggttcatacggaacgaggacgcgaggaagtacatgaggcacctgccgcagtacccgcgccggacgttcgcgagcatgttcccgcgggtgcagcccgccgcgctcgacctcatcgagaggatgctcaccttcaacccgctgcagagaatcacagttgaggaggcgctcgatcatccttacctagagagattgcacgacatcgccgatgagcccatctgcctggagcccttctccatcgacttcgagcagaaggctctaaacgaggaccaaatgaagcagctgatcttcaacgaagcgatcgagatgaacccaaacttccggtactag

SEQ ID NO: 141931 - protein, 369 aa, Oryza sativa subsp
MDGAPVAEFRPTMTHGGRYLLYDIFGNKFEVTNKYQPPIMPIGRGAYGIVCSVMNFETREMVAIKKIANAFNNDMDAKRTLREIKLLRHLDHENIIGIRDVIPPPIPQAFNDVYIATELMDTDLHHIIRSNQELSEEHCQYFLYQILRGLKYIHSANVIHRDLKPSNLLLNANCDLKICDFGLARPSSESDMMTEYVVTRWYRAPELLLNSTDYSAAIDVWSVGCIFMELINRQPLFPGRDHMHQMRLITEVIGTPTDDELGFIRNEDARKYMRHLPQYPRRTFASMFPRVQPAALDLIERMLTFNPLQRITVEEALDHPYLERLHDIADEPICLEPFSIDFEQKALNEDQMKQLIFNEAIEMNPNFRY

SEQ ID NO: 141932 - DNA, 1113 bp, Cucumis sativus
  CDS (1)..(1113)
atggctgatgttggtcagaacaaccccgctgattttccagctctcccaacccatggtggccaatacgttcagtataacatttttgggaatcccttcgaaatcacctccaaatatcgtcctccgattatgcctattggtcgcggcgcatacggaatcgtttgttctgttttgaattcggagaccaacgaaatggttgcggttaagaagattgctaacgcgtttgataaccatatggatgccaagagaacgctccgtgagattaagcttctacgccatttggatcatgaaaatgtaataggcataagagatgtgattcctccacctttacggagagaattcaatgatgtctacatttcgactgaactaatggatactgatcttcaccaaataatccgctccaaccaaagtttatcagaagagcattgtcagtatttcctttatcagattctcagaggactgaaatacatacattcggcaaatgtcattcatcgagacttgaaaccgagcaatctattgcttaatgcaaactgtgatcttaaaatatgtgactttggtcttgctcgaccaacttctgaaaatgaatgcatgacggaatatgttgtgacaagatggtacagagcacctgagcttcttttgaactctgattatacagctgcaatcgatatatggtctgttggttgcatctttctggagcttatgaatagaaggcctttatttccaggcagggatcatgtgcatcagatgagattattgactgagcttcttggcacaccaagcgagtcagatcttggttttattcgaaatgaagactcgaaaagatatcttcgacaactacctccacatcctcgtcagccattagcaacggtttttccacatgttcatccattagcaattgatcttgtggataaaatgttgacatttgacccaacaaagagaattactgttgaagaagcgttagcacatccgtacctagaaagattgcatgacatagctgatgagccggtttgctcagagccattctcgtttgagtttgagcaacaatacttagacgaagaacagatgaaggagatgatttacagagaggcattggcactcaatccagaatttgcatga

SEQ ID NO: 141933 - protein, 370 aa, Cucumis sativus
MADVGQNNPADFPALPTHGGQYVQYNIFGNPFEITSKYRPPIMPIGRGAYGIVCSVLNSETNEMVAVKKIANAFDNHMDAKRTLREIKLLRHLDHENVIGIRDVIPPPLRREFNDVYISTELMDTDLHQIIRSNQSLSEEHCQYFLYQILRGLKYIHSANVIHRDLKPSNLLLNANCDLKICDFGLARPTSENECMTEYVVTRWYRAPELLLNSDYTAAIDIWSVGCIFLELMNRRPLFPGRDHVHQMRLLTELLGTPSESDLGFIRNEDSKRYLRQLPPHPRQPLATVFPHVHPLAIDLVDKMLTFDPTKRITVEEALAHPYLERLHDIADEPVCSEPFSFEFEQQYLDEEQMKEMIYREALALNPEFA

SEQ ID NO: 141934 - DNA, 1746 bp, Musa acuminata
  CDS (1)..(1746)
atgccaaattcaccagatttggactttttcagcgagtatggggatgccaatagatacaaaattcaggaggttataggcaaaggtagctatggggtggtctgttcagcaattgatacacatactggagagaaggtggcgatcaagaagatacatgatattttcgaacacatctccgatgctgtcagaatccttcgtgagatcaagcttcttcgtcttttaagacatcctgatatagtggagattaagcacatcatgttgcctccatcaaggaaggatttcaaagatatttatgttgtttttgagctcatggagtcagatcttcaccaagtcatcaaggcaaacgatgatctaacaagagaacattatcagttttttctttatcagctgcttcgtgcactaaaatatattcacacagctaatgtgtatcatcgtgatttaaagccaaaaaacatactagcaaatgcaaactgcaagctaaaaatttgtgattttggactggcaagagttgcatttagcgacacgcccacaacaattttttggacggattatgttgcaaccagatggtatagggctcctgagttatgtggatcattcttttccaagtataccactgctatcgatatttggagcattggttgcatttttgctgaggtattgacaggcaagcctctttttcctggtaaaaatgtagttcatcagttggatttgatgactgatcttctggggacaccttccttagatacaatttctcgggtccggaatgagaaggcaaggaagtacttgagcaacatgagaaaaaaactgtctgtgccattttcacagaagttcccaaatgcagatcctctggcattgaaacttctagagaggcttttagcatttgatcccaaggaccggccaacagctgaagaggcattggctgatccatatttcaaaggccttgccaaggtagagagagaaccatcttgccaaccaataacaaagatggaatttgagtttgagcgccgaaggttgactaaagaggacatacgggaacttatcttccgtgagattttggagtatcatccccagttgctcaaagactacatgaatggaacccaaagtgcaaatttcctatatcctagtgctgtcgatcagtttagaaagcaatttgcttaccttgaggagaatggtggtaaaagtgggcctgtaattccattagacaggaagcatgtttctcttcctaggtccacggtggtccactctgctactatccccccaatggaacaaccgaacatgggtccttcaagagataagcaaggcacggttgaagcgtgtaagaaccctcgtgacaatgaaaggtcatctggaagcatcgcaaaagcttcacaggcgcaaaggattccaactgctagaccaggaaaagttgttggtccggtggtgccttacgatagtggaagtatgaaggatgcctacgatcccagacggttcatcaggaatcctgttcttccgctgcaatccgccattccgccattttgttttcatggtcctgcaggcaagttggggagctccaacagagaccccggggaggcagaaggtgaatctgtacagcacaagccacccccccatccatgcatacccagcaagatggcaccagacatagcccttgacatgagagcttcccccttcaatgggatcgtcgcagcagctactgctggtggtcacagaaaagtcggcaccattcagtttggcatgaccagaatgtattaa

SEQ ID NO: 141935 - protein, 581 aa, Musa acuminata
MPNSPDLDFFSEYGDANRYKIQEVIGKGSYGVVCSAIDTHTGEKVAIKKIHDIFEHISDAVRILREIKLLRLLRHPDIVEIKHIMLPPSRKDFKDIYVVFELMESDLHQVIKANDDLTREHYQFFLYQLLRALKYIHTANVYHRDLKPKNILANANCKLKICDFGLARVAFSDTPTTIFWTDYVATRWYRAPELCGSFFSKYTTAIDIWSIGCIFAEVLTGKPLFPGKNVVHQLDLMTDLLGTPSLDTISRVRNEKARKYLSNMRKKLSVPFSQKFPNADPLALKLLERLLAFDPKDRPTAEEALADPYFKGLAKVEREPSCQPITKMEFEFERRRLTKEDIRELIFREILEYHPQLLKDYMNGTQSANFLYPSAVDQFRKQFAYLEENGGKSGPVIPLDRKHVSLPRSTVVHSATIPPMEQPNMGPSRDKQGTVEACKNPRDNERSSGSIAKASQAQRIPTARPGKVVGPVVPYDSGSMKDAYDPRRFIRNPVLPLQSAIPPFCFHGPAGKLGSSNRDPGEAEGESVQHKPPPHPCIPSKMAPDIALDMRASPFNGIVAAATAGGHRKVGTIQFGMTRMY

SEQ ID NO: 141936 - DNA, 1245 bp, Mycosphaerella graminicola; identical to SEQ ID NO: 140176
  CDS (1)..(1245)

SEQ ID NO: 141937 - protein, 414 aa, Mycosphaerella graminicola; identical to SEQ ID NO: 140177

SEQ ID NO: 141938 - DNA, 1821 bp, Medicago truncatula
  CDS (1)..(1821)
atgggtggtggaggaacgatctcggaagggattcgacgcttatttcaacgacgctcttcgactacttctactagtaagcaacagcagcagcaacatcaacatagcaatgataataataataataataataatattaatattgacttggtggtgagagatttgcgttcacagttggctgttattccaaccactaacgatctcgatcacgatcacgatcatcaacaatctctcttcaacttgaatcatatcaaagtccctaccaacaccgtcttctttccttcttcaatggatccaaacaaaaagggtccacccgaaactgagttttttactgagtatggagaggcaagtcaataccaggtccaagaaatcattggaaaaggaagttatggtgttgtctgttctgcaattgacactcatactggccaaaaagttgctatcaagaaaattaaccatgtttttgagcatgtatctgacgccacccgtatcctaagagaaatcaagctcttgcgcttgctcaggcatcctgatattgttgaaattaggcatattatgcttcctccttcacgccgtgagtttagggatatctatgttgtctttgagttgatggaatctgatctacatcaagtaattaaggcaaatcatgatcttactcctcagcaccaccaatttttcttgtatcaacttctccgaggccttaaatttatacatacagccaatgtttttcaccgcgatttgaaaccaaaaaatattcttgctaatgctgattgcaaactcaagatttgtgattttggacttgctcgagtttcatttaatgatgctccatccactattttctggaccgactatgttgcaactaggtggtaccgtgcacctgaactatgtggttcttttttctcaaaatatacacctggaattgatatttggagcattggatgcatatttgcagaaatgcttactgggaggccattgtttcctgggaaaaatgtggtgcatcaattggatatcatgactgatttgcttggcactcctcctcctgagtccattgcaaggattcgaaatgagaaagctagaaggtatcttaacagcatgcgaaaaaaacaacctgttccattctcccagaaatttccaaatatagatcctttggctcttcgtatactggagcgcttacttgcatttgatcctaaaaatcgtccatcagccgaagaggcattgtctgatccttatttccatggtttgtcgaatattgatcgtgaaccatccactcaccccatttcaaaacttgagtttgagttcgagagaaggaaagtgactaaagatgatgtcagagagttgatttatcgagagattttggagtatcatccccagatgcttgaggaatatattcgtggtggagatcaaaccagcttcatgtatccaagtggggttgatcgattcaagcgacagtttgcacatcttgaggaacattatggcaaaaaaggcgaacgaatctcaccactgcagagacagcatgcatccttacctcgagagcgggttcatacttccaagaatgaaaacaatgaaaacaacgatattgaaatgccaactggatcagatcttcagagccctccaggttctaatgtgacagatgctgaaaactcaggcgctcaaaatggactcgcaaagccaaactacagtccacgtagcttgttgaagagtgccagcattagtgcttcaaagtgtatagatgtgaaaggaagtaaagatccagaggagcctgttatagaggtcaatgacgacgcagcagatgaattgacagataacattgctgccatgcatgcttag

SEQ ID NO: 141939 - protein, 606 aa, Medicago truncatula
MGGGGTISEGIRRLFQRRSSTTSTSKQQQQQHQHSNDNNNNNNNINIDLVVRDLRSQLAVIPTTNDLDHDHDHQQSLFNLNHIKVPTNTVFFPSSMDPNKKGPPETEFFTEYGEASQYQVQEIIGKGSYGVVCSAIDTHTGQKVAIKKINHVFEHVSDATRILREIKLLRLLRHPDIVEIRHIMLPPSRREFRDIYVVFELMESDLHQVIKANHDLTPQHHQFFLYQLLRGLKFIHTANVFHRDLKPKNILANADCKLKICDFGLARVSFNDAPSTIFWTDYVATRWYRAPELCGSFFSKYTPGIDIWSIGCIFAEMLTGRPLFPGKNVVHQLDIMTDLLGTPPPESIARIRNEKARRYLNSMRKKQPVPFSQKFPNIDPLALRILERLLAFDPKNRPSAEEALSDPYFHGLSNIDREPSTHPISKLEFEFERRKVTKDDVRELIYREILEYHPQMLEEYIRGGDQTSFMYPSGVDRFKRQFAHLEEHYGKKGERISPLQRQHASLPRERVHTSKNENNENNDIEMPTGSDLQSPPGSNVTDAENSGAQNGLAKPNYSPRSLLKSASISASKCIDVKGSKDPEEPVIEVNDDAADELTDNIAAMHA

SEQ ID NO: 141940 - DNA, 1281 bp, Medicago truncatula
  CDS (1)..(1281)
atggccaccatgccgttggggccacatcaccaccatcaaccaccgcaacaagcaccactaccgttaccaccgccgttacagttacaacaaccacaaaccgtgaatgagacggtgaaaacaacggcggctaacggcggctccggtatggacactgataaggaaatgtcagctagtgtcgttgacagtaatgatgcagtcaccggtcacataatctcaaccaccattggaggcaaaaatggtgaaccgaaacggacaatcagttacatggccgaacgtgttgttggcacgggatcattcggaattgttttccaggcaaagtgcttggagactggtgaggcggtggctataaagaaggttttgcaagacaagcggtacaaaaatcgtgaactgcagttaatgcgcgtgatggatcacccaaatgtaatttccttgaagcactgtttcttctctacaacaagcagagacgaactttttctgaacttggtcatggagtatgtccctgagacgatgtaccgagttctaaaacactataataatatcaaccagagaatgcccctgatctatgtgaaattatatacataccaaatcttcaggggactagcatatatccatactgtgccaggagtttgccatagggacgtgaaaccccaaaatcttttggttgatcctctcactcaccaagttaagctttgcgattttgggagcgcgaaagttctggtcaagggtgaagcgaacatttcatacatatgttcacggtactatcgggccccagaactaatatttggtgcgacagaatacacaacttctattgatatctggtcagctggttgtgtccttgcagaacttcttctaggccagccattgttcccaggagagaatcaggtggaccaacttgtggaaattattaaggttcttggtactccaactcgagaagaaattcgttgtatgaaccctaattataccgattttagattccctcagattaaagctcatccttggcataaggtttttcacaagcgaatgccccctgaagctattgaccttgcatcaaggcttcttcaatattcaccaagtcttcgttgcagtgctctggaagcatgtgcacatcctttctttgatgagctccgagagcccaatgcccggcttcctaatggccgtcctctgcctccgcttttcaactttaaacaggaattatctggagcatcccccgaactgatcaacaaactcatcccagagcatgtcaggcggcagactggtcttggcttcccatatcccggctag

SEQ ID NO: 141941 - protein, 426 aa, Medicago truncatula
MATMPLGPHHHHQPPQQAPLPLPPPLQLQQPQTVNETVKTTAANGGSGMDTDKEMSASVVDSNDAVTGHIISTTIGGKNGEPKRTISYMAERVVGTGSFGIVFQAKCLETGEAVAIKKVLQDKRYKNRELQLMRVMDHPNVISLKHCFFSTTSRDELFLNLVMEYVPETMYRVLKHYNNINQRMPLIYVKLYTYQIFRGLAYIHTVPGVCHRDVKPQNLLVDPLTHQVKLCDFGSAKVLVKGEANISYICSRYYRAPELIFGATEYTTSIDIWSAGCVLAELLLGQPLFPGENQVDQLVEIIKVLGTPTREEIRCMNPNYTDFRFPQIKAHPWHKVFHKRMPPEAIDLASRLLQYSPSLRCSALEACAHPFFDELREPNARLPNGRPLPPLFNFKQELSGASPELINKLIPEHVRRQTGLGFPYPG

SEQ ID NO: 141942 - DNA, 1164 bp, Medicago truncatula; identical to SEQ ID NO: 140180
  CDS (1)..(1164)

SEQ ID NO: 141943 - protein, 387 aa, Medicago truncatula; identical to SEQ ID NO: 140181

SEQ ID NO: 141944 - DNA, 1737 bp, Triticum aestivum
  CDS (1)..(1737)
atggggggagggaacggcatcgtcgacggcttccgccgcttgttccaccgccgcacgccctccggctccgtgctcggcagctccaaccagtcttccgccggcgaggactcctccgacgtcgaggccgtcgaggacctggatctcgtgggcctccgccccatccgcgtccccaagcgcaagatgccgctccccgtcgagagccacaagaagaacataatggagaaagaattcttcacagagtatggagaggcgagccagtaccaaatccaagaagttgttggcaaggggagttatggagtagttgctgctgcaatagatacccgcaccggcgagcgggttgcgattaagaagatcaatgacgtgtttgagcacgtctcggatgccacacgcatcctccgcgaggtcaagctccttcggctgctacgtcatccagacgtggtggagatcaagcacataatgctccccccttctcggaaggagttccaagatatatatgttgttttcgagctgatggagtcagatctccatcacgtcatcagagcgaatgatgacctcacagctgagcattaccagtttttcctttaccagcttctccgcgctctcaagtacatccatggggctaatgtatttcatcgcgatctgaagcccaagaatatactggccaacgcagactgcaaactgaaaatttgtgactttggacttgcgcgtgtatcatttaatgatgctccttcagctatattttggacggattatgtagcaacaaggtggtacagggcccctgaattatgtggctcctttttctcgaaatacactcctgctattgatatttggagtattggatgcatatttgccgagcttctcactggacggccactctttcccgggaagaatgtcgtacaccagttagatataataacagatcttcttggaactccatcatcagaaaccttatctcggattcgaaatgagaaggccaggaggtacttaagttgcatgcgaaaaaaacaccctgtacccttgactcagaaatttcctaatgctgatccattggcggttcgcctactgggtcgtttacttgcatttgatcctaaagaccgtccttcagctgaagaggctttagcagacccatattttgcatctcttgccaatgtggagcgcgagccttcaaggcatccaatttcgaaacttgagtttgagtttgagagacgaaaggtgacaaaagatgatgttagggaattgatctatcgagagattttggagtaccatccacagatgctggaggaatacatgaaaggtggagaccagattagcttcctctatccaagtggtgttgaccgctttaaacggcagtttgcacacctggaggagcattacagcaaaggagaacgaggttccccgctgcaaagaaagcatgcctctttaccaaggcagagagtaggtgcgtcgaacgacggtaataatgaacagcatattagtgatcaggagatgagtgcagagcctgatgcccatggcacagtgagccctcaaaagtcacaggatgcacccagtgttggcccgaatggtctgagcccaactagcttaagctcgcggacctacctcaagagcgcgagcattagtgcttccaagtgtgtcgttgtcaacccgaataaacagccagagtatgacgatgcaatctctgaggaaacggaaggggccgtcgatggactatccgagaaggtctccaagatgcatgcctag

SEQ ID NO: 141945 - protein, 578 aa, Triticum aestivum
MGGGNGIVDGFRRLFHRRTPSGSVLGSSNQSSAGEDSSDVEAVEDLDLVGLRPIRVPKRKMPLPVESHKKNIMEKEFFTEYGEASQYQIQEVVGKGSYGVVAAAIDTRTGERVAIKKINDVFEHVSDATRILREVKLLRLLRHPDVVEIKHIMLPPSRKEFQDIYVVFELMESDLHHVIRANDDLTAEHYQFFLYQLLRALKYIHGANVFHRDLKPKNILANADCKLKICDFGLARVSFNDAPSAIFWTDYVATRWYRAPELCGSFFSKYTPAIDIWSIGCIFAELLTGRPLFPGKNVVHQLDIITDLLGTPSSETLSRIRNEKARRYLSCMRKKHPVPLTQKFPNADPLAVRLLGRLLAFDPKDRPSAEEALADPYFASLANVEREPSRHPISKLEFEFERRKVTKDDVRELIYREILEYHPQMLEEYMKGGDQISFLYPSGVDRFKRQFAHLEEHYSKGERGSPLQRKHASLPRQRVGASNDGNNEQHISDQEMSAEPDAHGTVSPQKSQDAPSVGPNGLSPTSLSSRTYLKSASISASKCVVVNPNKQPEYDDAISEETEGAVDGLSEKVSKMHA

SEQ ID NO: 141946 - DNA, 1119 bp, Zea mays
  CDS (1)..(1119)
atggattcctccggcggcggcggtggagcgcagatcaagggtatggcgacgcacgggggccgctacgtgctgtacaacgtgtacggaaacctcttcaaggtctcctccaagtacgccccacccatccgccccatcggtcgcggcgcctacggcattgtctgcgcggctgtcaactcgcagtcaggggaggaggttgcgatcaagaaggttggcaatgcgttcgacaaccacatcgacgccaagcggacgctcagggaaatcaagctgctgcgccacatggaccatgagaacatccctgccttaaaggatgtaattcggcccccaactagagagaactttaatgacgtgtacattgttactgagttaatggatacagatctccatcagatcgtacgctcaaatcagccgttgactgatgatcattgccagtacttcttgtatcagttgttacgagggctaaaatatgtgcactcagcaaatatattgcaccgcgatctgaagccgagcaatttgttcctaaatgcaaattgtgacctcaagattgcagacttttggcttgcgaggaccacttcagagacagatctcatgacagagtatgtggtcactcgttggtaccgggcaccagagctgctgttgaactgttcacagtatactgctgccattgatgtctggtcagttggatgcatactaggtgaaatcgttactcgtcaacccctgtttcctggacgggattacatccagcaattaaaattgatcactgagctcataggctctccagatgatgcaagcctgggatttcttcgaagtgataatgcaaaaagatacatggaacaactaccacagtttccaagacaggacttccgcctgcgtttccgcaacatgtctcctggcgcagtcgatttgttggaaaggatgcttgtgtttgatccaagcagacggattacagttgatgaggctctgcatcatccatacttggcttcacttcatgagatcaatgatgaacctacctgccctgcacctttcagctttgattttgagcatccatcctttacaggagcgcatataaaagaactcatctggagggaatctttagcatttaacccagagcctccctactaa

SEQ ID NO: 141947 - protein, 372 aa, Zea mays
MDSSGGGGGAQIKGMATHGGRYVLYNVYGNLFKVSSKYAPPIRPIGRGAYGIVCAAVNSQSGEEVAIKKVGNAFDNHIDAKRTLREIKLLRHMDHENIPALKDVIRPPTRENFNDVYIVTELMDTDLHQIVRSNQPLTDDHCQYFLYQLLRGLKYVHSANILHRDLKPSNLFLNANCDLKIADFWLARTTSETDLMTEYVVTRWYRAPELLLNCSQYTAAIDVWSVGCILGEIVTRQPLFPGRDYIQQLKLITELIGSPDDASLGFLRSDNAKRYMEQLPQFPRQDFRLRFRNMSPGAVDLLERMLVFDPSRRITVDEALHHPYLASLHEINDEPTCPAPFSFDFEHPSFTGAHIKELIWRESLAFNPEPPY

SEQ ID NO: 141948 - DNA, 1257 bp, Gibberella intermedia
  CDS (1)..(1257)
atgtcggaccttcaaggacggaaggtcttcaaggtctttaaccaggactttatcgtcgacgagcgctacacggtcaccaaggagcttgggcagggagcctacggtatcgtctgtgccgctgtgaacaatcagaccaacgagggtgtcgccatcaaaaaggtcaccaatgtcttcagcaagaagattctcgccaagcgcgctctgcgcgagataaagctgcttcagcacttccgaggccaccgcaacatcacatgtttgtatgacatggacattcctcgacccgataacttcaacgagacgtatctgtacgaggagctgatggagtgtgatttggctgccatcattcgatctggccagcctcttaccgatgcccatttccaatcctttatctaccagattctttgtggtctgaagtacattcactccgccaatgtgctccatcgagatctcaagcccggaaacctgctcgtcaatgccgactgcgagctcaagatttgcgatttcggtcttgcccgaggtttctcagtcgatcccgaggagaacgccggatacatgacggagtacgttgctacccgatggtaccgtgcacccgagatcatgttgagcttccagagctacaccaaaacgattgatgtttggtctgttggttgtattctcgctgagttgttgggtggccgacctttcttcaagggccgtgactacgtcgaccagctcaaccagattcttcacattcttggaacgcctaacgaagagaccctctctcgcattggctcaccccgtgcccaggaatacgtccgcaacctacctttcatgcccaagaagccattccctagcctgttccctcaggccaaccctgatgctctcgaccttctcgacaagatgctcgctttcgacccctcgtctcgtatcagcgtagagcaggctctcgagcacccttacctccacatctggcacgatgcctcagacgagcccgactgccctaccacattcaacttcgacttcgaggtcgttgaggatgttggccagatgagaggcatgattctggacgaggtgatgcgattccgacagactgtccgcactgttcctggccaaggtggccccgccggtctccagaaccagcaaggtgtgcccgtccctctgcctcagggcaacggccaatggacagcggaggacccccgaccacaggagtatcagggccatggaaatacggggctcgagcaggatctccagggaggacttgatgcctctaggagataa

SEQ ID NO: 141949 - protein, 418 aa, Gibberella intermedia
MSDLQGRKVFKVFNQDFIVDERYTVTKELGQGAYGIVCAAVNNQTNEGVAIKKVTNVFSKKILAKRALREIKLLQHFRGHRNITCLYDMDIPRPDNFNETYLYEELMECDLAAIIRSGQPLTDAHFQSFIYQILCGLKYIHSANVLHRDLKPGNLLVNADCELKICDFGLARGFSVDPEENAGYMTEYVATRWYRAPEIMLSFQSYTKTIDVWSVGCILAELLGGRPFFKGRDYVDQLNQILHILGTPNEETLSRIGSPRAQEYVRNLPFMPKKPFPSLFPQANPDALDLLDKMLAFDPSSRISVEQALEHPYLHIWHDASDEPDCPTTFNFDFEVVEDVGQMRGMILDEVMRFRQTVRTVPGQGGPAGLQNQQGVPVPLPQGNGQWTAEDPRPQEYQGHGNTGLEQDLQGGLDASRR

SEQ ID NO: 141950 - DNA, 1305 bp, Drosophila melanogaster
  CDS (1)..(1305)
atgagcgtttcgatgtcactggtacagggtggtgctgccggtggtgcgccacagggcgccagcgcaatcttggccgcagcggctccctactatcaaccgccggctgttccccaggatgttcagccggatcgtcccatcggctatggagcattcggagttgtctgggccgtcacagatcctcgcgatggacgacgagtggccttgaagaagctgccaaatgtgttccaatcgttggtctcatcgaagcgcgtttttcgcgagctgaaaatgctgtgcttcttcaagcatgaaaatgttctttcagcactggacattctacagccaccgcatttggatttctttcaagaaatctatgtgataacggagctgctgcaatcggatctgcacaagataatcgtgtcgccacagcacctgtccgccgaccacatcaaggtgttcctgtaccagatcctgcgcggcctcaaatatctgcactcggcccgcatcctgcatcgcgacatcaagccgggcaatctgctggtcaactcgaattgcgtgctcaagatctgtgactttggattggcccgcgtcgaggagccggatcaggccaagcacatgacccaagaggtggtcacccagtactatcgcgcaccggagattctgatgggcgctcgccactactcgtcggcggtggatgtatggtcggtgggctgcatttttggcgagctgctgggccgtcgcatcctcttccaggcacagaatcctgtgcagcagctggagctgattaccgagctgcttggcacgcccaccatggaggatatgcgtcacgcctgcgagggcgcccgcacccacatgttgcgccgggcgcccaagccgccatccttctcggtgctctacacactcagctcgcatgccacgcacgaggcggtgcacttgctctgccagatgctcgtcttcgatccggataagcgcatctccgtgacagatgccctggcgcatccgtatctggatgaggggcgtctgcgctatcactcgtgcatgtgcaaatgctgcttcactacctcagcgggaatgcgtcagtatacggctgattttgagccctccgccggccagcccttcgatgatctgtgggaacgtaagctgacatccgtgcagcaggtcaaagaggagatgcacaagttcattgccgagcagctgcaaacgggtcgtgtgccgctgtgcatcaatccacagagtgcagccttcaagagtttcggcagttcgactgtggcacatccttcggagcttcccgccgtcgcctcaccaatgggaatgacggcaaaatga

SEQ ID NO: 141951 - protein, 434 aa, Drosophila melanogaster
MSVSMSLVQGGAAGGAPQGASAILAAAAPYYQPPAVPQDVQPDRPIGYGAFGVVWAVTDPRDGRRVALKKLPNVFQSLVSSKRVFRELKMLCFFKHENVLSALDILQPPHLDFFQEIYVITELLQSDLHKIIVSPQHLSADHIKVFLYQILRGLKYLHSARILHRDIKPGNLLVNSNCVLKICDFGLARVEEPDQAKHMTQEVVTQYYRAPEILMGARHYSSAVDVWSVGCIFGELLGRRILFQAQNPVQQLELITELLGTPTMEDMRHACEGARTHMLRRAPKPPSFSVLYTLSSHATHEAVHLLCQMLVFDPDKRISVTDALAHPYLDEGRLRYHSCMCKCCFTTSAGMRQYTADFEPSAGQPFDDLWERKLTSVQQVKEEMHKFIAEQLQTGRVPLCINPQSAAFKSFGSSTVAHPSELPAVASPMGMTAK

SEQ ID NO: 141952 - DNA, 1071 bp, Mycosphaerella graminicola; identical to SEQ ID NO: 140182
  CDS (1)..(1071)

SEQ ID NO: 141953 - protein, 356 aa, Mycosphaerella graminicola; identical to SEQ ID NO: 140183

SEQ ID NO: 141954 - DNA, 885 bp, Camellia sinensis; identical to SEQ ID NO: 62889
  CDS (1)..(885)

SEQ ID NO: 141955 - protein, 294 aa, Camellia sinensis; identical to SEQ ID NO: 62890

SEQ ID NO: 141956 - DNA, 1134 bp, Phycomyces blakesleeanus; identical to SEQ ID NO: 140184
  CDS (1)..(1134)

SEQ ID NO: 141957 - protein, 377 aa, Phycomyces blakesleeanus; identical to SEQ ID NO: 140185

SEQ ID NO: 141958 - DNA, 1062 bp, Aspergillus oryzae
  CDS (1)..(1062)
atggcagaattcaatcgatcagaggtattgggatctgtgtttgacactaccaacagatatgttaacgtacggccggtgggcctgggcgcctttagccttgtttgttccgcgtatgacctagtaaggggccaagcggtggcgatcaaaaagctattgaacccctttgccacgacagccaacgctaaacaaacctatcgggagattaagctgttaaagcagttacgacatgaaaatctcatcggcttgtgcgatgtctttatctctccccgaacagatgtatacctagtaaccgagctcctttcaactgatctcgcccgccttctggaggctggaccccttgagccacagttcgtacagtatttcgcctatcagatactgcgtggtttgaaatacctacattctgcaggtgttgttcacagggatataaaacccagtaacctggttatcgatgagaattgcgacttgaaaatatgtgatttcggtctctccaggccccaggatcatcgcatgactggctatgtctcaacacggtattaccgtgcaccggaggtcatgcttacatggcaaaggtacggtgtagaggtggacatttggagtgcagggtgtgttattgcggagatgttcaacggaaagcctttatttccaggacaagaccccattaaccagttttacttgatcctggacgtcttgggaaacccatctgataaatttatctctcggatatgtaccacgaatacagtggagatcatcaggtcactggaacggagagagccacgtcccttgcaaagcgttattcagaatctagatgattccgccaggagtttgcttgagagaatgctcacgctggacccacaagaacgaatctcggccgaggaagccctacaacacccctatatgaaaatgtatcacgacccgaccgatgaaccaatagccgaggaaaggttcgactggatgttcaacggtggtgaatttgacaaggagatgcttaaagagatgatccctgcatacaatcttgcgtcatgctatcatgatatttttaaccagaacgacctactacagtga

SEQ ID NO: 141959 - protein, 353 aa, Aspergillus oryzae
MAEFNRSEVLGSVFDTTNRYVNVRPVGLGAFSLVCSAYDLVRGQAVAIKKLLNPFATTANAKQTYREIKLLKQLRHENLIGLCDVFISPRTDVYLVTELLSTDLARLLEAGPLEPQFVQYFAYQILRGLKYLHSAGVVHRDIKPSNLVIDENCDLKICDFGLSRPQDHRMTGYVSTRYYRAPEVMLTWQRYGVEVDIWSAGCVIAEMFNGKPLFPGQDPINQFYLILDVLGNPSDKFISRICTTNTVEIIRSLERREPRPLQSVIQNLDDSARSLLERMLTLDPQERISAEEALQHPYMKMYHDPTDEPIAEERFDWMFNGGEFDKEMLKEMIPAYNLASCYHDIFNQNDLLQ

SEQ ID NO: 141960 - DNA, 1065 bp, Aspergillus oryzae; identical to SEQ ID NO: 140188
  CDS (1)..(1065)

SEQ ID NO: 141961 - protein, 354 aa, Aspergillus oryzae; identical to SEQ ID NO: 140189

SEQ ID NO: 141962 - DNA, 1242 bp, Trichoderma harzianum; identical to SEQ ID NO: 140192
  CDS (1)..(1242)

SEQ ID NO: 141963 - protein, 413 aa, Trichoderma harzianum; identical to SEQ ID NO: 140193

SEQ ID NO: 141964 - DNA, 1071 bp, Trichoderma harzianum; identical to SEQ ID NO: 140194
  CDS (1)..(1071)

SEQ ID NO: 141965 - protein, 356 aa, Trichoderma harzianum; identical to SEQ ID NO: 140195

SEQ ID NO: 141966 - DNA, 1122 bp, Brassica napus
  CDS (1)..(1122)
atgtcggcggagaactgttttggcggcggcggtggtgatcagagcacgaaaggattggctactcacggtggtcagtacgttcagtacaatgtctacggaaacatcttcgaagtgactagaaagtacgttcctcctcttcgccccatcggcagaggcgcttacggcatcgtctgtgctgctacaaactcagagacgggagaggaagtagctatcaagaagatcggtaacgcttttgacaacatcatcgacgccaagagaaccttgagagagattaagctcctcaagcacatggatcacgagaatgttattgctgtgaaggatataataagaccacccctgagagagaacttcaacgatgtttacattgtttatgagctcatggacactgatctccaccagattatacgctctaaccaacccttaactgatgatcattgtcaattcttcttgtatcaattgttgcgtggactcaagtacgttcactcagccaatgtgttacaccgagatttaaagcccagcaatttgctcctgaacgcaaactgtgatctaaagcttggggatttcgggcttgccaggaccaaatccgagactgacttcatgactgagtacgttgttacacgctggtaccgagctccagagttgctccttaactgctccgagtacacagcagcgatcgatatctggtccgtcggttgtattctcggtgaaacaatgacaagagagcccttgtttccgggtaaagattatgttcatcagcttaggcttatcactgagcttataggatcacctgatgattcaagcttggggttcttaaggagcgacaacgcaaggagatacgttaaacagcttccacagtacccgagacagaactttgctgctaggttcccaaacatgtcagctggcgcagccgatttgcttgagaaaatgctcgtctttgatccaagcagacgcatcactgttgatgaggcgttgtgccacccatatttggcgccgctgcacgatataaacgaggaaccggtgtgtgtgaggccgttcaatttcgattttgagcaaccttctttgacagaagagaacatcaaggagcttatatatcgtgaaacagtcaatttcaatcctcagtaa

SEQ ID NO: 141967 - protein, 373 aa, Brassica napus
MSAENCFGGGGGDQSTKGLATHGGQYVQYNVYGNIFEVTRKYVPPLRPIGRGAYGIVCAATNSETGEEVAIKKIGNAFDNIIDAKRTLREIKLLKHMDHENVIAVKDIIRPPLRENFNDVYIVYELMDTDLHQIIRSNQPLTDDHCQFFLYQLLRGLKYVHSANVLHRDLKPSNLLLNANCDLKLGDFGLARTKSETDFMTEYVVTRWYRAPELLLNCSEYTAAIDIWSVGCILGETMTREPLFPGKDYVHQLRLITELIGSPDDSSLGFLRSDNARRYVKQLPQYPRQNFAARFPNMSAGAADLLEKMLVFDPSRRITVDEALCHPYLAPLHDINEEPVCVRPFNFDFEQPSLTEENIKELIYRETVNFNPQ

SEQ ID NO: 141968 - DNA, 1134 bp, Rheum australe
  CDS (1)..(1134)
atggctgacgtggcgatgcagaatccggcgccagttgccggtcaaattcccgattttccgacggtttctacctacggtggccagtttattcagtacaacatctttggaaacatgtttgaggtaacggccaagtatcggccgccgatcttgccgatcggtcgaggagcctacgggattgtctgttcggtgttgaatacggagacgaacgagatgatggcgatgaagaagatagcgaacgctttcgataattacatggacgcgaagcgtacgctgcgggagattaagcttctccggcattttgatcacgagaacataattggcttaagagatgtgattcctccaccattacgaagagaattcacggatgtttacattgcaactgagctgatagacaccgatcttcatcagattatccgatccaatcaatctctatcggaggagcccagtcagtacttcttgtaccagaaactccgaggtcttaaatatatccactctgcacatgccattcatagagatttaaagccgagtaacctgttgataaattccaattgtgatctaaagatctgtgattttggtctggcacgtccaacttttgagaatgagcacatgactgagtacgttgtcaccagatggtacagggcgcctgagcttctgctgaattcttctgattatacatctgccattgatgtttggtctgtgggttgcatctatatggaattgatgaataggaagcctttgtttccaggaagagatcatgttccccaaatgcgcttggtaactgaacttcttgggtcacctctggagtctgatcttaatttttcggaaggaggatgcggggagatattttcgccaaatgcccccacaacctcgtcagcagtagcaagggtcttcccacatatcaatccaatggccattgattttatcgagagaatgttaacatttgatcccactcgccggatcactgttgaagaatcactagctcatccttacctggcaaggctacatgatgccgaggatgaacctatttgccccgagactttctcttttgaattcgagcgacacaccatgggagaagaagagatgaaggaaatgatttaccaggaatctatagcactcaatccagagcttgcataa

SEQ ID NO: 141969 - protein, 377 aa, Rheum australe
MADVAMQNPAPVAGQIPDFPTVSTYGGQFIQYNIFGNMFEVTAKYRPPILPIGRGAYGIVCSVLNTETNEMMAMKKIANAFDNYMDAKRTLREIKLLRHFDHENIIGLRDVIPPPLRREFTDVYIATELIDTDLHQIIRSNQSLSEEPSQYFLYQKLRGLKYIHSAHAIHRDLKPSNLLINSNCDLKICDFGLARPTFENEHMTEYVVTRWYRAPELLLNSSDYTSAIDVWSVGCIYMELMNRKPLFPGRDHVPQMRLVTELLGSPLESDLNFSEGGCGEIFSPNAPTTSSAVARVFPHINPMAIDFIERMLTFDPTRRITVEESLAHPYLARLHDAEDEPICPETFSFEFERHTMGEEEMKEMIYQESIALNPELA

SEQ ID NO: 141970 - DNA, 1317 bp, Paracentrotus lividus
  CDS (1)..(1317)
atggctgtttgtggatctcgtatttctcactctcagatggctttcgctaacgggtcctccagcgcccatgaccgtgcaatcctgagtgcaactcagacttactatcagccttctcctgccgcctcgtctgtgcctagaagagaattcgagcccgatcgtccaattggttatggggcgtttggagttgtctggtcggtaacggaccctcgcgatggcaagcgggttgccctcaagaagatgccccacgtcttccagaatctcatctcatgtaaaagggtttaccgggaacttaagatgctctttttctttaatcatgacaatgtgcttcgagctctggacatcctacaacctccacacgtagacttctttgaagaaatatatgttgtaactgaactgcttcaaagcgacctacataagatcattgtttctccccagccactcagctcagatcatgtcaaggtcttcctctaccagattctcagaggtctcaagtacttgcattcagcgggcatcctacatagggatatcaagccaggcaatcttctcgtcaacagtaactgtgtacttaaggtgtgtgactttggtctagcccgagtagaggaacctgataccagtaaacacatgacccaggaggtcgtgacacagtactaccgcgctcctgagatcttagtaggtagcaagcattacacctcagcggtggacatgtggtcggtcggatgcatctttgctgagcttctaggcaggcggatcctcttccaggcccagagtccaatcacacaactcaatttaatcacagatcttcttgggacgccctcaatggaggatatgaagtacgcctgcgacggagctcgggctcatcttctacgcatgccacataaaccgccttgcctatcagctttatatggtctctcaagtcacgccacacatgaagctgttcacttactcagtagaatgcttgtcttcaatccggacaaaaggatttcatgtatcgacgctctggcgcacccttacctagacgagggtcggttacgttaccatacatgtatgtgcaattgctgtcataatacgacggcgggccggcagtacaccggcgagtttgaacctgctgctcctcacaggtttgactgcttgtacgaagatgacctccacacagtatcacaagtcaaagaagcgctacataaattcatcaccgacagacaccagggtaacaccgtacctctatgcatcaatccccaatcagccgccttcaaaagttttgcaagttcgtccgtagccagtgcgtcggaattaccgccctctcctcaaccgtgggactga

SEQ ID NO: 141971 - protein, 438 aa, Paracentrotus lividus
MAVCGSRISHSQMAFANGSSSAHDRAILSATQTYYQPSPAASSVPRREFEPDRPIGYGAFGVVWSVTDPRDGKRVALKKMPHVFQNLISCKRVYRELKMLFFFNHDNVLRALDILQPPHVDFFEEIYVVTELLQSDLHKIIVSPQPLSSDHVKVFLYQILRGLKYLHSAGILHRDIKPGNLLVNSNCVLKVCDFGLARVEEPDTSKHMTQEVVTQYYRAPEILVGSKHYTSAVDMWSVGCIFAELLGRRILFQAQSPITQLNLITDLLGTPSMEDMKYACDGARAHLLRMPHKPPCLSALYGLSSHATHEAVHLLSRMLVFNPDKRISCIDALAHPYLDEGRLRYHTCMCNCCHNTTAGRQYTGEFEPAAPHRFDCLYEDDLHTVSQVKEALHKFITDRHQGNTVPLCINPQSAAFKSFASSSVASASELPPSPQPWD

SEQ ID NO: 141972 - DNA, 1179 bp, Nicotiana tabacum
  CDS (1)..(1179)
atggatggtccagctcatcaagcggacaccgtgatgtcggacgcggcgcagcaaccagctcctccgccacagccggttgctggaatcgataacattccggcgacgttaagccacggcggccggtttattcaatacaatatttttggtaatatatttgaagttactgcaaagtataagccacctattatgcccatcggtaaaggagcttatggcattgtttgttctgctttgaattcggagacgaatgagcatgttgcgataaagaaaatcgcgaatgcttttgataacaaaattgatgccaagagaactttgcgtgagattaagcttcttcgacatatggatcatgaaaatattgttgcgatcagagatataattccaccgcctcaaagagaagcattcaatgatgtttacattgcatatgagctcatggacactgatctccatcaaattattcgctctaatcagggattatcagaagaacattgtcagtatttcttgtatcagatcctccgtgggttgaaatacatacattctgcaaatgttttgcatagggacttgaagcctagcaatctcctcttgaatgccaattgtgatttaaagatatgtgattttgggctagctcgtgtcacttctgaaaccgactttatgaccgaatatgttgtgacaagatggtaccgagcacctgagctgttgttaaattcatctgactatactgcagctattgatgtatggtcagtgggttgcattttcatggaattaatggacagaaagcctctgtttcctggtagagatcatgtacatcagctacgtctgcttatggagttgattggcaccccatctgaggctgaaatggagtttttgaatgagaatgcaaaacggtacatcagacaacttcctctttaccgtcgacaatcttttgtcgaaaaatttccacatgtaaaccctgctgctattgatcttgttgagaaaatgttgacatttgatcccagaagaagaattaccgttgaagatgcgcttgcacatccttacctaacatcgcttcatgatattagcgacgagcccgtttgcatgactccttttaacttcgattttgaacagcacgcccttactgaggaacaaatgaaagagctgatttacagggagggtcttgcatttaatcctgaataccagcacatgtga

SEQ ID NO: 141973 - protein, 392 aa, Nicotiana tabacum
MDGPAHQADTVMSDAAQQPAPPPQPVAGIDNIPATLSHGGRFIQYNIFGNIFEVTAKYKPPIMPIGKGAYGIVCSALNSETNEHVAIKKIANAFDNKIDAKRTLREIKLLRHMDHENIVAIRDIIPPPQREAFNDVYIAYELMDTDLHQIIRSNQGLSEEHCQYFLYQILRGLKYIHSANVLHRDLKPSNLLLNANCDLKICDFGLARVTSETDFMTEYVVTRWYRAPELLLNSSDYTAAIDVWSVGCIFMELMDRKPLFPGRDHVHQLRLLMELIGTPSEAEMEFLNENAKRYIRQLPLYRRQSFVEKFPHVNPAAIDLVEKMLTFDPRRRITVEDALAHPYLTSLHDISDEPVCMTPFNFDFEQHALTEEQMKELIYREGLAFNPEYQHM

SEQ ID NO: 141974 - DNA, 1185 bp, Nicotiana tabacum
  CDS (1)..(1185)
atggatggtccagctcatcaaacggacaccgtgatgtcggacgcggcggcggcgcagcaaccagctcctccgacgcagccggtggccggaatcgataacatcccagcgatgttaagccacggcggccggtttattcaatacaatatttttggtaatatatttgaagttactgcaaagtataagccaccgattatgcccatcggtaaaggagcttatggcattgtttgttctgctttgaattcggagacgaatgagcatgttgcgataaagaaaatcgcgaatgcttttgataacagaattgatgccaagagaactttgcgtgagattaagcttcttcgacatatggatcatgaaaatattgttgcgatcagagatataattccaccgcctcaaagagaagcattcaatgatgtttatattgcatatgagctcatggacactgatctccatcaaattattcgctctaatcagggattatcagaagaacattgtcagtatttcttgtatcagatcctccgtgggttgaaatacatacattctgcaaatgttttgcatagggacttgaagcctagcagtctcctcttgaatgccaattgtgatttaaagatatgtgattttgggctagcccgtgtcacttctgaaaccgactttatgaccgaatatgttgtgacaaggtggtaccgggcacctgagctgttgttaaattcatctgactatactgcagctattgatgtatggtcagtgggttgcattttcatggaattgatggacagaaagcctctgtttcctggtagagatcatgtacaccagctacgtctgcttatggagttgattggcaccccatctgaggctgaaatggagtttttgaatgagaatgcaaaacggtacatcagacaacttcctctttaccgtagacaatcttttgtcgaaaactttccacatgtaaaccctggtgctattgatcttgttgagaaaatgttgacatttgatcccagaagaagaattactgttgaagatgcgcttgcacatccttacctaacatcgcttcatgatattagcgacgagcccgtttgcatgactccttttaacttcgattttgaacagcatgcccttactgaggaacaaatgaaagagctgatttacagggagggtcttgcatttaatcctgaataccagcacatgtga

SEQ ID NO: 141975 - protein, 394 aa, Nicotiana tabacum
MDGPAHQTDTVMSDAAAAQQPAPPTQPVAGIDNIPAMLSHGGRFIQYNIFGNIFEVTAKYKPPIMPIGKGAYGIVCSALNSETNEHVAIKKIANAFDNRIDAKRTLREIKLLRHMDHENIVAIRDIIPPPQREAFNDVYIAYELMDTDLHQIIRSNQGLSEEHCQYFLYQILRGLKYIHSANVLHRDLKPSSLLLNANCDLKICDFGLARVTSETDFMTEYVVTRWYRAPELLLNSSDYTAAIDVWSVGCIFMELMDRKPLFPGRDHVHQLRLLMELIGTPSEAEMEFLNENAKRYIRQLPLYRRQSFVENFPHVNPGAIDLVEKMLTFDPRRRITVEDALAHPYLTSLHDISDEPVCMTPFNFDFEQHALTEEQMKELIYREGLAFNPEYQHM

SEQ ID NO: 141976 - DNA, 1122 bp, Nicotiana tabacum
  CDS (1)..(1122)
atggaagcaatttcaggtgatcaaggtgtacaaagtaatttcaaaggagttccaacacatgggggtcgttatgcgcagtataatgtgtatggtaatctctttgaagtttccaaaaagtatgttccccttaggccggttggtcgtggagcttatggcatcgtttgtgccgctatgaactctgaaacacgtgaggaagtagctattaagaagattggcaatgcatttgataatagaattgatgcgaaaaggacactacgagagataaagcttcttcgtcacatggatcatgacaatgtgattgccactaaagatattataaggcctccacaaactgagaatttcaatgatgtctacattgtttatgaattgatggacactgatcttcatcagataattcgttccaaccaacagttgactgatgatcactgtcggtatttcctataccaaatattacgaggacttaagtacattcactctgccaacgtcctgcatcgtgatctaaaacctagcaatttgtttctcaatgcgaattgtgaccttaaagttggagattttgggcttgcaaggacaacatccgagacagatttcatgacggagtatgtcgtaacgcggtggtatcgggcaccggagttgctcctaaattgttcagaatatacagcagcaattgatatctggtcagtaggttgcatactgggtgagatgatgacaagacaacctctctttcccggcaaggactatgttcaccagttgaaacttatcacagagctcataggatcacctgatgatgccagtcttggatttctccggagtgataatgctcggagatatgttagacagctcccccagtatccaagacaacaatttgctgctagattccccaattcatctcctggagctgttgatttgcttgaaaaaatgcttgtctttgatccaagcaggcgtgttacagttgatcaagcgctctgccacccctacttggcgcctcttcatgatatcaatgaggagcccatttgtcctaaacctttcagttttgactttgagcagccatcttttactgaagaaaatatcaaggagctcatctggagggaatccgtgaaatttaatccagatccaactcactga

SEQ ID NO: 141977 - protein, 373 aa, Nicotiana tabacum
MEAISGDQGVQSNFKGVPTHGGRYAQYNVYGNLFEVSKKYVPLRPVGRGAYGIVCAAMNSETREEVAIKKIGNAFDNRIDAKRTLREIKLLRHMDHDNVIATKDIIRPPQTENFNDVYIVYELMDTDLHQIIRSNQQLTDDHCRYFLYQILRGLKYIHSANVLHRDLKPSNLFLNANCDLKVGDFGLARTTSETDFMTEYVVTRWYRAPELLLNCSEYTAAIDIWSVGCILGEMMTRQPLFPGKDYVHQLKLITELIGSPDDASLGFLRSDNARRYVRQLPQYPRQQFAARFPNSSPGAVDLLEKMLVFDPSRRVTVDQALCHPYLAPLHDINEEPICPKPFSFDFEQPSFTEENIKELIWRESVKFNPDPTH

SEQ ID NO: 141978 - DNA, 1122 bp, Solanum tuberosum
  CDS (1)..(1122)
  misc_feature (33)..(33): y is t or c
  misc_feature (84)..(84): y is t or c
  misc_feature (784)..(784): w is a or t
  misc_feature (879)..(879): y is t or c
  misc_feature (982)..(982): r is g or a
  misc_feature (1023)..(1023): y is t or c
atggttgatgctaatatgggtggtgctcaattycctgattttcctaaaattgttactcatggtggacaatatgttcagtatgayatttttggtaattactttgagattaccaacaagtatagacctcctatcatgcctattggccgtggcgcttatggaatcgtctgctctgtgtttaatgcggagctgaatgagatggttgcagttaagaaaatcgccaatgcttttgataattacatggatgctaagaggacgctccgtgaaattaagcttcttcgccatttagaccatgaaaatgtcattggtttaagagatgtgattcctccgcccttacgaagggagttttctgatgtatacattgctactgaactcatggatactgatcttcaccaaataattcgatcgaaccaaggtttatcagaggatcattgccagtacttcatgtatcagcttctccgtgggctaaagtacatacattcagcgcatgttattcatagagatctcaaaccaagtaacctcttgctaaatgcaaattgtgatcttaagatatgtgattttggtcttgcaaggccaaacctagagaacgagaatatgacagaatatgtagttaccagatggtacagggcaccggagcttttgttgaactcttcagattacactgctgccatagatgtttggtctgtgggttgcatcttcatggagcttatgaatagaaaacctttgtttgctggaaaagatcatgtacatcaaatacgcttgctaactgagcttcttggcactcctwcagaatctgatcttagcttcctccgaaatgaagatgcaaaaagatatgtcaggcaactcccacaacatccacgccagcagttagcaacagtgttycctcatgtaaatccattagccattgatcttgtagataagatgttgacactcgaccctactagaagaattacagttgaggaagcattagctcatccatacctcrcaaagctccatgatgccgctgatgaaccagtctgccccatyccgttctctttcgactttgagcaacaagggataggagaagagcagattaaagacatgatttatcaagaagccttggcgttgaatcctgaatatgcttaa

SEQ ID NO: 141979 - protein, 373 aa, Solanum tuberosum
  misc_feature (262)..(262): The Xaa at location 262 stands for Ser, or Thr.
  misc_feature (328)..(328): The Xaa at location 328 stands for Ala, or Thr.
MVDANMGGAQFPDFPKIVTHGGQYVQYDIFGNYFEITNKYRPPIMPIGRGAYGIVCSVFNAELNEMVAVKKIANAFDNYMDAKRTLREIKLLRHLDHENVIGLRDVIPPPLRREFSDVYIATELMDTDLHQIIRSNQGLSEDHCQYFMYQLLRGLKYIHSAHVIHRDLKPSNLLLNANCDLKICDFGLARPNLENENMTEYVVTRWYRAPELLLNSSDYTAAIDVWSVGCIFMELMNRKPLFAGKDHVHQIRLLTELLGTPXESDLSFLRNEDAKRYVRQLPQHPRQQLATVFPHVNPLAIDLVDKMLTLDPTRRITVEEALAHPYLXKLHDAADEPVCPIPFSFDFEQQGIGEEQIKDMIYQEALALNPEYA

SEQ ID NO: 141980 - DNA, 885 bp, Nicotiana tabacum
  CDS (1)..(885)
atggaccagtatgaaaaagttgagaagattggggaaggaacatacggtgtagtgtacaaggctcgtgatcgtgtaactaatgaaacaattgcgctgaagaaaataaggctggagcaggaagatgagggagtaccaagcacagctattagagaaatctctcttttgaaagagatgcagcatgctaatattgtgaggttgcaggatgttgtgcacagtgaaaagcgattgtatctagtttttgaatatcttgacttggacttgaagaagcacatggattcatctcctgaattctctaaggatccacgtctggttaaaatgtttttgtatcaaatactccgtggtattgcttattgtcattctcatagagttcttcatcgagatttgaagcctcaaaacttgctgatagatcgacgtacaaatgctttaaagcttgcagactttggattggctagagcatttggtattcctgtcagaactttcactcatgaggtggtgacattgtggtacagggcaccagaaatactgctgggtacacgccattattctactcctgttgatgtgtggtcagttggttgcatatttgctgagatggtgactcagcgccctctgtttcctggtgactccgagattgatgaacttttcaagattttcagagtgatgggtactccaaatgaggatacatggcctggagtgactactctgcctgattttaaatctgccttcccaaaatggccttctaaggacctggcaactattgtcccaaatcttgatggagcaggccttgatcttcttgataaaacttcgcgcttggatcccagcaagagaatcactgccaggaatgcccttgagcatgagtacttcaaggatattgggtatgttccgtga

SEQ ID NO: 141981 - protein, 294 aa, Nicotiana tabacum; identical to SEQ ID NO: 62900

SEQ ID NO: 141982 - DNA, 882 bp, Nicotiana tabacum
  CDS (1)..(882)
atggaccagtatgaaaaagttgagaagattggggaaggaacatacggtgtagtgtacaaggctcgtgatcgtgtaactaatgaaacaattgcgctgaagaaaataaggctggagcaggaagatgagggagtaccaagcacagctattagagaaatctctctcttgaaagagatgcagcatgctaatattgtgaggttgcaggatgtagtgcacagtgagaagcgattatatctagtctttgaatatcttgacttggacttgaagaacacatggattactactcctgaattctctgaggatccacgtctggttaaaatgtttttgtatcaaatactccgtggtattgcctattgtcattctcatagagttcttcatcgagatttgaagcctcaaaacttgctgatagatcgacgtacaaatgctttaaagcttgcagactttggattggctagagcatttggtattcctgtcagaactttcactcatgaggtggtgacattgtggtacagggcaccagaaatactgctgggatcgcgccattactctactcctgttgatgtgtggtcagttggttgcatatttgctgagatggtgactcagcgccctctgtttcctggtgattccgagattgatgaactttcaagattcagagtgatgggtactccaaatgaggatacatggcctggagtgacaactctgcctgattttaaatctgccttcccaaaatggccttctaaggacctggcaactattgtcccaaatcttgatggagcaggccttgatcttcttgataaaatcgtccgcttggatcccagcaagagaatcactgccaggaatgcccttgagcatgagtacttcaaggatattgggtatgttccgtga

SEQ ID NO: 141983 - protein, 293 aa, Nicotiana tabacum; identical to SEQ ID NO: 62902

SEQ ID NO: 141984 - DNA, 885 bp, Nicotiana tabacum
  CDS (1)..(885)
atggaccagtatgaaaaagttgagaagattggggaaggaacatacggtgtagtgtacaaggctcgtgatcgtgtaactaatgaaacaattgcgctgaagaaaataaggctggagcaggaagatgagggagtaccaagcacagctattagagaaatctctctcttgaaagagatgcagcatgctaatattgtgaggttgcaggatgtagtgcacagtgagaagcgattatatctagtctttgaatatcttgacttggacttgaagaagcacatggattcatctcctgaattctctgaggatccacgtctggttaaaatgtttttgtatcaaatactccgtggtattgcctattgtcattctcatagagttcttcatcgagatttgaagcctcaaaacttgctgatagatcgacgtacaaatgctttaaagcttgcagactttggattggctagagcatttggtattcctgtcagaactttcactcatgaggtggtgacattgtggtacagggcaccagaaatactgctgggatcgcgccattactctactcctgttgatgtgtggtcagttggttgcatatttgctgagatggtgactcagcgccctctgtttcctggtgattccgagattgatgaacttttcaagattttcagagtgatgggtactccaaatgaggatacatggcctggagtgacaactctgcctgattttaaatctgccttcccaaaatggccttctaaggacctggcaactattgtcccaaatcttgatggagcaggccttgatcttcttgataaaatgctccggttggatcccagcaagagaatcactgccaggaatgcccttgagcatgagtacttcaaggatattgggtatgttccgtga

SEQ ID NO: 141985 - protein, 294 aa, Nicotiana tabacum; identical to SEQ ID NO: 62904

SEQ ID NO: 141986 - DNA, 1128 bp, Nicotiana tabacum
  CDS (1)..(1128)
atggctgatgcaaatatgggtgccggtggaggtcaattccctgattttccttcggttttaactcacggcggacaatatgtacagtttgatatttttggtaatttctttgagatcactaccaagtatcgtcctcctattatgcctattggtcgtggtgcttatggaattgtctgctcggtgttgaatacggagctgaatgagatggttgcagttaagaaaatcgcgaatgcgtttgatatttacatggatgctaagaggactctccgtgagattaagctcctccgccatttagaccatgaaaatgtaattggtttaagagacgtgattcctccacccttacgaagggagttttctgatgtttacattgctactgaactcatggatactgatcttcaccaaataattagatccaaccaaggtttatcagaggatcactgtcagtacttcatgtatcagctcctccgtggcctaaaatacatacattccgcgaatgttcttcatagagatctcaaaccgagcaaccttttggtaaatgcaaattgtgatcttaagatatgtgactttggtcttgctaggccaaacatagagaacgagaatatgacggaatatgttgtaaccagatggtacagggcaccagagcttttgttgaactcttcagattacactgctgctatagatgtttggtctgtcggttgcatcttcatggaacttatgaatagaaaacctttgtttggtggaaaagatcatgtacatcaaatacgcttgttaaccgagcttcttggcaccccaacagaagctgatcttggcttcctccaaaatgaagatgcaaagagatacatcaggcaactcccacaacatcctcgccagcagttagcagaagttttccctcatgtgaacccattggctattgatcttgtcgataaaatgttgacattcgatcctactagaagaattacagttgaggaagcattagatcatccctaccttgcaaagctccacgatgcaggtgacgaaccgatctgccctgttccattctcctttgactttgagcaacaaggaataggagaagagcaaattaaggacatgatatatcaggaagctttgtcactgaatcctgaatatgcttaa

SEQ ID NO: 141987 - protein, 375 aa, Nicotiana tabacum
MADANMGAGGGQFPDFPSVLTHGGQYVQFDIFGNFFEITTKYRPPIMPIGRGAYGIVCSVLNTELNEMVAVKKIANAFDIYMDAKRTLREIKLLRHLDHENVIGLRDVIPPPLRREFSDVYIATELMDTDLHQIIRSNQGLSEDHCQYFMYQLLRGLKYIHSANVLHRDLKPSNLLVNANCDLKICDFGLARPNIENENMTEYVVTRWYRAPELLLNSSDYTAAIDVWSVGCIFMELMNRKPLFGGKDHVHQIRLLTELLGTPTEADLGFLQNEDAKRYIRQLPQHPRQQLAEVFPHVNPLAIDLVDKMLTFDPTRRITVEEALDHPYLAKLHDAGDEPICPVPFSFDFEQQGIGEEQIKDMIYQEALSLNPEYA

SEQ ID NO: 141988 - DNA, 1110 bp, Avena sativa
  CDS (1)..(1110)
atggacggcgctccggtggccgagttccggccgaccatgacgcacggcggcaggttcctcctctacaacatattcgggaaccagttcgagatcacctccaagtaccagccgcccatcatgcccatcggacgaggagcatacgggatcgtctgctcggtgatgaacttcgagacgagggagatggtggccatcaagaagatcgccaacgccttcgacaacaacatggacgccaagcgcacgctccgggagatcaagctcctcaggcacctcgaccacgagaacattgttggcctcagagatgtgatcccgccgtccatcccgcagtcgttcaacgatgtgtacatcgccaccgagctcatggacacggacctccaccacatcatccgctccaaccaagaactctcggaagaacactgtcagtacttcctgtaccagctgctccgcgggctcaagtacatccactcggcgaacgtgatccaccgcgacctgaagccgagcaacctgctgctgaacgccaactgcgacctcaagatctgcgacttcggcctggcgcggccgtcgtcggagagcgacatgatgacggagtacgtggtcacgcgctggtaccgcgcgccggagctgctgctcaactccaccgactactccgccgccatcgacgtctggtccgtgggctgcatcttcatggagctcatcaaccgggccccgctcttcccgggcagggaccacatgcaccagatgcggctcatcaccgaggtcatcgggacccccaccgacgacgacctggggttcatccgcaacgaggacgccaggaggtacatgaggcacctgccgcagttcccgcgccgcccattcccggggcagttccccaaggtgcagcccgccgcgctggacctcatcgagaggatgctcaccttcaacccgctgcagcggatcacagttgaggaggcgctggagcacccgtacctggagcggctgcacgacgtcgccgacgagcccatctgcacggaccccttctccttcgacttcgagcagcacccgctcactgaagaccagatgaagcagctcatcttcaacgaagccctggaactgaaccccaatttccgatactag

SEQ ID NO: 141989 - protein, 369 aa, Avena sativa; identical to SEQ ID NO: 140197

SEQ ID NO: 141990 - DNA, 1503 bp, Festuca arundinacea
  CDS (1)..(1503)
atggagttctttactgaatacggagaggcaagccagtaccaaatccaagaagtcatcggcaaggggagttatggagtagttgctgccgcagtagatacccgcactggtgagcgggttgcgattaagaagatcaatgatgtgtttgggcacgtgtcagatgccacacgcatcctccgtgaggtcaagctccttcggctgctccgtcatccagacgtagtagagatcaagcacataatgctccccccttctcggagggagttccaagatttatatgttgtttttgagctcatggagtcggatctccatcaggtcatcagagccaatgatgacctcacagcggagcattaccagtttttcctttaccaacttctccgtgcgcttaagtacatccatgccgggaatgtatttcaccgcgatctaaagcccaagaatatactggccaactcagactgcaaactgaaaatttgtgactttggacttgcatgtgtatcatttaatgatgctccttcagctatattttggacggattatgtagcaacaaggtggtacagagcacctgaattatgtggctcctttttctcgaaatacactcccgctgttgatatatggagtattggatgcatattcgctgagcttctcactggacgaccactttttcctgggaagaatgtcgtccaccagttagatataataacagatcttctcggaactccatcatcagaaaccttatcgcggattcgaaatgagaaggccaggagatacttaagttgtatgcgaaaaaaacatcctgtccccttgactcagaaatttcctaatgctgatccgttggcggttcacttactagggcgtttacttgcatttgatcctaaagaccggccttcagctgaagaggctttggctgatccatattttgcaactctttctaatgtggaacgtgagccttcgagaaatccaatttcaaaacttgagtttgagtttgagagacgaaaggtgacgaaagatgatgttagagaattgatttatcgagagatactggagtatcatccacagatgctgcaggaatacatgaaaggtggagaacagcttagtttcctctatccaagtggggttgatcgctttaagcgacagtttgcacacctggaggagcattacagcaaaggcgaacgaggttctccactgcaaagaaagcatgcctccttgccaaagcggagagtaggtgcatcgaatgatggtaataatgaacagcatcctagtgatcaggagctgggtgcagatcctggtgcccaaagccctccaaggtcacaggacccagggcagcagcatccatccggtggccagaatggtgtgagcccccggagctaccagaagagcgcgagcattagcgcttccaggtgtgtcgttgtcaatccgaataaacaacgagagtatgacgaagaaatctctgaggaaacggaggaggccatcgctgaactatccgaaaaggtctccaagatgcacccctag

SEQ ID NO: 141991 - protein, 500 aa, Festuca arundinacea
MEFFTEYGEASQYQIQEVIGKGSYGVVAAAVDTRTGERVAIKKINDVFGHVSDATRILREVKLLRLLRHPDVVEIKHIMLPPSRREFQDLYVVFELMESDLHQVIRANDDLTAEHYQFFLYQLLRALKYIHAGNVFHRDLKPKNILANSDCKLKICDFGLACVSFNDAPSAIFWTDYVATRWYRAPELCGSFFSKYTPAVDIWSIGCIFAELLTGRPLFPGKNVVHQLDIITDLLGTPSSETLSRIRNEKARRYLSCMRKKHPVPLTQKFPNADPLAVHLLGRLLAFDPKDRPSAEEALADPYFATLSNVEREPSRNPISKLEFEFERRKVTKDDVRELIYREILEYHPQMLQEYMKGGEQLSFLYPSGVDRFKRQFAHLEEHYSKGERGSPLQRKHASLPKRRVGASNDGNNEQHPSDQELGADPGAQSPPRSQDPGQQHPSGGQNGVSPRSYQKSASISASRCVVVNPNKQREYDEEISEETEEAIAELSEKVSKMHP

SEQ ID NO: 141992 - DNA, 1557 bp, Brassica rapa subsp
  CDS (1)..(1557)
atggcggctgcagcttgtgggcagctgaatctggaggagcctactccgattcgaggatcccgcagcgtcgattgcttcgagaagctcgagcagatcggcgaaggcacttacggccaagtttacatggcgaaagatatcaaaactggtgaaatcgtggcattgaagaagatccgtatggataatgaacgagaagggtttcctataacagctatccgggagattaaaatcctgaagaagctccatcatgaaaacgtcatccacttgaaagagattgtcacttctcctggtcgagatagggatgatcaagggaagccagataataacaaatacaagggtggaatctacatggtctttgagtacatggaccatgacttgaccggactcgctgatcgccctggactcagattcactgttcctcagatcaagtgttacatgaagcaacttctcactgggcttcattattgtcatgtgaatcaagtgcttcaccgtgatataaaaggatctaatctacttattgataatgagggaaatttaaagcttgcggattttgggcttgcacggtcttattctcatgatcatagtgggaatcttactaaccgtgtcatcacattgtggtataggcctcctgagttgttgcttggtgccacaaagtatggaccagcgattgacatgtggtctgttggttgcatatttgctgagcttttgaatggtaaaccaatcttgcctggcaaaactgagagtgaacaattgaataagatatatgaactctgtggatcacctgatgagaacaactggcctggggttacgaagatgccttggtataaccaaatgaaatcgtctcggcctttgaagagacgtgtgagagaggtgtaccgacactttgatcgccatgctcttgagctgctggagaaaatgctggtgcttgacccgtctcagagaatatccgcaaaggatgctctcgacgcagagtacttttggactgacccgttgccgtgtgatccaaagagtctaccaacatatgagtcatcacacgagttccagacaaagaaaaagcggcaacaaatgcgtcataacgaggaagccgccaagaaacagaaactccagcatcctcagcagcagcaacactctcgtttgcccccgcagcaacacggcgttggtcagtctcacgccgctccgcattggcctgtcggaccaaaccaccctattaacaacggaccaccaccacaactacctgctggcggacctagcggccacaattactatcaaaaggcccgtgttggtggtgcacctggtccaaacaggtaccctcctggcggaaaccaaaccggtggttataataataatcagagccgtggaggttacagcagcggatcgtatcctccacaaggtcgaggtgctgcaccatatggcggcgctggtcctagaggacctagcggtggctatggtgctggaccacctaactactcacaaggtggtggtggtcagtacggtggctctggaagaggtcagaacccaatgggtggtgctagaaaccaacaatatggatggcaaccgtaa

SEQ ID NO: 141993 - protein, 518 aa, Brassica rapa subsp
MAAAACGQLNLEEPTPIRGSRSVDCFEKLEQIGEGTYGQVYMAKDIKTGEIVALKKIRMDNEREGFPITAIREIKILKKLHHENVIHLKEIVTSPGRDRDDQGKPDNNKYKGGIYMVFEYMDHDLTGLADRPGLRFTVPQIKCYMKQLLTGLHYCHVNQVLHRDIKGSNLLIDNEGNLKLADFGLARSYSHDHSGNLTNRVITLWYRPPELLLGATKYGPAIDMWSVGCIFAELLNGKPILPGKTESEQLNKIYELCGSPDENNWPGVTKMPWYNQMKSSRPLKRRVREVYRHFDRHALELLEKMLVLDPSQRISAKDALDAEYFWTDPLPCDPKSLPTYESSHEFQTKKKRQQMRHNEEAAKKQKLQHPQQQQHSRLPPQQHGVGQSHAAPHWPVGPNHPINNGPPPQLPAGGPSGHNYYQKARVGGAPGPNRYPPGGNQTGGYNNNQSRGGYSSGSYPPQGRGAAPYGGAGPRGPSGGYGAGPPNYSQGGGGQYGGSGRGQNPMGGARNQQYGWQP

SEQ ID NO: 141994 - DNA, 1044 bp, Scutellaria baicalensis; identical to SEQ ID NO: 62911
  CDS (1)..(1044)

SEQ ID NO: 141995 - protein, 347 aa, Scutellaria baicalensis; identical to SEQ ID NO: 62912

SEQ ID NO: 141996 - DNA, 1224 bp, Rheum australe
  CDS (1)..(1224)
atggacggagtcgctcaaatctccgacaccgacatggcggaggccgctcctcctccctccgatccttcgcagccgcaaccggctgcgcccgatccttcgcagcatcagccactgccgcaacaaccgcaacagatcaatatcccggcaacgctcagccacggtggccggtttattcaatacaacatcttcggtaacatcttcgaggtcactgctaaatataaaccgccaatcatgcctattggcaagggcgcttatggcattgtctgctcggccttgaattcggagacgagcgagcatgtagccataaagaagatagcaaatgcatttgataataaggtggatgcaaagaggacactgcgagagatcaagcttcttaggcatatggaccatgaaaatgttgtcgcaataagagatattattccgcccccactaagggattcttttaatgatgtctatatcgcttatgagctaatggacacagatctacaccagataattcgatccaatcaaggattatctgaggagcactgtcagtatttcctataccaaattcttcgtggtctcaagtacatacactctgcaaatgttctacaccgggacttgaagcctagcaacttgttgcttaatgccaattgtgatctgaaaatttgtgactttggtctagctcgtgtcacgtcagaaactgattttatgactgaatatgttgtgacaagatggtatcgtgccccagagcttttgctaaattcttcagattatacgacagcaattgatgtatggtctgttggatgcattttcatggaattgatggatcgtaagcctttattccctggtagagatcatgttcatcagttacgtctacttatggagcttattggcactccctctgaagcagagctgggatttctaaatgaaaatgcaaagagatacatacggcagcttcctcagtacacaaggcaatcaattcctggaaagtttccacatgtacaccctctagctattgatcttgttgaaaagatgttgacgtttgatcctagacagcgaataacagttgaagatgcgcttgctcatccttaccttaactcgctgcatgacatcagcgatgaacctgtctgcatgactccctttagctttgactttgagcagcacgctttgtctgaggagcagatgagggaactcatctaccgtgaagctctagcattcaatcccgagtatcagcaaggctag

SEQ ID NO: 141997 - protein, 407 aa, Rheum australe
MDGVAQISDTDMAEAAPPPSDPSQPQPAAPDPSQHQPLPQQPQQINIPATLSHGGRFIQYNIFGNIFEVTAKYKPPIMPIGKGAYGIVCSALNSETSEHVAIKKIANAFDNKVDAKRTLREIKLLRHMDHENVVAIRDIIPPPLRDSFNDVYIAYELMDTDLHQIIRSNQGLSEEHCQYFLYQILRGLKYIHSANVLHRDLKPSNLLLNANCDLKICDFGLARVTSETDFMTEYVVTRWYRAPELLLNSSDYTTAIDVWSVGCIFMELMDRKPLFPGRDHVHQLRLLMELIGTPSEAELGFLNENAKRYIRQLPQYTRQSIPGKFPHVHPLAIDLVEKMLTFDPRQRITVEDALAHPYLNSLHDISDEPVCMTPFSFDFEQHALSEEQMRELIYREALAFNPEYQQG

SEQ ID NO: 141998 - DNA, 1113 bp, Saccharum officinarum; identical to SEQ ID NO: 140198
  CDS (1)..(1113)

SEQ ID NO: 141999 - protein, 370 aa, Saccharum officinarum; identical to SEQ ID NO: 140199

SEQ ID NO: 142000 - DNA, 1068 bp, Verticillium dahliae
  CDS (1)..(1068)
atgtcgcgcagcaacgcccctaatccctcgggatcccgcaaaatctccttcaacgtcagcgagcagtacgacattcaggatgtcgttggagagggcgcctacggtgtcgtctgctcggcgatacacaagccttcgggccagaaggtcgccatcaagaagatcactcctttcgaccactccatgttctgtctgcggaccctgcgtgagatgaagcttctgaggtacttcaaccacgagaacatcatctccatcctcgacattcagaagccccgcggctacgacacgttcaacgaggtgtacctcatccaggaactcatggagacggacatgcaccgcgtcatccgcacccaggacctctccgatgaccactgccagtacttcatctaccagacgctgcgcgccctcaaggcgatgcactcggccaacgtcctccaccgtgatctcaagccctcgaacctgctcctcaacgccaactgcgacctgaaagtgtgcgactttggcctcgcgcgatcggcggcgtcgcaggaggacaactcgggcttcatgacggaatacgtcgcgacacgatggtaccgcgcgcccgagatcatgttgacgttcaaggagtacaccaaggccatcgacgtgtggtccgtcggctgcatcctcgccgagatgctcagcggcaagcccctgttcccgggcaaggactaccaccaccagctgacgctcatcctcgacgtgctcggcacgccgacgatggaggactactacggcatcaagtgccgccgcgcgcgcgagtacatccgctcgctgccgttcaagaagaaggtgccgttccgcacgctgttccccaagacgtcggacctcgcgctcgacctgctcgagaagctgctggccttcaaccccgtcaagcgcatcacggtcgaggaggcgctcaagcacccgtacctcgagccgtaccacgacccggatgacgagcccacggcgccgcccatccccgaggagtttttcgactttgacaagcacaaggacacgctgagcaaggagcagctgaagcagctgatctaccaggagattatgcggtag

SEQ ID NO: 142001 - protein, 355 aa, Verticillium dahliae
MSRSNAPNPSGSRKISFNVSEQYDIQDVVGEGAYGVVCSAIHKPSGQKVAIKKITPFDHSMFCLRTLREMKLLRYFNHENIISILDIQKPRGYDTFNEVYLIQELMETDMHRVIRTQDLSDDHCQYFIYQTLRALKAMHSANVLHRDLKPSNLLLNANCDLKVCDFGLARSAASQEDNSGFMTEYVATRWYRAPEIMLTFKEYTKAIDVWSVGCILAEMLSGKPLFPGKDYHHQLTLILDVLGTPTMEDYYGIKCRRAREYIRSLPFKKKVPFRTLFPKTSDLALDLLEKLLAFNPVKRITVEEALKHPYLEPYHDPDDEPTAPPIPEEFFDFDKHKDTLSKEQLKQLIYQEIMR

SEQ ID NO: 142002 - DNA, 1737 bp, Triticum aestivum
  CDS (1)..(1737)
atggggggagggaacggcatcgtcgacggcttccgccgcttgttccaccgccgcacgccctccggctccgtgctcggcagttccaaccagtcctccgccggcgaggactcctccgacgtcgaggccgccgagggcctggatctcgtgggcctccgctccatccgcgtccccaagcgcaagatgccgctccccgtcgagagccacaagaagaacataatggagaaagaattcttcacagagtatggagaggcaagccagtaccaaatccaagaagttgttggcaaggggagttatggagtagttgctgctgcaatagatacccgcaccggcgagcgggttgcgattaagaagatcaatgacgtgtttgagcacgtctcggatgccacacgcatcctccgcgaggtcaagctccttcggctgctacgtcatccagacgtggtagagatcaagcacataatgctccccccttctcggagggagttccaagatatatatgttgttttcgagctgatggagtcagatctccatcaggtcatcagagcgaatgatgacctcacagctgagcattaccagtttttcctttaccagcttctccgcgctctcaagtacatccatggggctaatgtatttcatcgcgatctgaagcccaagaatatactggccaacgcagactgcaaactgaaaatttgtgactttggacttgcgcgtgtatcatttaatgatgctccttcagctatattttggacggattatgtagcaacaaggtggtacagggcccctgaattatgtggctcctttttctcgaaatacactcctgctattgatatttggagtattggatgcatatttgccgagcttctcactggacggccactctttcctgggaagaatgtcgtacaccagttagatataataacagatcttcttggaactccatcatcagaaaccttatctcggattcgaaatgagaaggccaggaggtacttaagttgcatgcgaaaaaaacaccctgtacccttgactcagaaatttcctaatgctgatccattggcggttcgcctactgggtcgtttacttgcatttgatcctaaagaccggccttcagctgaagaggctttagcagacccatattttgcatctcttgccaatgtggagcgtgagccttcaaggcatccaatttcgaaacttgagtttgagtttgagagacgaaaggtgacaaaagatgatgttagggaattgatctatcgagagattttggagtaccatccacagatgctggaggaatacatgaaaggtggagaccagattagcttcctctatccaagtggtgttgaccgctttaaacggcagtttgcacacctggaggagcattacagcaaaggagaacgaggttctccgctgcaaagaaagcatgcctctttaccaaggcagagggtaggtgcatcgaacgacggtaataatgagcagcatattagtgatcaggagatgagtgcagagcctgatgcccatggtgcagtgagccctcaaaagtcacaggatgcacccggtgttggccagaatggtctgagccccaccagcttgagctcgcggacctacctcaagagcgcgagcattagcgcttccaagtgcgtcgttgtcaacccgaataaacagccagagtatgacgacgcgatctctgaggaaacagaaggagccgtcgatggactatccgagaaggtctcaaagatgcatgcctag

SEQ ID NO: 142003 - protein, 578 aa, Triticum aestivum; identical to SEQ ID NO: 140523

SEQ ID NO: 142004 - DNA, 1737 bp, Triticum aestivum
  CDS (1)..(1737)
atggggggagggaacggcatcgtcgacggcttccgccgcttgttccaccgccgcacgccctccggctccgtgctcggcagttccaaccagtcctccgccggcgaggactcctccgacgtcgaggccgccgagggcctggatctcgtgggcctccgctccatccgcgtccccaagcgcaagatgccgctccccgtcgagagccacaagaagaacataatggagaaagaattcttcacagagtatggagaggcaagccagtaccaaatccaagaagttgttggcaaggggagttatggagtagttgctgctgcaatagatacccgcaccggcgagcgggttgcgattaagaagatcaacgatgtgtttgagcacgtctcggatgccacgcgcatcctccgcgaggtcaagctccttcggctgctacgtcatccagacgtggtggagatcaagcacataatgctccctccttctcggagggagttccaagatatatatgttgttttcgagctcatggagtcggatctccatcaggtcatcagagctaatgatgacctcacggcggagcattaccagtttttcctttaccagcttctccgcgctctcaagtacatccatggagctaatgtatttcatcgcgatctgaagcccaagaatatactggccaacgcagactgcaaactgaaaatttgtgactttggacttgcgcgtgtatcatttaatgatgctccttcagctatattttggacggactatgtagcaacaaggtggtatagagcccctgaattatgtggctcctttttctcgaaatacactcctgctattgatatttggagtattggatgcatatttgctgagcttctcactggacggccactctttcctgggaagaatgtcgtacaccagttagatataataacagatcttcttggaactccatcatcagaaaccttatctcggattcgaaatgagaaggccaggaggtacttaagttgcatgcgaaaaaaacaccctgtacccttgactcagaaatttcctaatgctgatccattggcggttcgcctactgggtcgtttacttgcatttgaccctaaagaccggccttcagctgaagaggctttagcagacccatattttgcatctcttgccaatgtggagcgtgagccatcaaggcatccaatttcgaaactcgagtttgagtttgagagacgaaaggttacaaaagatgatgttagggaattgatctatcgagagattttggagtaccatccacagatgctggaggaatacatgaaaggtggagaccagattagcttcctctatccaagtggtgttgaccgctttaaacggcagtttgcacacctggaggagcattacagcaaaggagaacgaggttccccgctgcaaagaaagcatgcttctctaccaaggcagagagtaggtgcatcaaacgacggtaataatgaacagcatattagtgatcaggagatgagtgcagagcctgatgcccatggcacagtgagccctcaaaagtcacaggatgcagccggtgttggccagaatggtctgagccctaccagcttgagctcgcggacctacctcaagagcgcgagcattagtgcttccaagtgcgtcgttgtcaacccgaataaacagccagagtatgacgacgcgatctctgaggaaacggaaggggccgtcgacggactatccgagaaggtctccaagatgcatgcctag

SEQ ID NO: 142005 - protein, 578 aa, Triticum aestivum
MGGGNGIVDGFRRLFHRRTPSGSVLGSSNQSSAGEDSSDVEAAEGLDLVGLRSIRVPKRKMPLPVESHKKNIMEKEFFTEYGEASQYQIQEVVGKGSYGVVAAAIDTRTGERVAIKKINDVFEHVSDATRILREVKLLRLLRHPDVVEIKHIMLPPSRREFQDIYVVFELMESDLHQVIRANDDLTAEHYQFFLYQLLRALKYIHGANVFHRDLKPKNILANADCKLKICDFGLARVSFNDAPSAIFWTDYVATRWYRAPELCGSFFSKYTPAIDIWSIGCIFAELLTGRPLFPGKNVVHQLDIITDLLGTPSSETLSRIRNEKARRYLSCMRKKHPVPLTQKFPNADPLAVRLLGRLLAFDPKDRPSAEEALADPYFASLANVEREPSRHPISKLEFEFERRKVTKDDVRELIYREILEYHPQMLEEYMKGGDQISFLYPSGVDRFKRQFAHLEEHYSKGERGSPLQRKHASLPRQRVGASNDGNNEQHISDQEMSAEPDAHGTVSPQKSQDAAGVGQNGLSPTSLSSRTYLKSASISASKCVVVNPNKQPEYDDAISEETEGAVDGLSEKVSKMHA

SEQ ID NO: 142006 - DNA, 1068 bp, Verticillium dahliae
  CDS (1)..(1068)
atgtcgcgcagcaacgcccctaatccctcgggatcccgcaaaatctccttcaacgtcagcgagcagtacgacattcaggatgtcgttggagagggcgcctacggtccgcccagctcggcgatacacaagccttcgggccagaaggtcgccatcaagaagatcactcctttcgaccactccatgttctgtctgcggaccctgcgtgagatgaagcttctgaggtacttcaaccacgagaacatcatctccatcctcgacattcagaagccccgcggctacgacacgttcaacgaggtgtacctcatccaggaactcatggagacggacatgcaccgcgtcatccgcacccaggacctctccgatgaccactgccagtacttcatctaccagacgctgcgcgccctcaaggcgatgcactcggccaacgtcctccaccgtgatctcaagccctcgaacctgctcctcaacgccaactgcgacctgaaagtgtgcgactttggcctcgcgcgatcggcggcgtcgcaggaggacaactcgggcttcatgacggaatacgtcgcgacacgatggtaccgcgcgcccgagatcatgttgacgttcaaggagtacaccaaggccatcgacgtgtggtccgtcggctgcatcctcgccgagatgctcagcggcaagcccctgttcccgggcaaggactaccaccaccagctgacgctcatcctcgacgtgctcggcacgccgacgatggaggactactacggcatcaagtcgcgccgcgcgcgcgagtacatccgctcgctgccgttcaagaagaaggtgccgttccgcacgctgttccccaagacgtcggacctcgcgctcgacctgctcgagaagctgctggccttcaaccccgtcaagcgcatcacggtcgaggaggcgctcaagcacccgtacctcgagccgtaccacgacccggatgacgagcccacggcgccgcccatccccgaggagtttttcgactttgacaagcacaaggacacgctgagcaaggagcagctgaagcagctgatctaccaggagattatgcggtag

SEQ ID NO: 142007 - protein, 355 aa, Verticillium dahliae
MSRSNAPNPSGSRKISFNVSEQYDIQDVVGEGAYGPPSSAIHKPSGQKVAIKKITPFDHSMFCLRTLREMKLLRYFNHENIISILDIQKPRGYDTFNEVYLIQELMETDMHRVIRTQDLSDDHCQYFIYQTLRALKAMHSANVLHRDLKPSNLLLNANCDLKVCDFGLARSAASQEDNSGFMTEYVATRWYRAPEIMLTFKEYTKAIDVWSVGCILAEMLSGKPLFPGKDYHHQLTLILDVLGTPTMEDYYGIKSRRAREYIRSLPFKKKVPFRTLFPKTSDLALDLLEKLLAFNPVKRITVEEALKHPYLEPYHDPDDEPTAPPIPEEFFDFDKHKDTLSKEQLKQLIYQEIMR

SEQ ID NO: 142008 - DNA, 1674 bp, Oryza sativa subsp
  CDS (1)..(1674)
atggggtgcgtcttcgggcgcccgtcgtcgtcgccaccggcggcggcggcgaggaaggggaggaggaagaagaggtcgtccccgatgccggcaccctccacggactctcccgcggcggaccagtccccggggaggggaaggccgcgccggaggctgggacgcaagccggggcccaggcaggggtgcgtccccgcgccagcggccgcagagcagctcgccgcggggtggccgccgtggctcgtcgccgtcgccggggaggccctccgcgggtggacgccccgccgcgccgacaccttcgagaagctcaacaagatagggtcgggcacctatagcaacgtgtaccgcgcgagggacaccgtctccggccgcatcgtggcgctgaagaaggtccggttcgacaatctcgagcccgagagcgtcaaattcatggccagggagatcctgatcctgaggaaactcgaccatcccaatgttatcaagctggaggggttggtcacgtcgaggatgtcatgcagcctgtacctggtgttcgagtatatggagcatgaccttgctggcctggcagcgagcccggacgtcaagtttactctgccgcagataaaatgctatgtgcagcagctattgtcagggcttgagcattgccacaataataatgtattgcatcgggatatcaagggatcaaacttattgttggataacaatgggattcttaagatcgccgactttggcctggcaacattctttgacccacgacataaacgaccaatgacgagccgcgtggtcacgttgtggtaccggccacctgaattgttgttgggggcgacagactatggtgttggtgtggatttgtggagtgccgggtgcattctggcagagctcttgcatgggaagcccatcatgcctgggcgtactgaggtagaacagttgcacaagattttcaagctatgtggctccccctcagaggagtattggaaaaagtccaagctgccacatgctacaatattcaaacctcagcagccctataagcgttgtatcagagaagcatttaaagattttcctccatcttccttgccgttggttgaaactctgcttgcaattgatccagctgagcgccaaactgctacatctgccttgcaaagtgaattctttgcaactgagccttatgcatgtgatccatcaagcttgccgacatatccaccaagtaaggagatggatgctaagatgagagatgaggaagctagaaggctacgagcagctgcaaaggccaaaggagagggggtaaaaaggactcgaacgcgggatcgatctcaaagggcaggaccagctccagaggctaatgcagagcttcaagcaaacctagataggcgacgcatgataacgcatgccaatgccaagagcaaaagtgagaagttccccccacctcatcaggatggagctatgggtaacccattgggatccagtcgtcatatggaacctatgtatgagcaccaggatgcttccttcagcacagtagtccccatccagaaggggtcctcacaaacatggtctggaccattggttgatccagcagctctagggcaatcgaggcggaagaagcaaactgccctagatgcgaaggctgcagcttattcaaagcagctccagaaggacaagggcggaacaagagcacgataa

SEQ ID NO: 142009 - protein, 557 aa, Oryza sativa subsp
MGCVFGRPSSSPPAAAARKGRRKKRSSPMPAPSTDSPAADQSPGRGRPRRRLGRKPGPRQGCVPAPAAAEQLAAGWPPWLVAVAGEALRGWTPRRADTFEKLNKIGSGTYSNVYRARDTVSGRIVALKKVRFDNLEPESVKFMAREILILRKLDHPNVIKLEGLVTSRMSCSLYLVFEYMEHDLAGLAASPDVKFTLPQIKCYVQQLLSGLEHCHNNNVLHRDIKGSNLLLDNNGILKIADFGLATFFDPRHKRPMTSRVVTLWYRPPELLLGATDYGVGVDLWSAGCILAELLHGKPIMPGRTEVEQLHKIFKLCGSPSEEYWKKSKLPHATIFKPQQPYKRCIREAFKDFPPSSLPLVETLLAIDPAERQTATSALQSEFFATEPYACDPSSLPTYPPSKEMDAKMRDEEARRLRAAAKAKGEGVKRTRTRDRSQRAGPAPEANAELQANLDRRRMITHANAKSKSEKFPPPHQDGAMGNPLGSSRHMEPMYEHQDASFSTVVPIQKGSSQTWSGPLVDPAALGQSRRKKQTALDAKAAAYSKQLQKDKGGTRAR

SEQ ID NO: 142010 - DNA, 1098 bp, Aspergillus oryzae
  CDS (1)..(1098)
atggcggaattcgtgcgtgcccagatcttcggcacgaccttcgagatcacgagcaggtatacagaactgcagcccgtgggaatgggtgcgttcggcctcgtgtgttcggcgagggaccaattgaccggacagcccgtcgccgttaagaagattatgaaaccttttagtaccccagttttatccaagagaacataccgcgaactgaaactattgaagcacttgcgccacgaaaatatcatcagcctaagtgatattttcatttctcccctcgaagacatctatttcgtaaccgagctcctgggtaccgacctccacagacttctcacatcaaggccgttggagaaacaattcatccagtatttcttataccagatcttgcgaggacttaaatatgtgcactcagcaggcgttgtgcatcgcgatcttaagccgagtaatatccttatcaacgaaaactgtgacctgaaaatttgcgattttggtctcgcccgtatccaagaccctcagatgacaggctacgtgtcgacgcgatactaccgtgcgcctgagattatgctcacatggcaaaagtatgatgtggaggtggacatctggagcgccgcctgtattttcgccgagatgctggaaggaaagcctctgttccccggcaaggatcatgtgaaccaattctccattatcacagagcttcttggtactccaccggacgacgtgattgagacaatttgtagtgagaatactttgcgattcgtcaagtctctccctaagcgcgaacgtcaacctctcgccaccaaattcaagaacgctgacccggatgcggttgaccttctcgagcggatgctggtatttgacccgaagaagagaattcgcgcgggtgaggcgctggcacacgagtaccttgctccgtaccacgaccccaccgatgagcctgtggcagaagagaagttcgattggtcattcaacgatgctgacctaccggtagacacctggaagatcatgatgtactcggaaattctcgacttccataatatcgatcagggtaccgaggcgagccaagtcctcgttgagggagctggcgatgcccagcaaaattttgtataa

SEQ ID NO: 142011 - protein, 365 aa, Aspergillus oryzae
MAEFVRAQIFGTTFEITSRYTELQPVGMGAFGLVCSARDQLTGQPVAVKKIMKPFSTPVLSKRTYRELKLLKHLRHENIISLSDIFISPLEDIYFVTELLGTDLHRLLTSRPLEKQFIQYFLYQILRGLKYVHSAGVVHRDLKPSNILINENCDLKICDFGLARIQDPQMTGYVSTRYYRAPEIMLTWQKYDVEVDIWSAACIFAEMLEGKPLFPGKDHVNQFSIITELLGTPPDDVIETICSENTLRFVKSLPKRERQPLATKFKNADPDAVDLLERMLVFDPKKRIRAGEALAHEYLAPYHDPTDEPVAEEKFDWSFNDADLPVDTWKIMMYSEILDFHNIDQGTEASQVLVEGAGDAQQNFV

SEQ ID NO: 142012 - DNA, 1113 bp, Brassica napus; identical to SEQ ID NO: 63107
  CDS (1)..(1113)

SEQ ID NO: 142013 - protein, 370 aa, Brassica napus; identical to SEQ ID NO: 63108

SEQ ID NO: 142014 - DNA, 1176 bp, Glycine max
  CDS (1)..(1176)
atggaaggtggaggagctgctccgccggccgacaccgtgatgtccgacgcggcgcctccgccgcagcaagcgatggctatggggatcgagaatattccggcgacgctgagccacggtggcaggttcatccaatacaacatattcggaaacatattcgaagtcaccgccaaatacaagccacccatcatgcccatcggaaaaggcgcatacggcatcgtttgctcggctttgaactcggagacgaatgagcacgttgccatcaagaagattgcgaatgcgtttgataacaagattgatgcaaagaggaccctccgtgaaatcaagctgcttcgtcacatggatcatgaaaacgtggttgcaatcagggatatagtgccaccacctcaaagggagatattcaatgatgtttacattgcatatgagttgatggacactgaccttcaccaaattattcgttcaaaccaaggattatcagaggagcactgtcagtattttctgtatcaaatcctccgtgggttgaagtacatacattctgccaatgttctgcatagggacttaaaacctagcaaccttctcctgaatgccaactgtgacttaaaaatttgtgattttggactggctcgtgtcacgtctgaaactgattttatgactgaatatgttgttacaagatggtaccgtgcaccagagcttctgttgaactcttctgattacactgcagcaattgatgtatggtctgttggttgtattttcatggaactgatggatcgcaagcctttgtttcctggcagagatcatgtgcatcagttgcgtctacttatggagctgattggcaccccatcagaggctgatttggggttcctgaatgaaaatgctaagagatacattaggcaactacccctttaccgccgtcaatctttccaggaaaagtttccacatgtccatcctgaagctatagatcttgttgaaaaaatgttaacttttgatcctagaaaaaggattactgttgaagatgcactggcgcacccgtacttgacatctctgcatgacatcagtgatgaaccagtgtgcatgactcccttcaactttgactttgaacaacatgctttgacggaggaacagatgaaagaactgatataccgagaggctctagcatttaaccctgagtatcagcagtag

SEQ ID NO: 142015 - protein, 391 aa, Glycine max; identical to SEQ ID NO: 140211

SEQ ID NO: 142016 - DNA, 1116 bp, Glycine max
  CDS (1)..(1116)
atggccggagttaatccgaacggcgtcgccgattttccggcgactccaacgcacggcggacagttcattcagtacaacatattcggaaacctcttcgaggttacggcgaagtaccgtcctccgatcatgcctgtcggacgcggcgcgtatggaatcgtttgctcgctgttgaataccgagacgaatgagctggtggcggttaagaagatagcgaacgctttcgacaatcacatggacgctaagcgtacgcttcgtgagattaagcttcttaggcatttggatcatgaaaatgtaattggtttgagagatgtaattcctccacccttgcgtagagagtttaatgatgtctacatagccactgaactcatggatactgatcttcaccatatcattcgctccaatcaaaatctgtcagaggagcactctcaatacttcttgtaccagattcttcgtgggcttaagtatatacattctgcaaacgtaatccatagagatttaaaaccaagcaacctgctgctaaactcaaattgtgacttgaagattatttattttggtcttgcgagaccaactttggaaagtgacttcatgacagaatatgtagtcacaagatggtacagagctcccgaattgttgttgaattcctctgattacacctctgctatagatgtgtggtctgttggttgcatctttatggagcttatgaataaaaagcctctgtttccgggcaaagaccatgtgcatcagatgcgcttattgacagagcttcttggtaccccaactgaggctgaccttgggttagtgaaaaatgaagatgcaagaagatatatcagacaacttcctcaatatcctcgccaacctttagctcaagtcttcccccatgttcatccggcagccattgatcttgttgataaaatgttgacagttgatcccaccaaaagaattacagttgaagaagcactagcccatccataccttgaaaaactgcatgatgtagctgatgaaccaatctgcatggagccattttcatttgattttgagcaacaacaattggatgaagagcaaataaaagagatgatctacagggaagcattagcactcaatcctgagtatgcttaa

SEQ ID NO: 142017 - protein, 371 aa, Glycine max
MAGVNPNGVADFPATPTHGGQFIQYNIFGNLFEVTAKYRPPIMPVGRGAYGIVCSLLNTETNELVAVKKIANAFDNHMDAKRTLREIKLLRHLDHENVIGLRDVIPPPLRREFNDVYIATELMDTDLHHIIRSNQNLSEEHSQYFLYQILRGLKYIHSANVIHRDLKPSNLLLNSNCDLKIIYFGLARPTLESDFMTEYVVTRWYRAPELLLNSSDYTSAIDVWSVGCIFMELMNKKPLFPGKDHVHQMRLLTELLGTPTEADLGLVKNEDARRYIRQLPQYPRQPLAQVFPHVHPAAIDLVDKMLTVDPTKRITVEEALAHPYLEKLHDVADEPICMEPFSFDFEQQQLDEEQIKEMIYREALALNPEYA

SEQ ID NO: 142018 - DNA, 1110 bp, Chorispora bungeana
  CDS (1)..(1110)
atgaacgccggcggccagttcacagatttcccggcggtgcaaactcatggaggacagttcataagttacgatatcttcggtagtctattcgagatcacatccaagtatcgccctccgatcataccaatcggccgcggcgcatatggaatcgtatgctccgtgttggattcggagacgaacgagctggtggcgatgaagaagatagcgaacgccttcgataatcacatggacgccaagcgtacacttcgcgagatcaagctccttcgccatctagatcatgaaaacattatagctataagagatgtggttcctccaccacttagaagacagttcagtgatgtttatattgcgactgaactaatggacactgatcttcatcaaatcatcagatccaaccagagtttgtcagaggagcactgtcagtacttcttgtaccagcttcttcgagggctcaagtacatccactcggctaacgttattcacagggatttaaagccaagcaatcttctcctgaacgcaaattgcgatttaaagatctgcgatttcggtcttgctagaccaacttcagagaacgagtttatgacggagtacgtcgtcaccagatggtatagagcacctgagcttctgttgaactcctcagagtacacagctgctatagatgtttggtctgttggttgtatctttatggagctcatgaaccgaaagcctttgttccccggtaaagaccatgtccatcaaatgcgtttattgacagagttgcttggcacaccgacagaatctgatctcggttttacgcataatgaggatgcaaaacgatacatccggcaacttcccagcttccctcgccaacctttagccaaacttttctctcatgtaaacccattggccattgatctagttgacagaatgttgacatttgaccccaacagaagaatcactgttgaagaagctctgaaccaccagtacctagccaaattgcacgacccaaatgatgagccaatctgtcaaaagccattctcttttgagttcgaacaacagcctatggacgtggaacagataaaagagatgatctacaaagaagccattgcactcaatccaacatatggttag

SEQ ID NO: 142019 - protein, 369 aa, Chorispora bungeana
MNAGGQFTDFPAVQTHGGQFISYDIFGSLFEITSKYRPPIIPIGRGAYGIVCSVLDSETNELVAMKKIANAFDNHMDAKRTLREIKLLRHLDHENIIAIRDVVPPPLRRQFSDVYIATELMDTDLHQIIRSNQSLSEEHCQYFLYQLLRGLKYIHSANVIHRDLKPSNLLLNANCDLKICDFGLARPTSENEFMTEYVVTRWYRAPELLLNSSEYTAAIDVWSVGCIFMELMNRKPLFPGKDHVHQMRLLTELLGTPTESDLGFTHNEDAKRYIRQLPSFPRQPLAKLFSHVNPLAIDLVDRMLTFDPNRRITVEEALNHQYLAKLHDPNDEPICQKPFSFEFEQQPMDVEQIKEMIYKEAIALNPTYG

SEQ ID NO: 142020 - DNA, 1350 bp, Nilaparvata lugens
  CDS (1)..(1350)
atggctgttgtagggcccagtcgtcactcaagagtgcccgttagcatgcctttaatgcagggaacaggagctactagctctgcaggacatcagcaggctattttagcagctgcgcagccctactatcatcctcaacatgctcaccaggctccggcagctactgcacagaatgtgcagcccgacagacccattggatatggagctttcggcgttgtttgggcagtgacagacccccgtgatggctgccgagtggccctcaaaaaactgcccaaagttttccactcactcgtctcatcgaagcgagttttccgggaactaaaaatgctctgcttcttcaaacacgaaaacgttctctccgccttggacattctacaaccacctcatttagacttcttccaggaaatttacgtgattactgagctgctgcaaagtgatctgcacaaaatcatcgtttcgccgcaacatctgtctgccgatcacatcaaagtctttctctaccaaatattgagaggtctgaagtacctccattcagccagaatcctacacagagacatcaagccaggaaaccttttggttaacagcaattgtgtactaaagatctgcgactttggcctggccagggtggaggagccagaccaatgcaaaaagatgacccaggaggtggtgacccaatactacagggcgcccgagatcctgatgggagctcgccactacagcgctgccgtcgacgtgtggagtgtcggctgcattttcggcgaactgctcggtcggcgaattctgtttcaggcgcagagtcctgtgcagcagttggagttgatcaccgacctgctggggactccgtcgctggacgacatgcgtcacgcgtgtgagggcgcacgcacgcacatgttgcgtcaacgcgtcaaacccccctccctcactgccctctacacgctctcatcgcaggccacacacgaggccgttcatttactctgtcagatgttggtgttcgacccggacaagcgcatcacagtgatggacgccctggcgcacccctacctggacgagggcagactgcgctaccactcgtgcatgtgcaagtgctgctacaccaactcggccaacagtctgcgtcagtttacgcccgacttcgagcccaagacgccgcacgccttcgacgacctctgggagaagaagctcacctcggtgcagcaggtcaaagaagagatgtacaagtttatagtggagcagctgaacacccggcgcgtgccactgtgcatcaacccgcagtcggccgcctttaagagttttgccagttcaacggtggcacacccctctgagctgcccccctcgccacaccaatgggagtga

SEQ ID NO: 142021 - protein, 449 aa, Nilaparvata lugens
MAVVGPSRHSRVPVSMPLMQGTGATSSAGHQQAILAAAQPYYHPQHAHQAPAATAQNVQPDRPIGYGAFGVVWAVTDPRDGCRVALKKLPKVFHSLVSSKRVFRELKMLCFFKHENVLSALDILQPPHLDFFQEIYVITELLQSDLHKIIVSPQHLSADHIKVFLYQILRGLKYLHSARILHRDIKPGNLLVNSNCVLKICDFGLARVEEPDQCKKMTQEVVTQYYRAPEILMGARHYSAAVDVWSVGCIFGELLGRRILFQAQSPVQQLELITDLLGTPSLDDMRHACEGARTHMLRQRVKPPSLTALYTLSSQATHEAVHLLCQMLVFDPDKRITVMDALAHPYLDEGRLRYHSCMCKCCYTNSANSLRQFTPDFEPKTPHAFDDLWEKKLTSVQQVKEEMYKFIVEQLNTRRVPLCINPQSAAFKSFASSTVAHPSELPPSPHQWE

SEQ ID NO: 142022 - DNA, 885 bp, Saccharum officinarum
  CDS (1)..(885)
atggagcagtacgagaaggtggagaagatcggggagggcacgtacggggtggtgtacaaggggctggacaaggccaccaacgagacgatcgcgctcaagaagatccgcctcgagcaggaggacgagggcgtcccgtccaccgccatccgcgagatctctctcctcaaggagatgaaccacgacaacatcgtcaggttacatgatgttatccacagcgagaagcgcatatatcttgtcttcgagttcctggatctggacctgaagaagttcatggactcttgcccggagtttgctaagaatcccactttgattaagtcatacctctaccagatactccgtggtgttgcttactgccattctcatagatttcttcatcgagatttgaaacctcagaacttattgatagatcggcgtactaatacactgaagcttgcagactttggtttatccagggcatttggaattcctgtccgtacattcactcatgaggtagtgacattatggtacagagctccagaaattctgcttggagcgaaacagtattccacaccagtcgatgtatggtctgtgggctgtatctttgcggaaatggtgaaccaaaagccactattccctggtgattctgagatcgacgaactgtttaagatattcagggtactaggtacaccaaatgaacaaagttggccaggagtcagttgtttgcctgacttcaagactgctttccccaggtggcaggctcaggacctggcaacaattgtcccaaatcttgaacctgctggtttggaccttctctcgaaaatgcttcgatacgagccaagcaaaagaatcacagctaggcaagcacttgagcatgagtacttcaaggaccttgaaatggtacagtga

SEQ ID NO: 142023 - protein, 294 aa, Saccharum officinarum; identical to SEQ ID NO: 62924

SEQ ID NO: 142024 - DNA, 1506 bp, Brassica napus
  CDS (1)..(1506)
atggatcctcataaaaaggttacactggagacggagttctttacagaatacggtgaagcgagtcggtatcagatccaagaagttatagggaaaggaagttacggggttgtggcatctgcaatcgacactcacacgggagaaaaggttgccattaagaaaatcaatgatgtctttgagcacgtctctgatgctacgaggattctgagagagatcaagctcctcaggctgctcaggcatcctgatatagtggagattaagcacgttatgcttcctccttcgcgtagagagttcagagatatttatgttgtttttgagctcatggagtcagaccttcaccaagtcatcaaagccaacgatgatttgacccctgagcattaccagtttttcttgtaccagcttctccgtggcctgaagtttattcacacagccaatgtgtttcaccgtgatttaaagcctaaaaacattctagccaactctgattgcaagctgaagatttgcgactttggacttgcacgtgtgtcgtttaacgatgcaccttctgctatattctggactgactatgtcgctacaagatggtaccgtgcaccagaactttgtggctctttcttctccaaatatactcctgccattgatatatggagcataggatgcatatttgcagaaatgctcaccgggaagccattgtttcctgggaagaacgtggtgcaccaattggatattatgactgatttgcttggtactccttcacccgaagcgatctcaaggatccgtaatgaaaaggcgaggagatatctgggcaacatgaggagaaaaccgccagttccattcactcacaaatttcctcatgtagacccgttggctcttcgcttgctgcaccgccttcttgcatttgatcccaaagaccgtcctacagctgaagaggcactggcagatccttacttttatggactggcaaacgtggatcgggaaccatctactcaaccgattccaaaacttgagtttgagtttgaaagaaggaagattatgaaagaagatgtcagggagttaatctacagagagatattagagtatcatcctcggatgctacaagaatatcttcgaggtggagaacagacgagcttcatgtaccctagtggtgttgatcggtttaagagacagtttgcacatcttgaagaacattacggtaagggtgagagaagcgctcctcttcaacaacgccacgcttctttgcctagagagagagtccctgcgcctaaggaagagaacagacctgcagctactttagccaccacacccgaaagccctcagagttctcaacacgagggctcaaattacatgaatgggatgagccagacgggttacagtgcccggagcttgctgaaaagtgccagcatcagtgcatctaaatgcattggcgtgaaacaaaggaaccagtccgagcacggggaatcgaacagtgatgcaactgatgctttgtctcaaaaggccgcggctctccacacttga

SEQ ID NO: 142025 - protein, 501 aa, Brassica napus
MDPHKKVTLETEFFTEYGEASRYQIQEVIGKGSYGVVASAIDTHTGEKVAIKKINDVFEHVSDATRILREIKLLRLLRHPDIVEIKHVMLPPSRREFRDIYVVFELMESDLHQVIKANDDLTPEHYQFFLYQLLRGLKFIHTANVFHRDLKPKNILANSDCKLKICDFGLARVSFNDAPSAIFWTDYVATRWYRAPELCGSFFSKYTPAIDIWSIGCIFAEMLTGKPLFPGKNVVHQLDIMTDLLGTPSPEAISRIRNEKARRYLGNMRRKPPVPFTHKFPHVDPLALRLLHRLLAFDPKDRPTAEEALADPYFYGLANVDREPSTQPIPKLEFEFERRKIMKEDVRELIYREILEYHPRMLQEYLRGGEQTSFMYPSGVDRFKRQFAHLEEHYGKGERSAPLQQRHASLPRERVPAPKEENRPAATLATTPESPQSSQHEGSNYMNGMSQTGYSARSLLKSASISASKCIGVKQRNQSEHGESNSDATDALSQKAAALHT

SEQ ID NO: 142026 - DNA, 1251 bp, Alternaria brassicicola; identical to SEQ ID NO: 140214
  CDS (1)..(1251)

SEQ ID NO: 142027 - protein, 416 aa, Alternaria brassicicola; identical to SEQ ID NO: 140215

SEQ ID NO: 142028 - DNA, 1107 bp, Papaver rhoeas
  CDS (1)..(1107)
atggctacttatgtcgaccccccaaatggaaccggctctccgggaaagcattattattcaatgtggcaaacggtgtttgagattgatacaaagtatgtacctattaaaccaattgggagaggagcttatggtatagtttgttcatcagtaaatagggaaacaaatgataaagtggcaattaagaagatccagaatgcttttgaaaatcgtattgatgccctcagaacattgcgggaattaaagctacttcggcatctacgacacgaaaatgtgattgctttgagagatgtaatgatgcctactcataggagaagcttcaaggatgtttatctggtgtatgaactaatggatacagatttgcatcaaattgtcaaatcctctcaacccctatctaatgaccactgccagtatttcttattccagttacttcgagggctgaagtatctccactctgcaaacatcctacatcgggatctcaagcctgggaaccttctcgtcaatgcaaactgtgacttgaagatctgtgatttcggattggctcgcacctgtagcggcaagggccaattcatgaccgaatacgttgtcactcgttggtatcgagcccctggactccttctttgctgcgacaattatggtacgtctattgatgtctggtccgttggatgcatctttgctgagcttctagggcgaaaacccatcttccctggcactgaatgcctcaaccaactcaaactgataatcaacgtccttggcagccaaagtgaggccgatctagagttcatcgacaacccaaaggccaggaagtatatcaaatctctcccttactcacctaagaccccctttgcacgtatctacccaaacgccagcccgttggctattgacctgctgcagaaaatgctcgtctttgatccatctaaaagaattagtgtgactgaagcacttcagcatccttacatgtcaccactctacgacccaaacgccgaccctcctgcacaggttccagtcgatctcgacatagatgaagaagatctaggagaagagacgataagggaaatgatgtggactgaaatgcttcattatcacccagaagccgtgtcatccaattaa

SEQ ID NO: 142029 - protein, 368 aa, Papaver rhoeas; identical to SEQ ID NO: 62926

SEQ ID NO: 142030 - DNA, 1212 bp, Papaver rhoeas
  CDS (1)..(1212)
atggatggaacccaagaagcagcagctactgatacggtgatgggagaggcaccatctggggttatagccggggaagggccacaaccaccgccagcatccgaaggtggtggtggtggtggaatggaaaatattccagcgaccctaagccatggtggcaaatttattcaatacaacatatttgggaatatttttgaggttactgctaaatacaaacctccaatcatgcccatcggcaaaggcgcctacggaatcgtttgttcggctttgaattctgagactagcgaacaagttgcaattaagaagattgcaaatgcttttgacaacaagattgatgccaaaaggactctacgcgagattaagcttcttcgccatatggatcatgaaaacgtagtggcaattagagatattataccaccacctgatcgaggtgcctttaatgatgtttatatcgcatatgagttgatggacactgatcttcatcagattattcgttcaaaccaagccttatccgaggagcattgtcagtattttttgtatcagatactccgtggattgaaatacatacactccgcgaatgttctgcatagggatctgaagcctagcaatcttctcctgaatgcgaattgtgatttaaagatttgtgactttggactagcacgcatcacttcggaaactgattttatgacagagtatgttgtaacaagatggtatcgagcaccagaactcttattgaactcatcagaatatactgctgctattgatgtgtggtctgtaggctgcattttcatggaattgatggaccgtaagcctctttttcccggtcgagatcatgtgcaccagctacgtttactgttggagcttatcggcactccgtctgaagctgacttgggatttgtgaatgataatgcaaagagatacatccgacagcttcctcgtcaccctcggcagtcacttactgagaagtttcctcatgttcatccctctgccattgatcttgttgaaaagatgctaacttttgaccctagagttaggattacagttgaagatgcattggctcatccatatctagcgaccttgcatgacattagtgatgagccagtgtgcatgactcctttcaattttgactttgagcaacacgcattgtcagaggaacagatgaaggaactcatttacagggaagcccttgcgtttaatcccgagtatcagccatag

SEQ ID NO: 142031 - protein, 403 aa, Papaver rhoeas
MDGTQEAAATDTVMGEAPSGVIAGEGPQPPPASEGGGGGGMENIPATLSHGGKFIQYNIFGNIFEVTAKYKPPIMPIGKGAYGIVCSALNSETSEQVAIKKIANAFDNKIDAKRTLREIKLLRHMDHENVVAIRDIIPPPDRGAFNDVYIAYELMDTDLHQIIRSNQALSEEHCQYFLYQILRGLKYIHSANVLHRDLKPSNLLLNANCDLKICDFGLARITSETDFMTEYVVTRWYRAPELLLNSSEYTAAIDVWSVGCIFMELMDRKPLFPGRDHVHQLRLLLELIGTPSEADLGFVNDNAKRYIRQLPRHPRQSLTEKFPHVHPSAIDLVEKMLTFDPRVRITVEDALAHPYLATLHDISDEPVCMTPFNFDFEQHALSEEQMKELIYREALAFNPEYQP

SEQ ID NO: 142032 - DNA, 1059 bp, Bipolaris oryzae
  CDS (1)..(1059)
atgccaccagcaggaagcggcagctccaggaaaatctccttcaacgtctcggagcagtacgacatccaagatgttgtaggagagggcgcatacggtgtcgtatgctccgctctgcacaagccctcgggccaaaaggttgccattaagaagatcacgccctttgatcactccatgttctgcttgagaacactgcgagagatgaagctgctgcgctacttcaaccacgaaaacatcatctccatcttggacatccaaaagccccgcaactacgagaccttcaccgaggtctacctaattcaggaactgatggagacggacatgcaccgtgtcatccgcacacaggagctgtccgacgaccactgccagtactttatctaccagaccctacgcgccctcaaggccatgcactctgcaaacgtcctccaccgcgatctcaagccctccaacctgctgctcaacgcaaactgcgatctcaaagtctgtgattttggtctcgctcgatccgccgcgtcgaccgaggacaactcgggtttcatgaccgaatacgttgccactcgttggtaccgtgcaccagagattatgcttaccttcaaggagtacacaaaagcaatcgacgtatggagtgtaggatgcatcctcgctgagatgctcagcggaaagcctcttttcccaggaaaggactaccaccaccagctcacactgatccttgacgtactcggtacgcctaccatggaggattactacggcatcaagtcccgccgagctcgcgaatacatccgatctctgcccttcaagaagaagatcccctggaaggccatgttccccaagacaaatgatttggctcttgacctgctcgagcgattactggctttcaacccagtcaagcgcatctccgtcgaggacgcgctcaagcacccataccttgagccctaccacgacccagatgacgagccgggcgcggaccccatcccagaggagttcttcgactttgataagaacaaggacaacctgaccaaggaacagttgaagctcctcatctaccaggagattatgcgataa

SEQ ID NO: 142033 - protein, 352 aa, Bipolaris oryzae
MPPAGSGSSRKISFNVSEQYDIQDVVGEGAYGVVCSALHKPSGQKVAIKKITPFDHSMFCLRTLREMKLLRYFNHENIISILDIQKPRNYETFTEVYLIQELMETDMHRVIRTQELSDDHCQYFIYQTLRALKAMHSANVLHRDLKPSNLLLNANCDLKVCDFGLARSAASTEDNSGFMTEYVATRWYRAPEIMLTFKEYTKAIDVWSVGCILAEMLSGKPLFPGKDYHHQLTLILDVLGTPTMEDYYGIKSRRAREYIRSLPFKKKIPWKAMFPKTNDLALDLLERLLAFNPVKRISVEDALKHPYLEPYHDPDDEPGADPIPEEFFDFDKNKDNLTKEQLKLLIYQEIMR

SEQ ID NO: 142034 - DNA, 1242 bp, Podospora anserina; identical to SEQ ID NO: 140216
  CDS (1)..(1242)

SEQ ID NO: 142035 - protein, 413 aa, Podospora anserina; identical to SEQ ID NO: 140217

SEQ ID NO: 142036 - DNA, 1083 bp, Lytechinus variegatus; identical to SEQ ID NO: 140218
  CDS (1)..(1083)

SEQ ID NO: 142037 - protein, 360 aa, Lytechinus variegatus; identical to SEQ ID NO: 140219

SEQ ID NO: 142038 - DNA, 1122 bp, Zea mays
  CDS (1)..(1122)
atggattcctccggcggcggcggcggtggagcgcagatcaagggtatggcgacgcacgggggccgctacgtgctgtacaacgtgtacggaaacctcttcgaggtctcctccaagtacgccccacccatccgccccatcggtcgcggcgcctacggcattgtctgcgcggctgtcaactcgcagtcaggggaggaggttgcgatcaagaaggttggcaatgcgttcgacaaccacatcgacgccaagcggacgctcagggaaatcaagctgctgcgccacatggaccatgagaacatccttgccttaaaggatgtaactcggcccccaactagagagaactttaatgacgtgtacattgttactgagttaatggatacagatctccatcagatcgtacgctcaaatcagccattgactgatgatcattgccagtacttcttgtatcagttgttacgagggctaaaatatgtgcactcagcaaatatattgcaccgcgatctgaagccgagcaatttgttcctaaatgcaaattgtgacctcaagattgcagactttgggcttgcaaggaccacttcagagacagatctcatgacagagtatgtggtcactcgttggtaccgggcaccagagctgctgttgaactgttcacagtatactgctgccattgatgtctggtcagttggatgcatactaggtgaaatcgttactcgtcaacccctgtttcctggacgggattacatccagcaattaaaattgatcactgagctcataggctctccagatgatgcaagcctgggatttcttcgaagtgataatgcaaaaagatacatgaaacaactaccacagtttccaagacaggacttccgcctgcgtttccgcaacatgtctcctggcgcagtcgatttgttggaaaggatgcttgtgtttgatccaagcagacggattacagttgatgaggctctgcatcatccatacttggcttcacttcatgagatcaatgatgaacctacctgccctgcacctttcagctttgattttgagcaaccatcctttacagaagcgcatataaaagaactcatctggagggaatctttagcatttaacccagagcctccctactaa

SEQ ID NO: 142039 - protein, 373 aa, Zea mays
MDSSGGGGGGAQIKGMATHGGRYVLYNVYGNLFEVSSKYAPPIRPIGRGAYGIVCAAVNSQSGEEVAIKKVGNAFDNHIDAKRTLREIKLLRHMDHENILALKDVTRPPTRENFNDVYIVTELMDTDLHQIVRSNQPLTDDHCQYFLYQLLRGLKYVHSANILHRDLKPSNLFLNANCDLKIADFGLARTTSETDLMTEYVVTRWYRAPELLLNCSQYTAAIDVWSVGCILGEIVTRQPLFPGRDYIQQLKLITELIGSPDDASLGFLRSDNAKRYMKQLPQFPRQDFRLRFRNMSPGAVDLLERMLVFDPSRRITVDEALHHPYLASLHEINDEPTCPAPFSFDFEQPSFTEAHIKELIWRESLAFNPEPPY

SEQ ID NO: 142040 - DNA, 1674 bp, Zea mays
  CDS (1)..(1674)
atgcagcacgaccagaagaagaaggcaccttcagagatggattttttcacagagtatggcgaaggcagcaggtacaagatagaagaggtcataggcaaaggcagctacggcgtggtttgctctgccgtggacactcatactggcgaaaaggtcgctataaagaagataaacgacatcttcgagcatgtgtctgatgcgacgcggatactccgggagatcaagctgcttaggctcctgcggcatccggatattgtggaaataaagcatatcttgctccctccgtcgaggagggagttcagggatatatatgttgtctttgaactcatggagtctgatctgcaccaagttataaaggctaacgatgacttgaccccagagcattaccagtttttcttgtatcaattgcttcgaggattgaaatacatacatacagcaaatgtatttcatcgagatctcaaaccaaaaaatattctggcaaatgctgattgtaagctcaaaatatgtgactttggcttagcaagagtagctttcaatgatactccaaccgccatcttttggacggattatgttgcaactaggtggtaccgagcaccagagctgtgtggatctttcttctccaagtatacaccggcgatagatatatggagtattggctgtatatttgcagaattgttaactggaaaacctcttttcccggggaaaaatgtggtacatcaacttgatataattacagatctccttggaacaccttctcccgaagcaatatcaaggattcgtaatgaaaaggccaggcgctacttgagcagtatgaggcgaaaaaagcctataccgtttacacaaaagttcccaaatgcagatccacttgcactatgtttgttagagcgaatgctcgcttttgagccaaaagacaggccaagtgctgaagaggctcttgctgatccttatttcaagaatatagccagtgtggatagagagccttctgcacaggctgtcacaaagcttgaatttgaattcgagaggcggagagttacaaaggaagacataagggagcttatatatagggaaattcttgagtatcatccaaagatgctgagggagtttcttgagggaactgagtcaagtggtttcatgtacccaagtgcagtagatcattttaaaaagcagtttgcataccttgaagaacattatgccaagggatctacaggaactccacctgagaggcaacataattcattgccgcggccgtctgttgtctattccgacaaccgatcacaaaccacagccaacatcaccgaggatctttccaagtgtatgctcagagaaaatacacagaagacacatccatattctgcttctgttgcaagtaaatttccaccacatgttcctcaaggtgatgttgcaaggcctggtaaagcagttggttcggtgatgcagtacagcccatgtccagcgcctgctgccgagcgatatgagcaacgaagaatcgctaggcacccagcagttgccccaaacaatatcccttctggaagctcataccccagaagaagccagacctgcaagagtgagacaggtgatgccgaaagccatatggatgcgaaccaagctcggcagccaaagccatatgcagcgaacaaactacctgctaccgttgatagtcgtggtggtcactggtag

SEQ ID NO: 142041 - protein, 557 aa, Zea mays
MQHDQKKKAPSEMDFFTEYGEGSRYKIEEVIGKGSYGVVCSAVDTHTGEKVAIKKINDIFEHVSDATRILREIKLLRLLRHPDIVEIKHILLPPSRREFRDIYVVFELMESDLHQVIKANDDLTPEHYQFFLYQLLRGLKYIHTANVFHRDLKPKNILANADCKLKICDFGLARVAFNDTPTAIFWTDYVATRWYRAPELCGSFFSKYTPAIDIWSIGCIFAELLTGKPLFPGKNVVHQLDIITDLLGTPSPEAISRIRNEKARRYLSSMRRKKPIPFTQKFPNADPLALCLLERMLAFEPKDRPSAEEALADPYFKNIASVDREPSAQAVTKLEFEFERRRVTKEDIRELIYREILEYHPKMLREFLEGTESSGFMYPSAVDHFKKQFAYLEEHYAKGSTGTPPERQHNSLPRPSVVYSDNRSQTTANITEDLSKCMLRENTQKTHPYSASVASKFPPHVPQGDVARPGKAVGSVMQYSPCPAPAAERYEQRRIARHPAVAPNNIPSGSSYPRRSQTCKSETGDAESHMDANQARQPKPYAANKLPATVDSRGGHW

SEQ ID NO: 142042 - DNA, 1068 bp, Sclerotinia sclerotiorum
  CDS (1)..(1068)
atggcaagtcgtgcgcctaatccctcttcgggatcacgaaagatctcctttaatgtcagcgaacaatatgatattcaggatgttgtaggagagggagcttatggtgttgtttgttcagctttgcacaagccttcagggcaaaaggtcgctatcaagaagatcactccatttgatcattcgatgttctgtctgcgaacactacgtgagatgaagttacttcggtacttcaatcatgagaacatcatctccattctcgatattcaaaagcctagaaattacgagtccttcaccgaagtttatcccattcaagagctcatggaaaccgatatgcatcgtgtaattcgtactcaagatctatccgatgatcattgccagtacttcatctatcaaactctccgagccttgaaagctatgcattcagcaaacgttttacacagagatttgaaaccatccaatctgttacttaatgccaactgcgatttgaaggtctgcgattttggtcttgctagatccgctgcgtcccaagaagataactctggtttcatgaccgaatatgttgcgaccagatggtaccgtgccccagaaattatgttgacgttcaaagagtataccaaggccattgatgtatggtctgttgggtgtatcttggccgagatgttaagcggaaagcccctattccctggaaaggattatcaccaccaactcacactcattcttgatgttcttggtactcctaccatggaagattactacggcatcaaatctcgtcgtgcaagagaatatatccgatcgttgccattcaagaagaaggtcccattcaagaccatgttcccaaaaacctcagatctcgctctggatctcctcgagaaacttctcgcatttaatcctgtcaagagaattactgtcgaggaagcactgaaacatccatatcttgaaccataccatgacccagaggatgaacctaccgccaaccctatcccggaagaattctttgatttcgataaaaacaaggacaacctcaccaaggaacaactcaaacaattgatctaccatgagatcatgcgatag

SEQ ID NO: 142043 - protein, 355 aa, Sclerotinia sclerotiorum
MASRAPNPSSGSRKISFNVSEQYDIQDVVGEGAYGVVCSALHKPSGQKVAIKKITPFDHSMFCLRTLREMKLLRYFNHENIISILDIQKPRNYESFTEVYPIQELMETDMHRVIRTQDLSDDHCQYFIYQTLRALKAMHSANVLHRDLKPSNLLLNANCDLKVCDFGLARSAASQEDNSGFMTEYVATRWYRAPEIMLTFKEYTKAIDVWSVGCILAEMLSGKPLFPGKDYHHQLTLILDVLGTPTMEDYYGIKSRRAREYIRSLPFKKKVPFKTMFPKTSDLALDLLEKLLAFNPVKRITVEEALKHPYLEPYHDPEDEPTANPIPEEFFDFDKNKDNLTKEQLKQLIYHEIMR

SEQ ID NO: 142044 - DNA, 1272 bp, Physcomitrella patens
  CDS (1)..(1272)
atggcatctgcgactgcgggtattatcaacagcacaaacatgatcggaggaggaatagctccaactaaagctggctcaagcggagtagaattgttaccgaaagaaatgcacgacatgaagctcagggatgacaaggttgaccacagcgacgacaaggaaattgaggcttcaatagtagatggaaacggtaccgaaactggccacatcatagctactactattggagggcgaaatggacaacctaagcagacgatcagctattcggcagaacgtgttgttggcactggatcattcgggattgtcttccaggcaaaatgcatcgaaactggggagacggtggctataaagaaagtgttgcaggacaaaagatacaagaatcgagagctgcagatcatgcgactgttggaccacccgaatattgtagctttgaagcattgcttcttctcgacgacggataaagacgaattgtacttaaacctggtgctggagtatgtacccgagacggtgtatcgtattgcaaagcactacaatcgcatgaatcagcgaatgccccttgtttacgtgaaactgtacacgtatcagatatgccgatcactggcatatatccacaatggcatcggtgtctgccaccgcgacatcaagccccagaacctgctggtgaatcctcatacgcaccagctgaaactgtgtgattttggaagtgcgaaagtgctggtgaaaggggagcccaatatctcgtacatttgttcgcggtactaccgtgctccggagcttatttttggagcgacggagtacacgactgccatagatatatggtcgatgggttgcgtgatggcagagcttctactaggacagcctttgtttcctggagagagtggagtggatcaattggtggaaatcatcaaggttttggggacaccgactcgtgaggagatcaagtgcatgaatccgaactacacagagttcaagtttccacaaatcaaggcgcacccgtggcacaaagttttccacaaacgcatgccacctgaagcagttgacttggtgtcaaggctccttcagtactctccaaatctgcggtgcaacgctctggaagcgtgtgtgcacccgttctttgatgagctaagggatcctaactgccggcttccgaatgggcggccactgccctctctgttcaacttcaaaacccaagagttgaagggtgcaactcctgatattctgcagcgtttgatacccgagcacgcgaggaagcagaatccgatgctggcgctgtga

SEQ ID NO: 142045 - protein, 423 aa, Physcomitrella patens
MASATAGIINSTNMIGGGIAPTKAGSSGVELLPKEMHDMKLRDDKVDHSDDKEIEASIVDGNGTETGHIIATTIGGRNGQPKQTISYSAERVVGTGSFGIVFQAKCIETGETVAIKKVLQDKRYKNRELQIMRLLDHPNIVALKHCFFSTTDKDELYLNLVLEYVPETVYRIAKHYNRMNQRMPLVYVKLYTYQICRSLAYIHNGIGVCHRDIKPQNLLVNPHTHQLKLCDFGSAKVLVKGEPNISYICSRYYRAPELIFGATEYTTAIDIWSMGCVMAELLLGQPLFPGESGVDQLVEIIKVLGTPTREEIKCMNPNYTEFKFPQIKAHPWHKVFHKRMPPEAVDLVSRLLQYSPNLRCNALEACVHPFFDELRDPNCRLPNGRPLPSLFNFKTQELKGATPDILQRLIPEHARKQNPMLAL

SEQ ID NO: 142046 - DNA, 1242 bp, Trichoderma atroviride; identical to SEQ ID NO: 140220
  CDS (1)..(1242)

SEQ ID NO: 142047 - protein, 413 aa, Trichoderma atroviride; identical to SEQ ID NO: 140221

SEQ ID NO: 142048 - DNA, 1068 bp, Cryphonectria parasitica; identical to SEQ ID NO: 140222
  CDS (1)..(1068)

SEQ ID NO: 142049 - protein, 355 aa, Cryphonectria parasitica; identical to SEQ ID NO: 140223

SEQ ID NO: 142050 - DNA, 1110 bp, Festuca arundinacea
  CDS (1)..(1110)
atggtgatgatggtggaccctccgaacggcatggggaaccacggcaagcactactacaccatgtggcagaccatgttcgagatcgacaccaagtacgtgcccatcaagcccatcgggagaggggcctacgggatcgtctgctcatccatcaaccaggagaccaacgagaaggtcgccatcaagaagatgaacaacgtcttcgacaaccgcgtggatgcgctcaggacgctgcgcgagctcaagctcctccgccacctgcgccacgagaacgtgatttgcttgaaggatataatgatgcctgtacacaggaggagcttcaaggatgtgtacctggtctcggagctcatggacacggatctgcatcagatagtcaagtcgttgcagccgctttccaatgaccactgccagtatttcctttttcagctactccgagggctgaagtaccttcattcagcagggattctccatagagacctgaaaccagggaaccttctggttaatgcaaactgtgatctgaagatctgtgactttggcctggctcgcacaaacaacactaaaggtcagtttatgactgaatatgttgtcacccgctggtatagagctcctgagctgctgctctgctgcgacaactatggcacctccatagatgtctggtctgttggctgcatatttgctgagctacttggccgcaagccgatctttccgggaactgagtgcctaaatcagcttaagcttatagtcaatgttcttggcaccatgagtgacagtgaccttgagttcattgacaaccggaaagctcgcaactacatcaaatcccttccatacaccccagggattcccctctctaacatgtacccacaggtgcaccctcttgccattgatctgttgcagaagatgcttgtctttgatccttctaaaaggattagtgtcattgaggctctggcgcacccctacatgtctgagctgtatgatccagccgcaaaccctcctgcccaggtacccattgatcttgatatagatgaaaacatcggtgtagagacgatccgagaaatgttgtggcaggagatgctccagtaccaccctgaggccgccacaatggtgaatatgtga

SEQ ID NO: 142051 - protein, 369 aa, Festuca arundinacea; identical to SEQ ID NO: 62936

SEQ ID NO: 142052 - DNA, 1737 bp, Hordeum vulgare
  CDS (1)..(1737)
atggggggagggaacggcatcgtcgacggcttccgccgcttgttccaccgccgcacgccctccggctccgtgctcggcagctccaaccagtcctccgccggcgaggactcctcggagctcgaggccgtcgaggacctggatctcgtgggcctccgccccatccgcgtccccaagcgcaagatgccgctccccgtcgagagccacaagaagaacataatggagaaagaattcttcactgagtacggagaggcaagccagtaccaaatccaagaagttgttggcaaagggagttatggagtggttgctgctgcaatagatacccgcaccggcgagcgggttgcgattaagaagatcaatgatgtgtttgagcatgtctcggatgccacacgcatcctccgtgaggtcaagctccttcggctgctccgtcatccggacgtggtagagatcaagcacataatgctccccccttctcggagggagttccaagatatatatgttgttttcgagctcatggagtcggatctccatcaggtcatcagagctaatgatgacctcacggcggagcattaccagtttttcctttaccagcttctccgcgctctcaagtacatccatggggctaatgtatttcatcgcgatctgaagcccaagaatatactggccaacgcagactgcaaactgaaaatttgtgactttggacttgcgcgtgtatcatttaatgatgctccttcagctatattttggacggattatgtagcaacaaggtggtacagagctcctgaattatgtggctcctttttctcgaaatacactcctgctattgaaatttggagtattggatgtatatttgccgagcttctcactggacgaccactttttcctgggaagaatgttgtacaccagttagatataataacagatcttcttggaactccatcatcagaaaccttatctcggattcgaaacgagaaggccaggaggtacttacgttacatgcgaaaaaaacatcctgtgcccttgactcagaaatttcctaatgctgatccgttggcggttcgcctactggggcgtttacttgcatttgatcctaaagaccggccttcagctgaagaggctttggcagacccatatttcgcatctcttgctaatgtggaacgtgagccttcaaggcatccaatttcgaaacttgagtttgagtttgagagacgaaaggtgacaaaagatgatgttagagaattgatctatcgagagattttggagtaccgtccacaaatgctggaggagtacatgaaagggggagatcagattagcttcctctatccaagtggggttgaccgctttaagcggcagtttgcgcacctggaggagcattacagcaaaggagaacgaggttctccactgcaaagaaagcatgcctctttaccgaggcagagagtaggtgcatcgaacgacagtaataatgaacagcatattagtgatcaggagatgagtgcagagcctgatgcccatggtgcagtgagccctcaaaagccacaggatgcacccggtgttggtcagaatggtctgagccccaccagcttgagctcgcggacctacctcaagagcgcgagcattagtgcttccaagtgtgtcgttgtcaacccgaataaacagccagagtatgacgatgcgatctccgaggaaacggaaggggccgtcgacggactatccgagaaggtctccaagatgcatgcctag

SEQ ID NO: 142053 - protein, 578 aa, Hordeum vulgare
MGGGNGIVDGFRRLFHRRTPSGSVLGSSNQSSAGEDSSELEAVEDLDLVGLRPIRVPKRKMPLPVESHKKNIMEKEFFTEYGEASQYQIQEVVGKGSYGVVAAAIDTRTGERVAIKKINDVFEHVSDATRILREVKLLRLLRHPDVVEIKHIMLPPSRREFQDIYVVFELMESDLHQVIRANDDLTAEHYQFFLYQLLRALKYIHGANVFHRDLKPKNILANADCKLKICDFGLARVSFNDAPSAIFWTDYVATRWYRAPELCGSFFSKYTPAIEIWSIGCIFAELLTGRPLFPGKNVVHQLDIITDLLGTPSSETLSRIRNEKARRYLRYMRKKHPVPLTQKFPNADPLAVRLLGRLLAFDPKDRPSAEEALADPYFASLANVEREPSRHPISKLEFEFERRKVTKDDVRELIYREILEYRPQMLEEYMKGGDQISFLYPSGVDRFKRQFAHLEEHYSKGERGSPLQRKHASLPRQRVGASNDSNNEQHISDQEMSAEPDAHGAVSPQKPQDAPGVGQNGLSPTSLSSRTYLKSASISASKCVVVNPNKQPEYDDAISEETEGAVDGLSEKVSKMHA

SEQ ID NO: 142054 - DNA, 1272 bp, Aspergillus oryzae; identical to SEQ ID NO: 140226
  CDS (1)..(1272)

SEQ ID NO: 142055 - protein, 423 aa, Aspergillus oryzae; identical to SEQ ID NO: 140227

SEQ ID NO: 142056 - DNA, 1200 bp, Candida tropicalis
  CDS (1)..(1200): transl_table=12
atgatgaatatagaccaacatcatcaacagttacaacaacaatcccaagcacaagcccaggcacaagctcaagcacaagcccaggcacaagcacaggcacaggcacaagctcaagcacaagctgctgctgctgcagttgcagcatcatcgcaacgccaggtctcattcaacgtctcggaccactaccaaatccttgagattgtcggcgagggagcgtacggcatagtgtgttcagccatccacaagccctccaaccaaaaagtcgccatcaagaagatcgagccttttgaaagaagcatgttgtgtttgcgcaccttgcgagaattgaagttgttgaaacatttcaaccacgaaaacatcatcagtatcttggccatccagcgcccattgaacttcgagtcgttcaacgagatctacctcatccaggaattaatggagaccgatttgcaccgcgtcatacgcacacagaacttgaccgacgaccacatccagtatttcatctaccagacattacgagccttgaaagccatgcacctggccaacgtgttgcaccgagatttgaaaccatcgaacttgttgttgaattcaaactgtgatttgaaggtgtgtgactttggcttggcgaggtcgatcgcgtcccaggaggataactatgggttcatgacggagtacgtggccacgagatggtacagggcaccggaaatcatgttgacgttccaggaatacaccacggctatcgatgtctggtccgttggctgtatattggcagagatgttgagcggtagacctttgttccccgggagagactatcacaatcagttatggttgattatggaagttttgggcacacctaacatggaggactattacaatatcaagagcaagcgagcaagagagtacatcaggtcgttgccattctgcaagaagataccattccaggagttgtttagcaataagccgggtatcaaccccttggcgttggatttgttggagaagttgttgattttcaacccagccaagagaatcacggttgaagatgcgttgaagcatccatatttgcagttgtaccatgacccgaacgatgagccgatcagcgataagattcctgaggacttttttgattttgacaagaagaaagatctgttgacgattgaagacttgaagaagatgttgtatgaagagatcatgaagccgttgtag

SEQ ID NO: 142057 - protein, 399 aa, Candida tropicalis
MMNIDQHHQQLQQQSQAQAQAQAQAQAQAQAQAQAQAQAQAAAAAVAASSQRQVSFNVSDHYQILEIVGEGAYGIVCSAIHKPSNQKVAIKKIEPFERSMLCLRTLRELKLLKHFNHENIISILAIQRPLNFESFNEIYLIQELMETDLHRVIRTQNLTDDHIQYFIYQTLRALKAMHSANVLHRDLKPSNLLLNSNCDLKVCDFGLARSIASQEDNYGFMTEYVATRWYRAPEIMLTFQEYTTAIDVWSVGCILAEMLSGRPLFPGRDYHNQLWLIMEVLGTPNMEDYYNIKSKRAREYIRSLPFCKKIPFQELFSNKPGINPLALDLLEKLLIFNPAKRITVEDALKHPYLQLYHDPNDEPISDKIPEDFFDFDKKKDSLTIEDLKKMLYEEIMKPL

SEQ ID NO: 142058 - DNA, 1722 bp, Oryza sativa subsp
  CDS (1)..(1722)
atgggctgcgtgcacggccgcccctccacctccagccccgccgccgccaacgcctcacgtcgccgcgaccacccgcctccgcctgcggaggcgcagaagcagggggcggatgcttctgcggaggcggatgctgctgcgggcgagaagggcgagcagccggccgtcgccgtcgccgcggcggggccgccggtgaagagggagcggcgctcgcggtcgtcgaggtcggcgcacgcgcacgcgcacgccgaggtgcgcatcggggggagcttcgcgaacaaggcgcgcggcgagcaggtggccgcgggctggcccgcctggctctccgccgtcgccggcgacgccatcgacggctggacccctcgccgcgccgactccttcgagaagatcgacaagatcgggcaaggcacgtacagcaacgtgtacaaggcgcgggactcggtgagcggcaagatcgtggcgctcaagaaggtgcgcttcgacaacctggagcccgagagcgtgcgcttcatggccagggagatcctcatcctccgccgcctcgaccaccccaatgtcatcaagctcgacggcctcgtcacctcccgcatgtcctgcagcctctacctcgtcttcgactacatggtccacgacctcgccggcctcgccgccagccccgagatcaagttcaccctgccccaggtcaagtgctatgtgcaccagctgttgtcgggattggagcactgccacgaccggggggtgctgcaccgcgacatcaaggggtcgaacctgcttttggacaacaatggcgtgctgaagatcggggactttggtctcgcgtcgttcttcgacccgaaccataagcagccgatgacgagtagggtggtgacgctctggtaccggccaccagagttgctgttgggcgcgacggattatggcgtaggcgtggacttgtggagcgcgggatgtatccttgctgaattgctcgcagggaaacctatcatgcctgggcggaccgaggtggaacagctgcataaaatttttaagttgtgtggttcccccacagaagaatattggaaaaaatcgaagttgcctcatgcaactatattcaagccccaacaaccttacaaaaggcgaatagctgatacattcaaagatttcccacaatcagcactgcgacttattgaaacactacttgcaatcgacccagctgatcgtttaacagcgacttctgcgttagaaagtgaattctttaaaacggaaccacatgcatgtgatccatcaagtttaccccaataccccccaagcaaagagatggatgcaaaacgaagagacgaagaagccagattaagagctgctggtggtagagttaatggggaaggagctaggaagacaaggacaagggaaagacctagggctgttccagcaccggaagcaaatgctgagcttcaagcaaatattgataaaagaagactaataacacatgcaaatgcgaagagcaagagtgaaaagttccctccgccacatcaggatggcgcacttggatatcctttgggttgttcaaatcatatggaacctgcatttgagccgccagatccatcttcattcagcactgtgttcccctacgagaaaggctctgtgcctacttggtctggaccattggccgatccttcttcaggcaaccagaagcgaaaacacaagtctggccgctcttcaaaacaaccggctaccgcccgtgctcgatga

SEQ ID NO: 142059 - protein, 573 aa, Oryza sativa subsp
MGCVHGRPSTSSPAAANASRRRDHPPPPAEAQKQGADASAEADAAAGEKGEQPAVAVAAAGPPVKRERRSRSSRSAHAHAHAEVRIGGSFANKARGEQVAAGWPAWLSAVAGDAIDGWTPRRADSFEKIDKIGQGTYSNVYKARDSVSGKIVALKKVRFDNLEPESVRFMAREILILRRLDHPNVIKLDGLVTSRMSCSLYLVFDYMVHDLAGLAASPEIKFTLPQVKCYVHQLLSGLEHCHDRGVLHRDIKGSNLLLDNNGVLKIGDFGLASFFDPNHKQPMTSRVVTLWYRPPELLLGATDYGVGVDLWSAGCILAELLAGKPIMPGRTEVEQLHKIFKLCGSPTEEYWKKSKLPHATIFKPQQPYKRRIADTFKDFPQSALRLIETLLAIDPADRLTATSALESEFFKTEPHACDPSSLPQYPPSKEMDAKRRDEEARLRAAGGRVNGEGARKTRTRERPRAVPAPEANAELQANIDKRRLITHANAKSKSEKFPPPHQDGALGYPLGCSNHMEPAFEPPDPSSFSTVFPYEKGSVPTWSGPLADPSSGNQKRKHKSGRSSKQPATARAR

SEQ ID NO: 142060 - DNA, 1191 bp, Solanum lycopersicum
  CDS (1)..(1191)
atggatggttccgttccgcaaacggatacgatgatgtcggatgtggctgcacctccggctcaacaaccacctccgccgtcacaaccgctggctggaatggataatattccggcgacgttaagccatggtggcaggttcattcaatacaatatttttggtaatatttttgaagttactgctaagtataaacctcctataatgccaattggtaaaggtgcttatggaatcgtttgttctgctttgaattcggagacaaatgaatctgtagcaattaagaaaattgctaatgcttttgataacaagattgatgctaagaggactttgagagagatcaagcttcttcgacatatggatcatgaaaatattgttgcgatcagagatataattccaccaccacagagagaagcctttaacgatgtttacattgcgtatgagcttatggatactgacctgcatcaaattattcgctcgaatcagggtttatctgaggagcactgccagtatttcttgtatcagatcctccgtgggttgaaatacatacattctgcaaatgttttgcacagagacttaaagcctagcaatcttctcttgaatgccaactgtgatttgaagatatgtgattttgggctagctcgtgtcacttctgaaactgactttatgaccgaatatgttgtgacaagatggtatcgtggacctgagctgttgttgaattcatccgactatactgcagcaattgatgtatggtcagtgggttgcatcttcatggagttgatggacagaaaacccctcttccctggcagagatcatgtacaccagctgcgtcttattatggagttgattggcactccttcagaggctgaaatggaatttttaaatgagaatgcaaaacgctatatccgacaacttcctctttaccgtcgacaatcatttactgaaaagttcccgcatgtaaacccagctgctattgatcttgtcgagaaaatgttgacatttgatcccagaaggagaataacagttgaagacgctcttgcacatccttacctaacatcgctccatgatatcagtgacgagcccatttgcatgactccttttagcttcgactttgagcagcatgcgcttacagaggaacagatgaaggagctaatttacagggagtcgattgcatttaatcctgaataccagcgcatgtga

SEQ ID NO: 142061 - protein, 396 aa, Solanum lycopersicum
MDGSVPQTDTMMSDVAAPPAQQPPPPSQPLAGMDNIPATLSHGGRFIQYNIFGNIFEVTAKYKPPIMPIGKGAYGIVCSALNSETNESVAIKKIANAFDNKIDAKRTLREIKLLRHMDHENIVAIRDIIPPPQREAFNDVYIAYELMDTDLHQIIRSNQGLSEEHCQYFLYQILRGLKYIHSANVLHRDLKPSNLLLNANCDLKICDFGLARVTSETDFMTEYVVTRWYRGPELLLNSSDYTAAIDVWSVGCIFMELMDRKPLFPGRDHVHQLRLIMELIGTPSEAEMEFLNENAKRYIRQLPLYRRQSFTEKFPHVNPAAIDLVEKMLTFDPRRRITVEDALAHPYLTSLHDISDEPICMTPFSFDFEQHALTEEQMKELIYRESIAFNPEYQRM

SEQ ID NO: 142062 - DNA, 1242 bp, Aplysia californica
  CDS (1)..(1242)
atgaacaagctattaagtcagttctacacagtagaagtgggtgactccacttttaccatcctgaaacgttatcagcacctgaggcccataggttctggtgcccaaggaatagtatgtgctgcttgtgacatgctgacagacaccaatgttgcaatcaaaaagttgagcaggcccttccagaatgtcacacatgcaaagagagcatacagggagttcgtactcatgaagcttgtcaatcacaaaaatattataggtttattgaacgccttcacgccacagaaatctttagacacatttcaagatgtgtacctggtgatggagctcatggacgccaacctgtgtcaggtgatccagatggacctggaccatgagcgcatgtcctacctcctctaccagatgctgtgtggcatcaaacacttacattctgctggcatcatacacagggacctcaaacctagcaatatcgttgtcaagtcagactgcacgttgaagatccttgactttggcttggcccggacggccgggacaggtttcatgatgacgccgtacgtggtgactcgctactacagagccccggaggttatactggggatgggctacaaggcaaacgttgatatctggtctgttggctgtataatggcagaactgatacgtgccacagtgatgttcccgggtacagatcacattgaccagtggaataagattacagagcagcttggcaccccaagccaagacttcatgtccaggttacagacaacggtgaggaactacgtggagaaccggcccaaacacacgggacacagttttgagaagctgttcccagatgtactcttccctccagatagcacagagcatcaagggttgagagcgatggtggccagggatttgttgtccaaaatgttggtgatcgacccggagaagagaatctcagtggacgaggctctgatgcacccgtacatcaacgtctggtacgacgagcgggaggtcaacgggcctgcaccaggtccatacgatcatgcagtggatgaaagagaacactcagtcctagaatggaaaatgttcatatacaatgaagtcatggagtatgaaaaccgtgaaagagaaaaagaaaagcaaagtgctatgcaaaaccataatgatggtgccaacaacacgatggagaccggaggggcgggcgccgagtccaactccacatcgagaggagcagcagccactgcagccaccgcgcagaaccaccactaa

SEQ ID NO: 142063 - protein, 413 aa, Aplysia californica
MNKLLSQFYTVEVGDSTFTILKRYQHLRPIGSGAQGIVCAACDMLTDTNVAIKKLSRPFQNVTHAKRAYREFVLMKLVNHKNIIGLLNAFTPQKSLDTFQDVYLVMELMDANLCQVIQMDLDHERMSYLLYQMLCGIKHLHSAGIIHRDLKPSNIVVKSDCTLKILDFGLARTAGTGFMMTPYVVTRYYRAPEVILGMGYKANVDIWSVGCIMAELIRATVMFPGTDHIDQWNKITEQLGTPSQDFMSRLQTTVRNYVENRPKHTGHSFEKLFPDVLFPPDSTEHQGLRAMVARDLLSKMLVIDPEKRISVDEALMHPYINVWYDEREVNGPAPGPYDHAVDEREHSVLEWKMFIYNEVMEYENREREKEKQSAMQNHNDGANNTMETGGAGAESNSTSRGAAATAATAQNHH

SEQ ID NO: 142064 - DNA, 1071 bp, Beauveria bassiana
  CDS (1)..(1071)
atgtcccgcgcaaaccctcccaataacgcctcggcgtcgcgcaaaatatctttcaatgtcagcgaacagtacgatattcaggacgtcgtaggagaaggggcttacggcgttgtctgctccgccatccataagccatctggccaaaaagtagccattaagaagattacacccttcgatcattccatgttctgccttcgaaccctccgcgaaatgaagcttcttcgatacttcgatcatgaaaacatcatttccattctcgacattcagaagcccagaggctttgattcgttcaacgaagtgtatctcattcaggagctcatggagaccgacatgcaccgagtcattcgtacccaggtactttccgatgaccactgccaatacttcatctaccagaccctacgggcactcaaggctatgcactcggccaatgtgctgcacagagatctcaagccctccaacctgctccttaacgccaactgcgatctcaaggtctgcgatttcggtcttgccagatccgccgcttcgcaggaagacaattctggattcatgaccgaatacgttgctacccgctggtaccgtgcacccgaaattatgttgacctttaaggagtataccaaggccatcgacgtctggtctgtgggctgcatcctcgccgagatgctaagcgggaagcccttgttccccggcaaggattatcaccaccagctgaccttgattctcgacgtccttggcacccccaccatggaagattactacgggatcaagtcgcgccgcgctcgtgagtatatccgctcgctgcccttcaagaagaaggtccttttccgcacgctattcgccgacacgtctgatctggcccttgacctgctggaaaagcttctcgcctttaaccccgtgaagcgaatcacggttgaggaggctcttaagcacccgtatttggagccttaccacgaccccgaagatgagccgaccgcccctccgattcccgaggaattcttcgactttgacaagcataaggacaacctgagcaaagagcagctgaagcagctcatctaccaagagatcatgcggtaa

SEQ ID NO: 142065 - protein, 356 aa, Beauveria bassiana
MSRANPPNNASASRKISFNVSEQYDIQDVVGEGAYGVVCSAIHKPSGQKVAIKKITPFDHSMFCLRTLREMKLLRYFDHENIISILDIQKPRGFDSFNEVYLIQELMETDMHRVIRTQVLSDDHCQYFIYQTLRALKAMHSANVLHRDLKPSNLLLNANCDLKVCDFGLARSAASQEDNSGFMTEYVATRWYRAPEIMLTFKEYTKAIDVWSVGCILAEMLSGKPLFPGKDYHHQLTLILDVLGTPTMEDYYGIKSRRAREYIRSLPFKKKVLFRTLFADTSDLALDLLEKLLAFNPVKRITVEEALKHPYLEPYHDPEDEPTAPPIPEEFFDFDKHKDNLSKEQLKQLIYQEIMR

SEQ ID NO: 142066 - DNA, 1068 bp, Metarhizium anisopliae
  CDS (1)..(1068)
atgtcccgttcgaaccctccaaacgccggaggctctcgcaagatttctttcaatgttagcgagcaatacgacattcaagatgttgtaggtgaaggtgcatatggagtcgtttgctccgcgatacacaaaccgtcagggcagaaggttgcgatcaagaagatcactccattcgatcattccatgttttgtctccgaactttgcgcgaaatgaagctccttcgctacttcaatcacgagaacatcatctctatccttgatatccagaagccccgtggctacgatacatttaacgaggtctatctcattcaggaattgatggagactgatatgcacagagtcatccgaacgcaggatctctcagacgatcactgccagtatttcatctatcaaactttgcgcgcactgaaagcaatgcattcagcaaacgttctgcacagagatctgaaaccatccaacctacttctcaatgccaattgcgacttgaaagtctgtgactttggcttggccagatcggctgcatctcaagaagacaattctggtttcatgacggaatatgttgcaacacgatggtatcgtgccccagaaataatgttaacattcaaggaatatacaaaggccattgatgtttggtctgtcggctgcatcttagccgagatgctcagtggaaaacctttgttccctggtaaagactatcatcaccagttgactctgattctcgatgttctcggcacgcctaccatggaagactactatggtatcaagtcgcgacgtgctagagagtatatccggtctctaccattcaagaagaaggtgccattcaggactctatttccaaaaacttccgacttggctctcgatcttctcgaaaagctactagctttcaatcctgtgaagcgtatcacggttgaggaagctctaaagcatccctacctggagccgtatcacgaccccgaggacgagccaactgcacctccgactcctgaagaatttttcgactttgacaaacacaaggataccctgagcaaagaacagctgaagcaactcatttatcaggagattatgaggtaa

SEQ ID NO: 142067 - protein, 355 aa, Metarhizium anisopliae
MSRSNPPNAGGSRKISFNVSEQYDIQDVVGEGAYGVVCSAIHKPSGQKVAIKKITPFDHSMFCLRTLREMKLLRYFNHENIISILDIQKPRGYDTFNEVYLIQELMETDMHRVIRTQDLSDDHCQYFIYQTLRALKAMHSANVLHRDLKPSNLLLNANCDLKVCDFGLARSAASQEDNSGFMTEYVATRWYRAPEIMLTFKEYTKAIDVWSVGCILAEMLSGKPLFPGKDYHHQLTLILDVLGTPTMEDYYGIKSRRAREYIRSLPFKKKVPFRTLFPKTSDLALDLLEKLLAFNPVKRITVEEALKHPYLEPYHDPEDEPTAPPTPEEFFDFDKHKDTLSKEQLKQLIYQEIMR

SEQ ID NO: 142068 - DNA, 1071 bp, Verticillium fungicola
  CDS (1)..(1071)
atgtcccgcgcaaacccgcccaataacgcgtcggcgtcgcgcaaaatttctttcaacgtcagcgagcagtacgatattcaggatgtcgtcggcgaaggtgcctatggtgttgtttgctccgccatccacaaaccatcaggccaaaaagtggccatcaagaagattacgccattcgaccactccatgttttgcctccgaactctccgcgagatgaagctcctccgatacttcaaccacgaaaatataatttccattcttgatatccagaagccgcgaggctacgactcgttcaacgaggtctatctcattcaagagctcatggaaactgacatgcaccgagttattcgcactcaagatctctctgacgaccattgccaatactttatctaccagaccctgcgtgctcttaaggctatgcattctgctaatgtactccatcgagatctgaagccatcgaacctgctgctgaatgccaattgcgatctcaaggtctgcgattttggcctcgccagatctgccgcctctcaagaggataactctggattcatgactgaatatgtcgctactcgttggtatcgcgcaccagaaattatgttgaccttcaaggaatacaccaaagctattgatgtgtggtctgtcggctgtattctcgccgagatgttaagcggaaagcctctgttccctggcaaggactatcaccatcagttgactctcattcttgacgttctgggcacccccaccatggaagactactatggcattaagtcccgccgcgcgcgagaatacatccgttctctgccgttcaagaagaaagtccctttccgtacgctcttccccaagacgtctgatctggcgcttgaccttctggagaagcttcttgccttcaaccctgtgaagcgaatcaccgttgaggaggcactcaaacacccctacctcgagccataccatgaccctgaggacgaaccaactgcacctccgattcctgaggagttttttgactttgacaagcacaaggacaatttgagcaaggagcagctcaagcagctcatctaccaggagatcatgcgatga

SEQ ID NO: 142069 - protein, 356 aa, Verticillium fungicola
MSRANPPNNASASRKISFNVSEQYDIQDVVGEGAYGVVCSAIHKPSGQKVAIKKITPFDHSMFCLRTLREMKLLRYFNHENIISILDIQKPRGYDSFNEVYLIQELMETDMHRVIRTQDLSDDHCQYFIYQTLRALKAMHSANVLHRDLKPSNLLLNANCDLKVCDFGLARSAASQEDNSGFMTEYVATRWYRAPEIMLTFKEYTKAIDVWSVGCILAEMLSGKPLFPGKDYHHQLTLILDVLGTPTMEDYYGIKSRRAREYIRSLPFKKKVPFRTLFPKTSDLALDLLEKLLAFNPVKRITVEEALKHPYLEPYHDPEDEPTAPPIPEEFFDFDKHKDNLSKEQLKQLIYQEIMR

SEQ ID NO: 142070 - DNA, 1122 bp, Solanum lycopersicum
  CDS (1)..(1122)
atggttgatgctaatatgggtgctgctcaatttcctgattttcctaaaattgtcactcatgctggacaatatgttcagtatgacatttttggtaatctttttgagattactaacaagtatcaacctcctatcatgcctattggccgtggcgcttatggaatcgtctgctctgtgtttaatgcggagctgaatgagatggttgcagttaagaaaatcgccaatgcttttgataattacatggatgctaagaggacgctccgtgaaattaagcttcttcgccatttagaccatgaaaacgtaattggtttaagagatgtgattcctccgcccttacgaagggagttttctgatgtttacattgctactgaactcatggatactgatcttcaccaaataattagatcaaaccaaggtttatcagaggatcattgccagtacttcatgtatcagcttctccgtgggctaaagtacatacattccgcgcatgttattcatagagatctcaaaccaagtaacctcttgctaaatgcaaattgtgatcttaagatatgcgattttggtcttgcaaggccaaacgtagagaacgagaatatgacagaatatgtagtaaccagatggtacagggcaccggagcttttgttgaactcttcagattacactgctgccatagatgtttggtctgtgggttgcatcttcatggagcttatgaatagaaaacctttgtttgctggaaaagatcatgtacatcaaatacgcttgctaactgagcttcttggcactcctacagaatctgatcttagcttcctccgtaatgaagatgcaaaaagatacgtcaggcaactcccacaacatccacgccagcagttagcaacagtgttccctcatgtgaatccattagccattgatcttgtagataagatgttgacgctcgaccctactagaagaataacagttgaggaagcattagctcatccctacctcgcaaagctccatgatgcagctgatgaaccagtctgccccatcccgttctctttcgactttgagcaacaagggataggagaagagcagattaaagacatgatttatcaagaagctttggcgttgaatcctgaatatgcttaa

SEQ ID NO: 142071 - protein, 373 aa, Solanum lycopersicum
MVDANMGAAQFPDFPKIVTHAGQYVQYDIFGNLFEITNKYQPPIMPIGRGAYGIVCSVFNAELNEMVAVKKIANAFDNYMDAKRTLREIKLLRHLDHENVIGLRDVIPPPLRREFSDVYIATELMDTDLHQIIRSNQGLSEDHCQYFMYQLLRGLKYIHSAHVIHRDLKPSNLLLNANCDLKICDFGLARPNVENENMTEYVVTRWYRAPELLLNSSDYTAAIDVWSVGCIFMELMNRKPLFAGKDHVHQIRLLTELLGTPTESDLSFLRNEDAKRYVRQLPQHPRQQLATVFPHVNPLAIDLVDKMLTLDPTRRITVEEALAHPYLAKLHDAADEPVCPIPFSFDFEQQGIGEEQIKDMIYQEALALNPEYA

SEQ ID NO: 142072 - DNA, 1185 bp, Solanum lycopersicum; identical to SEQ ID NO: 140228
  CDS (1)..(1185)

SEQ ID NO: 142073 - protein, 394 aa, Solanum lycopersicum; identical to SEQ ID NO: 140229

SEQ ID NO: 142074 - DNA, 1191 bp, Solanum lycopersicum
  CDS (1)..(1191)
atggatggttccgttccgcaaacggatacgatgatgtcggatgtggctgcacctccggctcaacaaccacctccgccgtcacaaccgctggctggaatggataatattccggcgacgttaagccatggtggcaggttcattcaatacaatatttttggtaatatttttgaagttactgctaagtataaacctcctataatgccaattggtaaaggtgcttatggaatcgtttgttctgctttgaattcggagacaaatgaatctgtagcaattaagaaaattgctaatgcttttgataacaagattgatgctaagaggactttgagagagatcaagcttcttcgacatatggatcatgaaaatattgttgcgatcagagatataattccaccaccacagagagaagcctttaacgatgtttacattgcgtatgagcttatggatactgatctccatcaaattattcgctcgaatcagggtttatctgaggagcactgccagtatttcttgtatcagatcctccgtgggttgaaatacatacattctgcaaatgttttgcacagagacttaaagcctagcaatcttctcttgaatgccaactgtgatttgaagatatgtgattttgggctagctcgtgtcacttctgaaactgactttatgaccgaatatgttgtgacaagatggtatcgtccacctgagctgttgttgaattcatccgactatactgcagcaattgatgtatggtcagtgggttgcatcttcatggagttgatggacagaaaacccctcttccctggcagagatcatgtacaccagctgcgtcttattatggagttgattggcactccttcagaggctgaaatggaatttttaaatgagaatgcaaaacgctatatccgacaacttcctctttaccgtcgacaatcatttactgaaaagttcccgcatgtaaacccagctgctattgatcttgtcgagaaaatgttgacatttgatcccagaaggagaataacagttgaagacgctcttgcacatccttacctaacatcgctccatgatatcagtgacgagcccatttgcatgactccttttagcttcgactttgagcagcatgcgcttacagaggaacagatgaaggagctaatttacagggagtcgattgcatttaatcctgaataccagcgcatgtga

SEQ ID NO: 142075 - protein, 396 aa, Solanum lycopersicum
MDGSVPQTDTMMSDVAAPPAQQPPPPSQPLAGMDNIPATLSHGGRFIQYNIFGNIFEVTAKYKPPIMPIGKGAYGIVCSALNSETNESVAIKKIANAFDNKIDAKRTLREIKLLRHMDHENIVAIRDIIPPPQREAFNDVYIAYELMDTDLHQIIRSNQGLSEEHCQYFLYQILRGLKYIHSANVLHRDLKPSNLLLNANCDLKICDFGLARVTSETDFMTEYVVTRWYRPPELLLNSSDYTAAIDVWSVGCIFMELMDRKPLFPGRDHVHQLRLIMELIGTPSEAEMEFLNENAKRYIRQLPLYRRQSFTEKFPHVNPAAIDLVEKMLTFDPRRRITVEDALAHPYLTSLHDISDEPICMTPFSFDFEQHALTEEQMKELIYRESIAFNPEYQRM

SEQ ID NO: 142076 - DNA, 1113 bp, Petroselinum crispum
  CDS (1)..(1113)
atggctaacccaggcgatggtcagtatgattttcctgcgattgcaacgcatggaggacgcttcattcagtacaatatatttgaaaatttgttcgaggtgactgctaagtatcgccctccgatcatgcctataggccgtggtgcttacggaattgtctgttcgattatgaatacggaggcgaatgagatggttgcgattaagaagattgcgaatgcttttgataattacatggatgccaaaagaactctgagggagattaagcttcttcgtcatttggatcatgagaatatcatagctttaacagatgtaattcctccacctgtaaggaggaatttcagtgatgtttatattgctaccgaacttatggacactgatcttcaccagatcattcgatctgctcaggttttatcagaggagcattctcagtatttcttgtatcagctccttcgaggactaaaatatatacattctgcaaacataatccaccgagacttgaagcctagcaaccttctactgaatgccaattgtgatctgaagatttgtgattttggtctcgctcgtccaaatactgatgatgagtttatgacagaatatgttgtcactagatggtatagagcgcctgagctgctattgaactcttctgattatactgctgctatagatgtttggtctgtgggttgtatctacatggagctaatgaacagaacgcctttatttgccggtagagatcatgtgcacaaaatgcgattgttgactgagttgcttgcagcaccaactgagcccgatcttggatttgttcgaaatgaagattcaagaagatatattctgcagcttcctcgacgtcctcgtctgtcactaagaatgctttatccacaagtccatcctgtagccatcgacctcattgataaaatgcttacatttgatccctccaaaagaattacagtggaagaagcattagctcatccctatctggagagattacatgatgtgtctgatgaaccagtttgctcaaaaccgttctcgtttgagtttgagacggcacatcttggagaagaacagataaaagagatgatttaccaggaggccttatcctttaacccaggcatggcataa

SEQ ID NO: 142077 - protein, 370 aa, Petroselinum crispum
MANPGDGQYDFPAIATHGGRFIQYNIFENLFEVTAKYRPPIMPIGRGAYGIVCSIMNTEANEMVAIKKIANAFDNYMDAKRTLREIKLLRHLDHENIIALTDVIPPPVRRNFSDVYIATELMDTDLHQIIRSAQVLSEEHSQYFLYQLLRGLKYIHSANIIHRDLKPSNLLLNANCDLKICDFGLARPNTDDEFMTEYVVTRWYRAPELLLNSSDYTAAIDVWSVGCIYMELMNRTPLFAGRDHVHKMRLLTELLAAPTEPDLGFVRNEDSRRYILQLPRRPRLSLRMLYPQVHPVAIDLIDKMLTFDPSKRITVEEALAHPYLERLHDVSDEPVCSKPFSFEFETAHLGEEQIKEMIYQEALSFNPGMA

SEQ ID NO: 142078 - DNA, 1125 bp, Petroselinum crispum
  CDS (1)..(1125)
atggagtcaagttctgcagctacagctgatcatacacatatcaaaggtgtgcctactcatggtggacgctatgttcagtacaatgtgtatggtaatctctttgaagtttctcgaaaatatgttcctccaatccgccctgtcggccgtggcgcttatggtatagtttgtgctgctatgaactctgatacgcgtgaggaagttgccatcaagaaaattggtaatgcatttgacaatcgaatagatgccaaaaggacacttcgggaaattaaacttcttcgtcacatgaatcatgaaaatgtaattgcaattaaagacatcataaggcctccacagattgaaagtttcaatgatgtttacattgtttacgaactgatggacacagatcttcatcaaataattcgctctaaccagcaactcactgatgatcattgtcggtattttctttaccaactattgcgaggactgaaatatgttcattctgcaaatgtcctgcatcgtgatttaaagccgagcaatttgctcctcaatgcaaattgtgacctaaaaattggagatttcggccttgcaaggacaacttctgaaactgattttatgactgaatatgttgttactcgctggtaccgagcaccagaattgctccttaattgctcagagtatactgcagcaattgatatctggtcagttggttgcatacttggtgaagttatgaccagacagcccctgttccctgggaaagattatgttcatcagctgagactaattactgagctcataggttcacctgatgatgccagtcttggatttctcagaagtgataatgctcgaagatacgtgaggcagcttccccagtatccaaagcaacaattctctgctagatttcttaacaaatctcctggagctctagatttgctggaaaaaatgctaatctttgatcccaacaggcgcattacagttgacgaggcactttgccacccatacttggcagctcttcatgacataaacgaggaacctgtttgtcctcgcccttttagttttgactttgagcagccaacgtgcactgaagaaaatatcaaggaacttatctggaaggaatctgtgaagttcaatcctgacccgattctctga

SEQ ID NO: 142079 - protein, 374 aa, Petroselinum crispum; identical to SEQ ID NO: 140233

SEQ ID NO: 142080 - DNA, 1164 bp, Petroselinum crispum
  CDS (1)..(1164)
atggacggttcaactcagccatccgacaccgtgatgtccgacgcagctccggcatctcaaaccgccgggatcgagaatattccggcgagtctgagccacggcgggcgtttcattcagtacaacatcttcggtaacatcttcgaagtgactgctaagtataagcctcctatcttgcctatcggtaaaggcgcttatggcatcgtttgttcggcgttgaatttggagacgaatgaacacgtggcaattaagaagattgctaatgctttcgataataaagtcgatgctaagaggactttgcgcgagattaagcttcttcgccacatggatcacgaaaatgttgttgcaattagagatattataccgccacctcagagggggtcatttaatgatgtgtacattgcatatgagcttatggatacagatctccatcaaattattcgttcaaaccaagggctatcagaggagcattgccagtactttttgtatcagatcctccgggggttgaaatacatacattctgcaaacgttctacatagagacttgaaacccagcaatctgcttttaaatgccaattgtgatcttaaaatatgtgattttggattagctcgtgtgacttccgaaactgattttatgacagaatatgttgttacaagatggtacagagcaccagagctattattaaattcatctgattatactgctgccattgatgtatggtcagtgggatgcattttcatggagttgatggacaggaagcctttatttcctggcagagatcacgtacaccaactccgattgctgatggagctgattggcacaccttcagaggcggaactagagtttctgaatgaaaatgcaaaaagatacattaggcagcttcctctttatcgtcggcagtcactgactgaaaaatttccaaatgttcatccttctgctatagatcttgttgagaagatgttgacatttgatcctagaaggagacttacagttgaagatgcactggcacatccctacctcacgtcactgcacgacatcagtgacgagcctgtatgtgctgctccttttagctttgactttgaacagcatgcattgactgaagaacagatgagggagctaatctacagagaggctctcgcattcaatcctgagcatcagcagatgtaa

SEQ ID NO: 142081 - protein, 387 aa, Petroselinum crispum
MDGSTQPSDTVMSDAAPASQTAGIENIPASLSHGGRFIQYNIFGNIFEVTAKYKPPILPIGKGAYGIVCSALNLETNEHVAIKKIANAFDNKVDAKRTLREIKLLRHMDHENVVAIRDIIPPPQRGSFNDVYIAYELMDTDLHQIIRSNQGLSEEHCQYFLYQILRGLKYIHSANVLHRDLKPSNLLLNANCDLKICDFGLARVTSETDFMTEYVVTRWYRAPELLLNSSDYTAAIDVWSVGCIFMELMDRKPLFPGRDHVHQLRLLMELIGTPSEAELEFLNENAKRYIRQLPLYRRQSLTEKFPNVHPSAIDLVEKMLTFDPRRRLTVEDALAHPYLTSLHDISDEPVCAAPFSFDFEQHALTEEQMRELIYREALAFNPEHQQM

SEQ ID NO: 142082 - DNA, 927 bp, Sorghum bicolor; identical to SEQ ID NO: 62945
  CDS (1)..(927)

SEQ ID NO: 142083 - protein, 308 aa, Sorghum bicolor; identical to SEQ ID NO: 62946

SEQ ID NO: 142084 - DNA, 1083 bp, Aplysia californica; identical to SEQ ID NO: 140234
  CDS (1)..(1083)

SEQ ID NO: 142085 - protein, 360 aa, Aplysia californica; identical to SEQ ID NO: 140235

SEQ ID NO: 142086 - DNA, 1119 bp, Marthasterias glacialis; identical to SEQ ID NO: 140236
  CDS (1)..(1119)

SEQ ID NO: 142087 - protein, 372 aa, Marthasterias glacialis; identical to SEQ ID NO: 140237

SEQ ID NO: 142088 - DNA, 1326 bp, Cryptococcus neoformans var
  CDS (1)..(1326)
atggacaacactcctcggcaccttttccagacacccaacaacgtctacatccttcagcagccatggcagtttgtcaaggaactcgggcaaggggcgtacggttgcgtgtcttctgcgaggaactctagtacgggagaaacatgcgcggtgaaaaaggtaacgaatgtgtttcaaaagaagatcttgacaaagcggtgtctgagagagttgaggttgttacatcacttcagagggcataaaaatatcacctgcttgtacgacatggacattgtctttgaccctcctggatcaggacaattccgtgaagtctacttgtacgaagagctcatggaggctgatttacatgccattattcgatctggacaacctctttccgacgcgcacttccaatcattcttatatcaaactctctgtggcctcaagtacattcactctgccaacgtcctccaccgagatctgaaacctggaaacctcctcgtgaatgccgattgcgagctcaagatttgtgatttcggtttagcccgtggtttccagcctggagcagtgcaaacggatcaaggtcaagcagggttcatgactgaatatgtcgccacaagatggtatagagcccccgaaatcatgctttcatttgccaattacacttcaagcatcgatatgtggtctgttggatgtattctcgccgaacttctcggcggtaaacctattttcaagggtgaagattacgtcgatcagctgaacaagatcctcaacctcctcggtacccccactgaagacacactccggagagttggttctcctagagctcaggattacatcagaagcctgcctatcaagccgcgcgtcaagtttgggacgttgtatcctaacgcatctcccttggcgttggatttattgagtaagctgttaacatttgaccctgccaagagatatggctgcgaagaagccctagaacacccgtatctcgctgtatggcatgatcccgccgacgaacccctttgtgaagtccccttcgacttttcctttgaagaagaagattccgtcagcgggatgagggatttgatcctcgaagaggtcagaagtttccgatacctcgtgaggcaacaaactatgcctcctgtaaggaaagactcccatgagctccccccagctcctcctgcacctcaacatcccggtgctggtgttggtcccgcgttccatgaaaagcgaacggcgaaggcgatatggaggaacatcctgggtctgcattggagaaacagttggagaggcagaaattatcatagaatcatatttgtcgagtctgtaactgttatcggaaagcatagatga

SEQ ID NO: 142089 - protein, 441 aa, Cryptococcus neoformans var
MDNTPRHLFQTPNNVYILQQPWQFVKELGQGAYGCVSSARNSSTGETCAVKKVTNVFQKKILTKRCLRELRLLHHFRGHKNITCLYDMDIVFDPPGSGQFREVYLYEELMEADLHAIIRSGQPLSDAHFQSFLYQTLCGLKYIHSANVLHRDLKPGNLLVNADCELKICDFGLARGFQPGAVQTDQGQAGFMTEYVATRWYRAPEIMLSFANYTSSIDMWSVGCILAELLGGKPIFKGEDYVDQLNKILNLLGTPTEDTLRRVGSPRAQDYIRSLPIKPRVKFGTLYPNASPLALDLLSKLLTFDPAKRYGCEEALEHPYLAVWHDPADEPLCEVPFDFSFEEEDSVSGMRDLILEEVRSFRYLVRQQTMPPVRKDSHELPPAPPAPQHPGAGVGPAFHEKRTAKAIWRNILGLHWRNSWRGRNYHRIIFVESVTVIGKHR

SEQ ID NO: 142090 - DNA, 1062 bp, Podospora anserina
  CDS (1)..(1062)
atgagtaacgcacaagctcggggcggtgcccggaagatttccttcaatgtcagcgagcagtacgacatccaggatgttgttggcgaaggtgcctatggtgtggtttgctctgccatccacaagccctcaggccaaaaggttgccatcaagaagatcacgccctttgatcactccatgttctgcctgcggacattgcgtgaaatgaagctcctccggtacttcaaccatgagaacatcatctccattctcgatattcagaagcctagaagctacgaatcatttaatgaggtctacctcatccaggagctgatggagactgatatgcaccgcgtcatccgcacacaggagctctcggacgatcattgccagtacttcatctaccagacgctgcgtgccctcaaggccatgcactctgccaacgttctccaccgcgatttgaagccttccaacttgcttctcaatgccaactgcgatctcaaagtgtgcgatttcggtctggctcgttcggcggcgtcacaggaggacaactcgggtttcatgacagaatacgttgccacccgttggtaccgtgcgcccgagatcatgttgaccttcaaagagtacaccaaggctattgacgtctggtcggtgggctgcattctcgccgagatgctcagcggcaagcccctgttcccaggcaaggactaccaccaccagcttaccctcatcctcgacgtcctcggcacgccaacaatggaggattattatggcatcaagtccagacgcgcgcgcgagtacatccgatcgcttcccttcaagaagaaggtgcccttccgcacgctcttccccaacacgtccgacatggctctcgacctcctcgagaagctgttggccttcaaccccgtcaagcgcatcaccgtcgaggaggcgctcaagcacccatacctcgagccgtaccacgaccccgaggacgagccgaccgcgccgccaatccccgaggagttctttgactttgacaagcacaaggacaacctgagcaaggagcagttgaagcagctgatttaccaggagattatgaggtaa

SEQ ID NO: 142091 - protein, 353 aa, Podospora anserina
MSNAQARGGARKISFNVSEQYDIQDVVGEGAYGVVCSAIHKPSGQKVAIKKITPFDHSMFCLRTLREMKLLRYFNHENIISILDIQKPRSYESFNEVYLIQELMETDMHRVIRTQELSDDHCQYFIYQTLRALKAMHSANVLHRDLKPSNLLLNANCDLKVCDFGLARSAASQEDNSGFMTEYVATRWYRAPEIMLTFKEYTKAIDVWSVGCILAEMLSGKPLFPGKDYHHQLTLILDVLGTPTMEDYYGIKSRRAREYIRSLPFKKKVPFRTLFPNTSDMALDLLEKLLAFNPVKRITVEEALKHPYLEPYHDPEDEPTAPPIPEEFFDFDKHKDNLSKEQLKQLIYQEIMR

SEQ ID NO: 142092 - DNA, 1059 bp, Leptosphaeria maculans
  CDS (1)..(1059)
atgcctcctacggggagtggtagttccaggaagatctccttcaacgtctcagagcagtacgacattcaagatgtcgtgggagagggcgcctatggtgtcgtctgttctgcactgcacaagccatccggccaaaaggtcgccatcaagaagatcacaccattcgatcattccatgttctgtctgagaacgctacgagagatgaagttgctcaggtatttcaaccacgagaacatcatctccattctcgacatccagaagcctcgcaactatgagaccttcaccgaggtctatctcatccaggaactcatggagacggacatgcaccgcgtgatccggacgcaagagctttcggacgaccactgccagtacttcatttaccagactctacgtgcattgaaggcgatgcactcggcgaatgttctgcatcgtgatctcaagccttcgaacctgctcctcaatgcaaactgcgatttgaaagtatgcgatttcggtctcgctcgatcagctgcttctaccgaagacaactctggcttcatgacggaatatgttgccacgcgttggtaccgtgcaccggagatcatgctcacgttcaaggagtatacaaaagccattgacgtgtggagtgtcggctgcattctagcagagatgctgagcgggaagcccctgtttccaggaaaggactaccaccaccagcttaccctcattcttgatgtgcttggcacacctaccatggaggactactacggtatcaagtcgcgccgcgctcgcgagtacatccgatcgctgcccttcaagaagaagattccatggaaagccatgttccccaagaccaacgatctagccttggatctactcgagcgattacttgcattcaatccggtcaagcgcatcacggtagaggaagcactcaagcacccatacctcgagccgtaccatgacccagatgacgagccgaccgctgacccaattcccgaagaatttttcgattttgacaaaaacaaggacaacctcaccaaggagcagttgaagcttctcatctaccaggagatcatgcgataa

SEQ ID NO: 142093 - protein, 352 aa, Leptosphaeria maculans
MPPTGSGSSRKISFNVSEQYDIQDVVGEGAYGVVCSALHKPSGQKVAIKKITPFDHSMFCLRTLREMKLLRYFNHENIISILDIQKPRNYETFTEVYLIQELMETDMHRVIRTQELSDDHCQYFIYQTLRALKAMHSANVLHRDLKPSNLLLNANCDLKVCDFGLARSAASTEDNSGFMTEYVATRWYRAPEIMLTFKEYTKAIDVWSVGCILAEMLSGKPLFPGKDYHHQLTLILDVLGTPTMEDYYGIKSRRAREYIRSLPFKKKIPWKAMFPKTNDLALDLLERLLAFNPVKRITVEEALKHPYLEPYHDPDDEPTADPIPEEFFDFDKNKDNLTKEQLKLLIYQEIMR

SEQ ID NO: 142094 - DNA, 882 bp, Oryza sativa subsp; identical to SEQ ID NO: 62947
  CDS (1)..(882)

SEQ ID NO: 142095 - protein, 293 aa, Oryza sativa subsp; identical to SEQ ID NO: 62948

SEQ ID NO: 142096 - DNA, 1254 bp, Malus micromalus
  CDS (1)..(1254)
atggctgccaaggagtcgaactctgcagctgctgctgcttcgtcggacggaaaaatcaaaaggatgctcacccatggcggtagatatgcgcagtacaatgtgtttggtaacttgttcgaagtctccagcaagtacgtgccccccattaggcctattgggagaggagcttacgggatcgtgtgtgctgctgtcaacgctgaggctcgtgaggaggttgccattaagaagattggtaatgcatttgacaacagaatagatgccaaaaggactttacgagaaattaaacttcttcggcacatggatcatgaaaatgttattgccacaaaagacatcatacggcctccacagaaggagaacttcaatgatgtctacattgtttatgaattaatggacactgatcttcatcagattatacggtccaaccaacctttgaatgatgatcattgtcggtactttctgtatcagttgttacgtgggctcaaatatgtacattcagctggtgttttgcatcgtgatttaaagcccagcaatttgttcatgaatgcaaattgtgaccttaagattggagattttggtcttgccaggacaacatctgaaactgatttcatgactgagtatgttgttactcgttggtaccgtgcaccagaattgctgcttaattgttcggagtacactgcagcaattgatatatggtctgtatgttgcattctaggtgaaatcatgaccagaaaacccctattccctggcaaagattatgtacatcagctgagactcataacagagctcttaggctcacctgatgactccagccttggatttttacgaagtgataatgctcgaagatatgttcgagaactacctcagtacccaaagcggagcttctcgctcgggtttcctaatatgtcacctagctctatagatttgctggagaagatgcttatctttgacccaaacaggcgcattacagttgatgaggctctttcccacccatacttggcgcctcttcatgatatcaacgaagagcctgtctgcccaatgcctttcaattttgattttgagcaaccctcgtttactgaagagaacatcaaggagctcatctggagagagtccgtaaggttcaatccagaatcccatttttcaatggatcatgatataatctgttgtatactcttacaaactaatctcaaaactgattgcaatgacatgtttgtggatactgtaattgtcgaatgtgtgaaaggagtcgatagctga

SEQ ID NO: 142097 - protein, 417 aa, Malus micromalus
MAAKESNSAAAAASSDGKIKRMLTHGGRYAQYNVFGNLFEVSSKYVPPIRPIGRGAYGIVCAAVNAEAREEVAIKKIGNAFDNRIDAKRTLREIKLLRHMDHENVIATKDIIRPPQKENFNDVYIVYELMDTDLHQIIRSNQPLNDDHCRYFLYQLLRGLKYVHSAGVLHRDLKPSNLFMNANCDLKIGDFGLARTTSETDFMTEYVVTRWYRAPELLLNCSEYTAAIDIWSVCCILGEIMTRKPLFPGKDYVHQLRLITELLGSPDDSSLGFLRSDNARRYVRELPQYPKRSFSLGFPNMSPSSIDLLEKMLIFDPNRRITVDEALSHPYLAPLHDINEEPVCPMPFNFDFEQPSFTEENIKELIWRESVRFNPESHFSMDHDIICCILLQTNLKTDCNDMFVDTVIVECVKGVDS

SEQ ID NO: 142098 - DNA, 1182 bp, Nicotiana benthamiana
  CDS (1)..(1182)
atggatggttctggtcagcagtcggacacgatgatgtctgatgcgggggcggagcagccacctccggcggcgcagccggtggctggtatggataatattccggcgacgttgagccacggtggcaggttcattcaatacaatatatttggtaatatatttgaagttactgctaagtataagcctcctattttgcctattggtagaggtgcttacggcatcgtttgttctgctttgaactcggagacaattgagaacgtagcgataaagaaaatcgcgaatgcttttgataacaagattgatgccaagaggactttgagagagatcaagcttcttcggcatatggatcatgaaaacattgttgcgatcagagatataataccaccaccacagagagaagcctttaatgatgtttatattgcgtacgagcttatggatactgatctccatcaaattattcgctctaatcagggtttatctgaggagcactgtcagtatttcttgtatcagatcctccgtgggttgaaatacatacattctgcaaatgttctacacagggacttgaagcctagcaatctcctcttgaatgccaactgtgatttaaagatatgcgattttgggctagctcgtgtcacttctgaaactgactttatgacggaatatgttgtgacaagatggtatcgtccacctgagctgttgttaaattcgtctgactatactgcagcaattgatgtatggtcagtgggttgcattttcatggaattgatggacaggaaacccctatttcctggtagagatcatgtacaccagctgcgtcttattatggagttgattggtactccttcagaggctgaaatggaatttttaaatgagaatgcaaaacgatacatccgacaacttcctctttaccgtcgacaatcattcactgaaaagtttccacatgtacacccagatgcaattgatcttgtcgagacaatgctgacatttgatcccagaaggagaataacagttgaaggtgcacttgcacatccttacctgaactcgctccacgatattagtgacgagcccatttgcatgactccctttagcttcgactttgaacagcatgctcttacggaggaacagatgaaggagctgatttacagggagtcgcttgcatttaatcctgaataccagcacatgtga

SEQ ID NO: 142099 - protein, 393 aa, Nicotiana benthamiana
MDGSGQQSDTMMSDAGAEQPPPAAQPVAGMDNIPATLSHGGRFIQYNIFGNIFEVTAKYKPPILPIGRGAYGIVCSALNSETIENVAIKKIANAFDNKIDAKRTLREIKLLRHMDHENIVAIRDIIPPPQREAFNDVYIAYELMDTDLHQIIRSNQGLSEEHCQYFLYQILRGLKYIHSANVLHRDLKPSNLLLNANCDLKICDFGLARVTSETDFMTEYVVTRWYRPPELLLNSSDYTAAIDVWSVGCIFMELMDRKPLFPGRDHVHQLRLIMELIGTPSEAEMEFLNENAKRYIRQLPLYRRQSFTEKFPHVHPDAIDLVETMLTFDPRRRITVEGALAHPYLNSLHDISDEPICMTPFSFDFEQHALTEEQMKELIYRESLAFNPEYQHM

SEQ ID NO: 142100 - DNA, 1131 bp, Nicotiana benthamiana
  CDS (1)..(1131)
atggctgatgcaaatatgggtggtggtggtggtggtcaatttcctgattttccttcggttttaactcatggtggacaatatgtgcagtatgatatttttggtaatttttttgagatcactaccaagtatcgtcctcctattatgcctattggtcgtggtgcttatggaattgtctgctcggtgttgaatacggagctgaatgagatggttgcagttaagaaaatcgcgaatgcgtttgataattacatggatgctaagaggactctccgtgagattaagctcctccgccatttagaccatgaaaatgtaattggtttaagagatgtgattcctccaccgttacgaagggagttttctgatgtttacattgctactgaactcatggatactgatcttcaccaaataattagatccaaccaaggtttatcagaggatcactgtcagtacttcatgtatcagctcctccgtggcctaaagtacatacattccgcaaatgtccttcatagagatctcaaaccgagcaaccttttgctaaatgcaaattgtgatcttaagatatgtgactttggtcttgctaggccaaacatagagaacgagaatatgacggaatatgttgtaaccagatggtacagggcaccagagcttttgttgaattcttcagattacactgctgctatagatgtttggtctgtcggttgcatcttcatggaacttatgaatagaaagcctttgtttgctggaaaagatcatgtacatcaaatacgcttgctaactgagcttctcggcaccccaacagaagctgatcttggcttcctccaaaatgaagacgcaaagagatacatcagacaactcccacaacatcctcgccagcagttagcaaatgttttccctcatgtgaacccattggctattgatcttgtcgataaaatgttgacactcgatcctactagaagaattacagttgaggaagcattagatcatccctaccttgcaaagctccacgatgcaggtgatgaaccgatctgccccgttccatcctccttcgactttgagcaacaaggaataggagaagagcaaattaaggacatgatatatcaggaagctttgtcgctgaatcctgaatatgcttaa

SEQ ID NO: 142101 - protein, 376 aa, Nicotiana benthamiana
MADANMGGGGGGQFPDFPSVLTHGGQYVQYDIFGNFFEITTKYRPPIMPIGRGAYGIVCSVLNTELNEMVAVKKIANAFDNYMDAKRTLREIKLLRHLDHENVIGLRDVIPPPLRREFSDVYIATELMDTDLHQIIRSNQGLSEDHCQYFMYQLLRGLKYIHSANVLHRDLKPSNLLLNANCDLKICDFGLARPNIENENMTEYVVTRWYRAPELLLNSSDYTAAIDVWSVGCIFMELMNRKPLFAGKDHVHQIRLLTELLGTPTEADLGFLQNEDAKRYIRQLPQHPRQQLANVFPHVNPLAIDLVDKMLTLDPTRRITVEEALDHPYLAKLHDAGDEPICPVPSSFDFEQQGIGEEQIKDMIYQEALSLNPEYA

SEQ ID NO: 142102 - DNA, 1080 bp, Biomphalaria glabrata; identical to SEQ ID NO: 140242
  CDS (1)..(1080)

SEQ ID NO: 142103 - protein, 359 aa, Biomphalaria glabrata; identical to SEQ ID NO: 140243

SEQ ID NO: 142104 - DNA, 1251 bp, Claviceps purpurea; identical to SEQ ID NO: 140244
  CDS (1)..(1251)

SEQ ID NO: 142105 - protein, 416 aa, Claviceps purpurea; identical to SEQ ID NO: 140245

SEQ ID NO: 142106 - DNA, 1071 bp, Trichoderma virens; identical to SEQ ID NO: 140246
  CDS (1)..(1071)

SEQ ID NO: 142107 - protein, 356 aa, Trichoderma virens; identical to SEQ ID NO: 140247

SEQ ID NO: 142108 - DNA, 885 bp, Daucus carota
  CDS (1)..(885)
atggaccagtatgaaaaggttgagaagattggggaggggacgtatggggtagtttataaggctcgtgaccgcgttacaaatgaaactattgctttaaagaaaattcgtttagagcaggaagatgagggagtgccaagcactgctattagagaaatttctttactgaaggagatgcagcatgaaaatattgtcaggctacaagatgttgtgcatagcgagaaacggctgtatctggtatttgaatatctggacctggatctgaagaaacatatggattcatgtccagagtttgcaaaggatccacgtctgattaaaatgtttctgtatcaaatactgcgtggtattgcttattgtcattcccatagagttctgcatcgcgatctcaaaccccaaaacctgctcatagatcgccgtaccaatgctctaaagcttgcagattttggacttgccagggcatttggaattccagtcaggacatttacccacgaggtggtgacactttggtacagggccccagagatactccttggatcccgccactactccacaccagttgatgtgtggtcagttggttgtatttttgctgagatggtgaaccaacagccattgtttccgggcgattctgagattgatgaattatttaagattttcagaattgtgggtaccccaaatgaggatacctggcctggagtaacagctcttcctgattttaagtctgccttcccaaaatggccatctaaggaactgggaaacgtagtcccaaatctcgatgtggccggtctcaatctcctcaaaaaaatgctttgcttggatcccagcagaagaattactgccaggagtgcacttgagcatgaatacttcaaggatatcgggattgttccttaa

SEQ ID NO: 142109 - protein, 294 aa, Daucus carota; identical to SEQ ID NO: 62956

SEQ ID NO: 142110 - DNA, 885 bp, Coffea arabica
  CDS (1)..(885)
atggatcagtatgagaaggtggagaagataggggaaggaacgtatggagtggtgtacaaggcacgtgacaagtcgactaatgaaactattgctttgaagaagattcgtctggagcaggaagatgaaggtgtgccgagcactgctattagagaaatttctctcttgaaagagatgcagcatggaaacattgtcaggttgcaggatgtggtgcacagcgagaagcgcttatatcttgtatttgagtatctggacttggatctgaagaagcacatggattcctgtccagaattctctaaggacccacgccttgtaaaaatgtttctgtatcaaatccttcgtggtatcgcatattgccattctcacagagttcttcatagagacttgaaaccacaaaacttgctcatagatcgccgtactaatgcactgaagcttgcagattttggattggcccgtgcctttggtattcctgtcaggacatttactcatgaggttgttacgctgtggtacagggcaccagaaatactacttggatcacgccactattctactcctgttgacgtgtggtcagttggctgcatatttgctgagatggtgaaccagcggcctttgttccctggggattctgagatagatgaactcttcaaaattttcagagttatgggcactccaaatgaggatacttggcctggagtaacctctctgcctgatttcaagtctgcatttccaaggtggctttcacaggatctggcaactgtggttcccaatcttgatgctgctggtcttgatctcctgcgtaaaatgctgtgcctggatcccagcaagagaatcacagctaggaatgcacttgagcatgagtacttcaaagatatcggttttgtcccttaa

SEQ ID NO: 142111 - protein, 294 aa, Coffea arabica; identical to SEQ ID NO: 62958

SEQ ID NO: 142112 - DNA, 1119 bp, Solanum tuberosum
  CDS (1)..(1119)
atggatgctgaaaacattgaaaattcagtggaaatcaaaggaattccaactcgggatggcaaatatgttgagtacaatgttgtgggtaacttctttgaagttacctcaaagtatgtccctccaattcaacccgtaggccgtggagcttacggaatcgtctgctgtgctacgaattcggagacgaaggaggagatagccatcaaaaaaattgggagtgcatttgaaaatagaattgatgcaaagaggactcttcgcgagatcaaacttctttcacacatggatcatgaaaatgtcatcaaaataaaagatatagtaagaccaccagacagagaggaattcaatgatgtgtatattgtgtatgagctaatggatactgatctgcatcagataatacgctcttcacaggccctcacagaagatcattgtcaatactttctctatcaattattacgtggactcaagtatgtacattctgctaatgttcttcaccgggatctgaaacctagcaacttgctactcaatgcaaactgtgacctcaagatatgtgattttgggcttgctagaaccacttcagaggcagatttcatgacagagtatgttgttactcgatggtatagggcacccgagttactacttaattgtactgaatatacttcagcaattgatatatggtcagttggttgcattttgatggaactcattaagagagagcctcttttccccggcagagactatgctcagcaattggggcttatcattaagttattaggttcaccggaggagtctgatcttggattcctaaggagtgacaatgctaggaagtacgtcaagcagctgcctcaagttccaaagcaaccattctccgagcatttcccagatgtgtctcctttagctcttgatcttgcagaaaagatgttggttttcgacccagctaaacgcataactgttgaggatgcattgaatcatccattcatgataagtctccatgagataaatgaggaaccagtttgcacttctcctttcaatttcgactttgaacaagcatctctaagcgaggaagacattaaggagctcatatggaatgaggctcttaagtttgatcccgatacaaccaagtga

SEQ ID NO: 142113 - protein, 372 aa, Solanum tuberosum; identical to SEQ ID NO: 140249

SEQ ID NO: 142114 - DNA, 1140 bp, Solanum tuberosum
  CDS (1)..(1140)
atggctaatcaaaccggcggagcttcaagtaccggcagtcgtgatatcagaggagttctcatacacggtggtcagtacgtccgttacaatgtttacggcagcttatttgaagtttccagcaaatacgttcctccaattcgtccaatcggacgcggcgcttacggccttgtatgtgctgctgtaaattctgagacgcgtgaggaagttgcgattaagaaaataggaaatgcatttgataacagaattgatgcgaagaggacattgagagaaattaagctacttcggcacttggaccacgaaaacattgtcgcaatcaaagacctcatcaggccaccaaagaaagaagcttttaatgatgtgtatatagtttctgaattaatggatacagatcttcatcagattattcgatctgaacagcctttgacaaatgatcactgccagtacttcatgtatcagctattacgtggactaaaatatgtacactcagcaaatgtcttacatcgtgatcttaagccaagcaatttgttcctaaatgcaaattgcgacctcaagattggagactttgggttggcaaggacaacttctgagacagatttcatgactgagtacgttgttactcgctggtatcgagcacctgaattgctccttaactgttcagaatacactggagcaattgatgtttggtctgttggttgtattcttggtgaaataatgacaagagaacctttgtttcctggaaaagattatgtgcagcagctgagactcattactgagctactaggttcacctgatgatgccagccttcaatttctgagaagtgataatgcccgaagatatgtccgacagcttcctcaatatcctaagcaacaattttctgcaaggtttcccagcatgtctcctttggctgtcgatttgcttgaaaagatgcttgtctttgacccaacccgtcggattacagttgatgaggctctttgtcacccatttttgtcatctcttcatgacctcaatgatgagccgatttgccccagtccattcagtttggatttcgacgagccctcaatcactgaagaaaagatcaaggaactgatttggagggagtccgtgaagttttacccggactttgttgatcaaaatatatga

SEQ ID NO: 142115 - protein, 379 aa, Solanum tuberosum
MANQTGGASSTGSRDIRGVLIHGGQYVRYNVYGSLFEVSSKYVPPIRPIGRGAYGLVCAAVNSETREEVAIKKIGNAFDNRIDAKRTLREIKLLRHLDHENIVAIKDLIRPPKKEAFNDVYIVSELMDTDLHQIIRSEQPLTNDHCQYFMYQLLRGLKYVHSANVLHRDLKPSNLFLNANCDLKIGDFGLARTTSETDFMTEYVVTRWYRAPELLLNCSEYTGAIDVWSVGCILGEIMTREPLFPGKDYVQQLRLITELLGSPDDASLQFLRSDNARRYVRQLPQYPKQQFSARFPSMSPLAVDLLEKMLVFDPTRRITVDEALCHPFLSSLHDLNDEPICPSPFSLDFDEPSITEEKIKELIWRESVKFYPDFVDQNI

SEQ ID NO: 142116 - DNA, 1185 bp, Solanum tuberosum
  CDS (1)..(1185)
atggatggttcagctcagcaaacggacacggtgatgtcggatgcggcggcgggacagcaaccagctacgccgccgctgccgatggccggaatggagaacattcctgcgacgttgagtcacggtggccggtttattcaatacaacatttttggtaatatatttgaagttactgcaaagtataagcctccaattatgccaatcggtaaaggagcttatggtattgtttgttctgctttgaattcggagacaaatgaacatgttgcaataaagaaaattgcgaatgcttttgataacaaaattgatgccaagagaactttgcgtgagatcaagcttcttcgacatatggatcatgaaaatattgttgcgataagagatataattccaccacctcaaagagaagcatttaatgatgtctatattgcatatgagcttatggacactgatctccatcaaattattcgctctaatcaaggattatcagaagaacattgccagtatttcttgtatcagatcctccgtgggttgaaatacatacattctgcaaatgttttgcatagggacttgaagcctagcaatctcctcttgaatgccaattgtgatttaaagatatgtgattttgggcttgctcgtgtcacttctgaaactgactttatgaccgaatatgttgtgacaagatggtaccgacctccggagctgttgttaaattcttctgactatactgcagctattgatgtctggtcagttggttgcattttcatggaactgatggacagaaagcctctgtttcctggtagagatcatgtacaccagctacgtctgcttatggagttgattggcaccccttctgaggctgaaatggagtttttgaatgagaatgcaaagcggtacatcagacaacttcctctttaccgtcgacaatcatttgttgaaaaatttccacatgtaaaccctgctgctattgatcttgttgagaaaatgttgacatttgatcccagaaggagacttactgttgaaggcgcgcttgcacacccttacctaacatcgcttcatgatattagtgacgagcccgtttgcatgactccttttagcttcgattttgaacagcatgcccttaccgaggaacaaatgaaagagctgatttacagggagggtcttgcatttaatcccgaataccagcacatgtga

SEQ ID NO: 142117 - protein, 394 aa, Solanum tuberosum
MDGSAQQTDTVMSDAAAGQQPATPPLPMAGMENIPATLSHGGRFIQYNIFGNIFEVTAKYKPPIMPIGKGAYGIVCSALNSETNEHVAIKKIANAFDNKIDAKRTLREIKLLRHMDHENIVAIRDIIPPPQREAFNDVYIAYELMDTDLHQIIRSNQGLSEEHCQYFLYQILRGLKYIHSANVLHRDLKPSNLLLNANCDLKICDFGLARVTSETDFMTEYVVTRWYRPPELLLNSSDYTAAIDVWSVGCIFMELMDRKPLFPGRDHVHQLRLLMELIGTPSEAEMEFLNENAKRYIRQLPLYRRQSFVEKFPHVNPAAIDLVEKMLTFDPRRRLTVEGALAHPYLTSLHDISDEPVCMTPFSFDFEQHALTEEQMKELIYREGLAFNPEYQHM

SEQ ID NO: 142118 - DNA, 1191 bp, Solanum tuberosum
  CDS (1)..(1191)
atggatgcttcagctccgcaaatggacacgatgatgccggatgtggctgcccctgcggttcagcaaccacctccaccaccgcaaccgctgcccggaatggataatattccggcgacgttaagccatggtggcaggttcattcaatacaacatatttggtaatatttttgaagttactgctaagtataaacctcctattatgcctattggtaaaggtgcttatggaatcgtttgttcggctttgaattcggagacaaatgaaaatgtagcaattaagaaaattgctaatgcttttgataacaagattgatgctaagaggactttgagagagatcaagcttcttcgacatatggatcatgaaaacattgttgcgatcagagatataattccaccaccacagagagaagcctttaatgatgtttatattgcatatgagcttatggatactgatctccatcaaattattcgctcgaatcagggtttatctgaggagcactgccagtatttcttgtatcagatcctccgtgggttgaaatacatacattctgcaaatgttttgcacagagacttaaagcctagcaatcttctcttgaatgccaactgtgatttgaagatatgcgattttgggctagctcgtgtcacttctgaaaccgactttatgaccgaatatgtcgtgacaagatggtatcgtccacctgagctgttgttgaattcgtccgactatactgcagcaattgatgtatggtcagtgggttgcatcttcatggagttgatggacagaaaacccctcttccctggcagagatcatgtacaccagctgcgtcttattatggagttgattggcactccttcagaggctgaaatggagtttttaaatgagaatgcaaaacgatacatccgacaacttcctctttaccgtcgacaatcatttactgaaaagttcccgcatgtaaacccagctgctattgatcttgtcgagaaaatgttgacatttgatcccagaaggagaataacagttgaagacgcacttgcacatccttacctagcatcgcttcatgatatcagtgacgagcccatttgcatgactccttttaatttcgactttgaacaacatgcccttacagaggaacagatgaaggagctgatttacagggagtctattgcatttaatcctgaataccagcgcatgtga

SEQ ID NO: 142119 - protein, 396 aa, Solanum tuberosum
MDASAPQMDTMMPDVAAPAVQQPPPPPQPLPGMDNIPATLSHGGRFIQYNIFGNIFEVTAKYKPPIMPIGKGAYGIVCSALNSETNENVAIKKIANAFDNKIDAKRTLREIKLLRHMDHENIVAIRDIIPPPQREAFNDVYIAYELMDTDLHQIIRSNQGLSEEHCQYFLYQILRGLKYIHSANVLHRDLKPSNLLLNANCDLKICDFGLARVTSETDFMTEYVVTRWYRPPELLLNSSDYTAAIDVWSVGCIFMELMDRKPLFPGRDHVHQLRLIMELIGTPSEAEMEFLNENAKRYIRQLPLYRRQSFTEKFPHVNPAAIDLVEKMLTFDPRRRITVEDALAHPYLASLHDISDEPICMTPFNFDFEQHALTEEQMKELIYRESIAFNPEYQRM

SEQ ID NO: 142120 - DNA, 1089 bp, Halocynthia roretzi; identical to SEQ ID NO: 140250
  CDS (1)..(1089)

SEQ ID NO: 142121 - protein, 362 aa, Halocynthia roretzi; identical to SEQ ID NO: 140251

SEQ ID NO: 142122 - DNA, 1068 bp, Trichoderma atroviride
  CDS (1)..(1068)
atgtctcggtcgaccgcccccaatgcgtcagcgtcgcgcaagatctccttcaatgtcagcgagcagtatgatattcaggatgtagttggtgaaggagcctacggtgttgtttgctccgccattcacaagccgtcaggacaaaaggttgccatcaagaagatcacccccttcgaccattccatgttctgtctgcgaaccctgcgagagatgaagctgctgcgctatttcaaccacgaaaacatcatctccatcctcgatatccagaagcctcgaagctatgatagcttcaacgaggtctacctcattcaggaactcatggagacggatatgcacagagttatccgcacccaagatctatccgacgatcactgccagtacttcatttaccagacgctgcgtgcgctcaaagctatgcactcggccaatgttctgcaccgagatctcaagccctccaacttgctgttaaatgccaactgcgatctgaaagtctgcgattttggtctggccagatctgccgcttcccaggaggacaactcgggtttcatgacggaatatgtcgctacgcgatggtatcgtgcgcccgagatcatgttgacctttaaggagtacaccaaggccattgatgtttggtccgttggctgtatcctggctgagatgctgagcggcaagcctctgttccctggcaaagattaccaccaccagctgactctgattctggatgtgctcggcacacccactatggaggactactacggcatcaagtctcggcgagcacgagagtacatccgctcgctgcctttcaagaagaaggtgccattccgcaccttgttccccaagacgtctgacctggcactcgacctcctggagaagctgcttgcattcaaccccgtgaagcgaatcacggtagaggatgccctcaagcacccatacctcgagccctaccacgaccctgaggacgagcccactgcgcctccgatcccggaggaatttttcgatttcgacaagcacaaagataccctgagcaaggagcagctgaagcagttgatttaccaagagattatgcggtaa

SEQ ID NO: 142123 - protein, 355 aa, Trichoderma atroviride
MSRSTAPNASASRKISFNVSEQYDIQDVVGEGAYGVVCSAIHKPSGQKVAIKKITPFDHSMFCLRTLREMKLLRYFNHENIISILDIQKPRSYDSFNEVYLIQELMETDMHRVIRTQDLSDDHCQYFIYQTLRALKAMHSANVLHRDLKPSNLLLNANCDLKVCDFGLARSAASQEDNSGFMTEYVATRWYRAPEIMLTFKEYTKAIDVWSVGCILAEMLSGKPLFPGKDYHHQLTLILDVLGTPTMEDYYGIKSRRAREYIRSLPFKKKVPFRTLFPKTSDLALDLLEKLLAFNPVKRITVEDALKHPYLEPYHDPEDEPTAPPIPEEFFDFDKHKDTLSKEQLKQLIYQEIMR

SEQ ID NO: 142124 - DNA, 873 bp, Juglans nigra x Juglans regia
  CDS (1)..(873)
atggaccagtacgagaaggtggagaagattggggaaggaacctatggtgtggtatataaggctcgtaaccgtaagacgaatcagactctagctttaaagaagattcgcttggagcaggaagacgagggagtaccaagcacggcaatacgggaaatctccctcttgaaagaaatgcagcatgggaacattgtcaagttacaggacgtagtgcacggcgagaagcgcttgtatctggtttttgagtaccttgacttggatttgaagaagcacatggattcatctccagaatttgcaaatgatctacgccaaataaaaatgtttcttcatcaaattctccgtggcattgcttactgtcattcccatagagttcttcatcgagatctgaaaccccagaatttgctaatagatcgccgcagcaattcgctaaagcttgcagactttgggctggccagagcatttggtattcctgtcaggacatttacacatgaggtggtgactctctggtacagagctccagaaatattgcttggatcccgccattactctacccctgttgatgtgtggtcagtcggttgcatcttcgccgaaatggttaaccaacggccattatttcctggcgactctgagattgatgaacttttcaagattttcagagtcttgggtactccaaatgaggatacatggcctggtgtgacttctttgcccgattataaaggtgcctttcccaaatggcctcctaaggatctagctgctgtggtttcaagtctggattcaaccggagttgatcttctttctaaaatgctctccttggatcccagcagaaggatcacggccaggactgccctcgagcatgaatacttcaaagatatctga

SEQ ID NO: 142125 - protein, 290 aa, Juglans nigra x Juglans regia; identical to SEQ ID NO: 62966

SEQ ID NO: 142126 - DNA, 885 bp, Helianthus annuus
  CDS (1)..(885)
atggagcagtacgagaaggttgagaagattggtgaaggaacatatggtgtggtctacaaggctcgtgacaaagtgaccaatgaaacaattgctttgaaaaagatccgtttggagcaagaagatgagggtgtcccgagcacggctatcagagagatttcactgttgaaggagatgcaacatggaaacattgtcaggttacaggatgttgtgcacagtgacaaacgattgtatctagtttttgagtatctggaccttgatttgaagaagcacatggactcgtgtccagagttttcaaaggatccacgccttgtaaaaacgtttctttatcaaatcctacgtggcattgcttattgtcattcccatagagttctccacagagatctaaaacctcaaaacttgttaattgatcgccgtaccaatgcactaaaacttgccgattttggattggccagggcctttggtatccctgtcaggacattcacacatgaggtggtgacactgtggtatagagcccccgaaattcttcttgggtcccgtcactattctactcctgttgatgtgtggtccgttggttgtatatttgctgagatggtgaaccagcgaccactctttcctggagactcagagattgatgaacttttcaagattttcaggatcatgggaactccaaatgaagagacatggcctggcgtcacttctctgcctgactttaagtccgcctttccaaagtggtcatcaaaggatctggcaaccgtggtcccgaatcttgaaaaaaccggtctcgatctcttacgtaaaatgctgtgcttggatcccagtaaaagaattacagcccggaccgcactggagcatgaatacttcaaagatatcggattcgtgccataa

SEQ ID NO: 142127 - protein, 294 aa, Helianthus annuus; identical to SEQ ID NO: 62970

SEQ ID NO: 142128 - DNA, 1128 bp, Nicotiana tabacum
  CDS (1)..(1128)
atggctgatgcaaatatgggtgccggtggaggtcaattccctgattttccttcggttttaactcacggcggacaatatgtacagtatgatatttttggtaatttctttgagatcactaccaagtatcgtcctcctattatgcctattggtcgtggtgcttatggaattgtctgctcggtgttgaatacggagctgaatgagatggttgcagttaagaaaattgcgaatgcgtttgacaattacatggatgctaagaggactctccgtgagattaagcttcttcgccatttagaccatgaaaatgtaattggtttaagagacgtgattcctccacccttacgaagggagttttctgatgtttacattgctactgaactcatggacactgatcttcaccaaataattagatccaaccaaggtttatcagaggatcactgtcagtacttcatgtatcagctcctccgtggcctaaaatacatacattccgcgaatgttcttcatagagatctcaaaccgagcaaccttttgctaaatgcaaattgtgatcttaagatatgtgactttggtcttgctaggccaaacatagagaacgagaatatgacggaatatgttgtaaccagatggtacagggcaccagagcttttgttgaactcttcagattacactgctgctatagatgtttggtctgtcggttgcatcttcatggaacttatgaatagaaaacctttgtttgctggaaaagatcatgtacatcaaatacgcttgttaaccgagtttcttggcaccccaacagaagctgatcttggcttcctccaaaatgaagatgcaaagagatacatcaggcaactcccacaacatcctcgccagcagttagcagaagttttccctcatgtgaacccattggctattgatcttgtcgataaaatgttgacactcgatcctactagaagaattacagttgaggaagcattagatcatccctaccttgcaaagctccacgatgcaggtgacgaaccgatctgccctgttccattctcctttgactttgagcaacaaggaataggagaagagcaaattaaggacatgatatatcaggaagctttgtcactgaatcctgaatatgcttaa

SEQ ID NO: 142129 - protein, 375 aa, Nicotiana tabacum
MADANMGAGGGQFPDFPSVLTHGGQYVQYDIFGNFFEITTKYRPPIMPIGRGAYGIVCSVLNTELNEMVAVKKIANAFDNYMDAKRTLREIKLLRHLDHENVIGLRDVIPPPLRREFSDVYIATELMDTDLHQIIRSNQGLSEDHCQYFMYQLLRGLKYIHSANVLHRDLKPSNLLLNANCDLKICDFGLARPNIENENMTEYVVTRWYRAPELLLNSSDYTAAIDVWSVGCIFMELMNRKPLFAGKDHVHQIRLLTEFLGTPTEADLGFLQNEDAKRYIRQLPQHPRQQLAEVFPHVNPLAIDLVDKMLTLDPTRRITVEEALDHPYLAKLHDAGDEPICPVPFSFDFEQQGIGEEQIKDMIYQEALSLNPEYA

SEQ ID NO: 142130 - DNA, 1257 bp, Glomerella lagenarium
  CDS (1)..(1257)
atgggtgacttgcagggacgtaaggtgttcaaggtcttcaaccaagacttcatcgtcgatgagcgatacaccgtcacaaaggagcttggccagggagcttacggcattgtctgtgccgccgtcaacaatcaaacccaagagggcgtcgccatcaaaaaggtcacaaatgtcttcagcaaaaagatcctcgccaagcgcgcactgcgcgaaattaagttgctccagcatttcaggggacatcgcaatatcacctgcctctacgatatggacattccccgacccgacaacttcaacgagacctatctttacgaggagctgatggaatgcgacctggccgccattattcgttccggccagccccttaccgacgcccacttccaatccttcatctatcagatcctctgcggtctcaagtacatccactccgccaacgtcctccaccgcgaccttaagcccggtaacctgctggtcaatgccgactgcgagctcaagatttgtgattttggtctggcgcgtggtttttctgtcgacccggaggagaatgctggctacatgacggagtacgtggccaccagatggtaccgtgcccccgagatcatgttgagcttccagagctacaccaaagctatcgacgtctggtccgttggatgcatcttggctgagctcctcggcggccgcccctttttcaagggccgcgactacgtcgatcagctgaaccagatcttgcacatcctcggaacccccaacgaggagacgctctcccgcatcggctcgccccgcgctcaggaatacgtccgcaacctgccgttcatgccaaagaagcccttcccccagctgtttgcccaggcaaaccccgacgccctcgacctcctcgaccgcatgctcgccttcgacccctcgagccgcatcagcgtcgagcaggcgctcgagcacccctacctgcacatctggcacgatgcgtctgacgagcccgattgccccaccactttcaacttcgactttgaagtcgtcgaggacgtgggcgatatgcgcaagatgatcctggaggaggtctaccgcttccgtcagctcgttcgcaccgtccccggcagcacccaagccggcgcgcaggctgctggacaagctggtgccggtcaggtgcccattccctctggaaaccccggctggacctcgtcggatccccgaccccaagagtatgttggtcagggcggcggtctcgaggccgacctggctggtggtctcgaccaccgaaggtga

SEQ ID NO: 142131 - protein, 418 aa, Glomerella lagenarium
MGDLQGRKVFKVFNQDFIVDERYTVTKELGQGAYGIVCAAVNNQTQEGVAIKKVTNVFSKKILAKRALREIKLLQHFRGHRNITCLYDMDIPRPDNFNETYLYEELMECDLAAIIRSGQPLTDAHFQSFIYQILCGLKYIHSANVLHRDLKPGNLLVNADCELKICDFGLARGFSVDPEENAGYMTEYVATRWYRAPEIMLSFQSYTKAIDVWSVGCILAELLGGRPFFKGRDYVDQLNQILHILGTPNEETLSRIGSPRAQEYVRNLPFMPKKPFPQLFAQANPDALDLLDRMLAFDPSSRISVEQALEHPYLHIWHDASDEPDCPTTFNFDFEVVEDVGDMRKMILEEVYRFRQLVRTVPGSTQAGAQAAGQAGAGQVPIPSGNPGWTSSDPRPQEYVGQGGGLEADLAGGLDHRR

SEQ ID NO: 142132 - DNA, 1068 bp, Gibberella zeae
  CDS (1)..(1068)
atgtctcgagcgaacccccctaacgctgcggggtcccgcaagatctccttcaacgtgagcgagcaatatgatatccaagatgtggtcggcgaaggcgcttatggtgtcgtctgttccgccattcacaagccctcgggccaaaaggtcgccatcaagaagatcactcctttcgatcactccatgttctgtctaagaactctgcgagagatgaagctgctgcgatacttcaaccacgagaacatcatttctattctcgacattcagaagccccgaagttacgagtcatttcaggaagtctatctgatccaggagctgatggagacggatatgcaccgtgtcatccgcacacaggatctttccgacgaccactgccagtacttcatctaccagaccctccgagccctcaaggcgatgcactcggccaacgtgctgcaccgagacttgaagccctccaacctcctcctcaacgccaactgtgatctcaaggtctgcgatttcggtcttgcgcgatccgctgcctctcaggaggataactctggtttcatgaccgaatatgtcgcgactcgatggtaccgtgcgcctgagatcatgttgactttcaaggagtacaccaaggccatcgatgtgtggtcggtcggctgtatcctcgctgagatgctcagcggcaagcctcttttccccggaaaggattaccaccaccagttgactcttattctggatgtgttgggcacacccaccatggaggattactacggaatcaagtcgcgccgtgctcgagaatacatccgatcgctccccttcaagaagaaggttcccttccgaactctattccccaagacatcggatctggccctcgacctgctcgagaagctcctcgcattcaaccctgttaagcgcattactgtggaggaagctctgaagcacccataccttgagccttaccacgaccccgaggacgagccaacagcgcccccaatccccgaggagttcttcgactttgacaagcacaaagacaacctgagcaaggagcagctgaagcagttgatctaccaggtgatcatgtggtaa

SEQ ID NO: 142133 - protein, 355 aa, Gibberella zeae
MSRANPPNAAGSRKISFNVSEQYDIQDVVGEGAYGVVCSAIHKPSGQKVAIKKITPFDHSMFCLRTLREMKLLRYFNHENIISILDIQKPRSYESFQEVYLIQELMETDMHRVIRTQDLSDDHCQYFIYQTLRALKAMHSANVLHRDLKPSNLLLNANCDLKVCDFGLARSAASQEDNSGFMTEYVATRWYRAPEIMLTFKEYTKAIDVWSVGCILAEMLSGKPLFPGKDYHHQLTLILDVLGTPTMEDYYGIKSRRAREYIRSLPFKKKVPFRTLFPKTSDLALDLLEKLLAFNPVKRITVEEALKHPYLEPYHDPEDEPTAPPIPEEFFDFDKHKDNLSKEQLKQLIYQVIMW

SEQ ID NO: 142134 - DNA, 1539 bp, Solanum lycopersicum
  CDS (1)..(1539)
atggcggtggctgcttttggtcagttgaatcttgatgaatcgccactgtggggttcccgaagtatcgaatgctttgaaaagcttgaacaaatcggtgaaggaacttatgggcaagtgtacatggccagagataaacaaactggggagattgttgctttgaaaaagatacgtatggacaatgaaaaggaggggttccctataacagccatccgtgagattaaaattctaaagaaattgcagcatgaaaatgtcattaagctgttagagatagtaacctctcaaggtcctgaagaggatgaaccagagaagctaggaatagatagtaacaagtacaagggaaacatctacatggtttttgaatacatggatcatgacttgactggccttgctgatcgaccagggttaagattcacaattccgcagattaaatgctacatgaagcaactgcttactggtcttcattactgccatattaatcaagttcttcacagagatattaaaggctctaatcttctgatagataatgaaggaaatctgaagcttgctgattttggtttagcccgctcattttctggtgatcataatgctaatctgacaaatcgtgttattacactgtggtacagacctccggaattgttgcttggagccacaaagtatggacccgctgttgacatgtggtccgttggttgtatatttgctgaacttttatttggaaagccaatcttacctgggaaaaatgagcctgaacaattgaacaaaatatttgagctttgtggaacacctgatgagattaactggcctggtgtatcaaagattccttggtacagcaagttcaagccagcaaggccaatgaaaagacgagttagagaggtctttaggcattttgatcgccatgctttggatttattagacaaaatgctgaatcttgacccatctcagagaatatgtgcaaaggatgctctagatggtgaatatttctggaccgaccccttaccttgtgatcctagaagcctacctaaatacgaatcatcacatgagttccagactaagaaaaagaggcaacagcagagacagaatgaagaaatggccaaaaggcacaagctgcagcacccacagcaacattcgcgcctccctcctatccaacagcctggtcattcccagcactggggtggatctactcatcaaatgagcaattcccagcctgcaatatctgctggggctggtcatcatcagtttggaaagcctcgtggtactggaggatcaaatcgatatcctccaggtggaaaccctggtgggggctattatcaagatcgtggggcacagggcggaggttacagtagtggggcatatccacctcagggacgagcccctccttttcccggcagtgggttggctcccagtggtccccggggaccgagtggtggatatggtggtccacctaattactcccaaagtggtcaatatggaggttctggtgcagggagaggttctaaccagatgagtggaaaccgtaaccagcaatatggttggcagcaatag

SEQ ID NO: 142135 - protein, 512 aa, Solanum lycopersicum
MAVAAFGQLNLDESPLWGSRSIECFEKLEQIGEGTYGQVYMARDKQTGEIVALKKIRMDNEKEGFPITAIREIKILKKLQHENVIKLLEIVTSQGPEEDEPEKLGIDSNKYKGNIYMVFEYMDHDLTGLADRPGLRFTIPQIKCYMKQLLTGLHYCHINQVLHRDIKGSNLLIDNEGNLKLADFGLARSFSGDHNANLTNRVITLWYRPPELLLGATKYGPAVDMWSVGCIFAELLFGKPILPGKNEPEQLNKIFELCGTPDEINWPGVSKIPWYSKFKPARPMKRRVREVFRHFDRHALDLLDKMLNLDPSQRICAKDALDGEYFWTDPLPCDPRSLPKYESSHEFQTKKKRQQQRQNEEMAKRHKLQHPQQHSRLPPIQQPGHSQHWGGSTHQMSNSQPAISAGAGHHQFGKPRGTGGSNRYPPGGNPGGGYYQDRGAQGGGYSSGAYPPQGRAPPFPGSGLAPSGPRGPSGGYGGPPNYSQSGQYGGSGAGRGSNQMSGNRNQQYGWQQ

SEQ ID NO: 142136 - DNA, 1068 bp, Claviceps purpurea; identical to SEQ ID NO: 140256
  CDS (1)..(1068)

SEQ ID NO: 142137 - protein, 355 aa, Claviceps purpurea; identical to SEQ ID NO: 140257

SEQ ID NO: 142138 - DNA, 1116 bp, Nicotiana tabacum; identical to SEQ ID NO: 140258
  CDS (1)..(1116)

SEQ ID NO: 142139 - protein, 371 aa, Nicotiana tabacum; identical to SEQ ID NO: 140259

SEQ ID NO: 142140 - DNA, 1068 bp, Gibberella fujikuroi
  CDS (1)..(1068)
atgtctcgatcgaacccccctaacgctgcggggtcccgcaagatctcgttcaacgtgagcgagcagtatgatattcaggatgttgttggtgagggcgcctacggtgttgtctgctctgccattcacaagccctccggccaaaaggtcgccatcaagaagatcacccctttcgatcactccatgttctgtctaagaaccctgcgagagatgaagttgttgcgatatttcaaccacgagaacatcatctccattctcgatatccagaagccccgaaactacgagtcatttaatgaagtctacttgatccaggagctgatggagacggatatgcaccgagtcatccgcacccaggacctttctgacgaccactgccagtacttcatctatcagaccctccgcgccctcaaggccatgcactcagccaacgtgctgcaccgagacttgaagccctccaacctcctcctcaacgccaactgtgatctcaaggtctgcgattttggtcttgcgcgatccgctgcttcgcaggaggacaattccggtttcatgactgaatatgtggcgactcgatggtatcgtgcgcccgagatcatgttgactttcaaggagtacaccaaggctatcgatgtgtggtcggttggctgcattctcgccgagatgctcagcggcaagccactgttccctggcaaggactaccaccaccagttgacactcattctggacgtgctgggcacgcccactatggaagactactacggaatcaagtcgcgccgcgctcgagaatacattcgatcgcttcccttcaagaaaaaggttcccttccgaactctattcccccaagacctcggatctgccctcgacctgctcgagaagctcctcgcattcaatcctgttaagcgcatcactgtggaggaggctctgaagcacccataccttgagccttaccacgatcccgaggacgagccaacagcacccccgatccccgaggagttctttgactttgacaagcacaaagacaacctgagcaaggagcagctgaagcagttgatctaccaggagattatgaggtaa

SEQ ID NO: 142141 - protein, 355 aa, Gibberella fujikuroi
MSRSNPPNAAGSRKISFNVSEQYDIQDVVGEGAYGVVCSAIHKPSGQKVAIKKITPFDHSMFCLRTLREMKLLRYFNHENIISILDIQKPRNYESFNEVYLIQELMETDMHRVIRTQDLSDDHCQYFIYQTLRALKAMHSANVLHRDLKPSNLLLNANCDLKVCDFGLARSAASQEDNSGFMTEYVATRWYRAPEIMLTFKEYTKAIDVWSVGCILAEMLSGKPLFPGKDYHHQLTLILDVLGTPTMEDYYGIKSRRAREYIRSLPFKKKVPFRTLFPQDLGSALDLLEKLLAFNPVKRITVEEALKHPYLEPYHDPEDEPTAPPIPEEFFDFDKHKDNLSKEQLKQLIYQEIMR

SEQ ID NO: 142142 - DNA, 1233 bp, Blumeria graminis; identical to SEQ ID NO: 140260
  CDS (1)..(1233)

SEQ ID NO: 142143 - protein, 410 aa, Blumeria graminis; identical to SEQ ID NO: 140261

SEQ ID NO: 142144 - DNA, 1068 bp, Blumeria graminis
  CDS (1)..(1068)
atgtcgacccgtgcccctaatgctacgacaggatcgcgtaagatctcattcaacgtaagtgagcagtatgatattcaagatgttgtgggagagggtgcctatggtgttgtctgctcagctcttcacaagcccacaggacaaaaggttgctatcaaaaaaattactccattcgaccattctatgttctgtctgagaacattgcgagagatgaagctgcttcgatacttcaatcatgaaaatatcatctcaattttggatattcaaaagcctcgcagctttgactctttcaccgaggtttacttgattcaggagcttatggaaaccgacatgcacagagtaattcgcactcaagatctctcagatgatcattgccagtattttatataccagactcttcgtgcacttaaagctatgcattccgccaacgtcttacaccgtgatcttaagccctccaaccttcttataaatgccaactgcgatcttaaggtttgcgattttggactagctcgatctgctgcctcacaagaggattgttctggattcatgactgaatatgtggcgactcgctggtatcgtgcgcctgaaatcatgttgacctttaaagaatatacaaaagcaattgatgtatggtctgttgggtgtatcttggcagagatgctgagcggaaaacctttgttcccgggaaaagattaccatcaccaattaacactaatccttgatgttctcggcacccccactatggaggactattatggcatcaaatctcgtcgtgctcgcgaatatattcgatcccttccattcaagaagaagattcccttcaaacaaatgttccccaaaacgtctgatttagcacttgatctattagaaaagttattagccttcaatccagtcaagagaataactgttgacgaggcccttcaacatccgtacttagaaccttatcatgatcccgaggatgagccaactgccgatccaattcccgaggaattcttcgactttgacaaaaacaaggacaatttgagcaaagaacagctcaaagaactaatctttcaggaaattatgcggtag

SEQ ID NO: 142145 - protein, 355 aa, Blumeria graminis
MSTRAPNATTGSRKISFNVSEQYDIQDVVGEGAYGVVCSALHKPTGQKVAIKKITPFDHSMFCLRTLREMKLLRYFNHENIISILDIQKPRSFDSFTEVYLIQELMETDMHRVIRTQDLSDDHCQYFIYQTLRALKAMHSANVLHRDLKPSNLLINANCDLKVCDFGLARSAASQEDCSGFMTEYVATRWYRAPEIMLTFKEYTKAIDVWSVGCILAEMLSGKPLFPGKDYHHQLTLILDVLGTPTMEDYYGIKSRRAREYIRSLPFKKKIPFKQMFPKTSDLALDLLEKLLAFNPVKRITVDEALQHPYLEPYHDPEDEPTADPIPEEFFDFDKNKDNLSKEQLKELIFQEIMR

SEQ ID NO: 142146 - DNA, 1968 bp, Arabidopsis thaliana
  CDS (1)..(1968)
atgggttgtatttgtgccaccgcccgttcaccaagcgccgccgttaccgataaagatctattagattccagcaaatccatccttcaacttctccctcatcatcccccgtcgtcttcgtcttcatccaagaaggaaggatctttcacacgtacgacttcttcagcttctatcaccattgtggctaatggttatcctgtggcacgccgtccttccacttcatctgatcgaaacagcaccaaaccggtcgttgttgtgggagctccgaccagaaatccaacaagaagagtcaccgctataccggttgcacagccggcacagcagcagccagcacgtgtgatcagcaataaaacggaactccctgctgcagaatggccgtcttggctggcttctgttgctggggaggccattaaaggatgggttcctcgctgcgcagagtcctttgagaagttagacaaaattggacaggggacttacagcagcgtgtacaaagctagagaccttgaaacggggaagattgtggcgatgaagaaagttcggtttgtgaacatggatccagagagtgttcggtttatggccagggagattctcattcttcgtaagcttgatcaccccaatgttatgaagctagaaggtctagttacctctagactctcaggtagcctctaccttgtctttgagtacatggaacacgatctcgcaggtctagctgcaactcctggaatcaaattctctgaacctcagatcaagtgctatatgcagcaattgttccgtgggcttgaacattgccacagacgaggaattcttcaccgtgatattaaaggctcaaatctcttaatcaataatgaaggtgtcttgaagattggtgatttcggattggcgaatttttaccgaggtgatggagatctgcagctgaccagtcgtgttgtgaccttatggtacagagcacctgagctgttgctcggtgccactgagtatggaccagccattgacctgtggagcgccggctgcattctcactgagctcttcgccggaaaacctattatgccaggacgcacagaagtggagcagatgcacaagatctttaagctctgtggttcaccctcggaagattactggagaagagcaacactgccactagcaacaagctttaaacccagtcatccttacaagcctgttcttgctgaaacctttaaccatttcccttcatcagctctgatgctcatcaataagctactggcaatagaacctgaaaaacggggatcggctgcttctaccttgaggagcgaattcttcaccacggagccactccctgcgaatccatcaaacttacctagatatccaccaagcaaggaacttgatgccaagcttcgcaacgaagaagcaagaaaactaagggcagaaggtaacaagagaagagggggagaaactgtgacaagaggacggccaaaggatcttaaaacagcccagacaccagagtttatggctgcaggacagtccaaagtcacatgcataagccacaaattcaaaacagacgaggaaggtggcaccgggtttaggatagaaccaccaagaagagggatccagcagaatggtaaagctcatgcttcttcaatggttcacccaacagtggctgatacagaatggaacggaggtggaagcatcaaaagacaaactaatgcagagatgaagtctaggacatctcaaacaggagacttgtctggtgaatcttataggagagatcccaacagagattactcaaccggcaatgcaccaaggaaaaacagaatcaattactcaggaccattgatgcctcctggtggaaatcttgaagatttgcttaaagagcatgagaagcagatccaacaagctgtccgcaaagcacgtgtagaaaagtctgcatcaagaaaaaaccaagctttaacaggacaacaacagcagcaacgttacacaggaagaaatgctcggtag

SEQ ID NO: 142147 - protein, 655 aa, Arabidopsis thaliana
MGCICATARSPSAAVTDKDLLDSSKSILQLLPHHPPSSSSSSKKEGSFTRTTSSASITIVANGYPVARRPSTSSDRNSTKPVVVVGAPTRNPTRRVTAIPVAQPAQQQPARVISNKTELPAAEWPSWLASVAGEAIKGWVPRCAESFEKLDKIGQGTYSSVYKARDLETGKIVAMKKVRFVNMDPESVRFMAREILILRKLDHPNVMKLEGLVTSRLSGSLYLVFEYMEHDLAGLAATPGIKFSEPQIKCYMQQLFRGLEHCHRRGILHRDIKGSNLLINNEGVLKIGDFGLANFYRGDGDLQLTSRVVTLWYRAPELLLGATEYGPAIDLWSAGCILTELFAGKPIMPGRTEVEQMHKIFKLCGSPSEDYWRRATLPLATSFKPSHPYKPVLAETFNHFPSSALMLINKLLAIEPEKRGSAASTLRSEFFTTEPLPANPSNLPRYPPSKELDAKLRNEEARKLRAEGNKRRGGETVTRGRPKDLKTAQTPEFMAAGQSKVTCISHKFKTDEEGGTGFRIEPPRRGIQQNGKAHASSMVHPTVADTEWNGGGSIKRQTNAEMKSRTSQTGDLSGESYRRDPNRDYSTGNAPRKNRINYSGPLMPPGGNLEDLLKEHEKQIQQAVRKARVEKSASRKNQALTGQQQQQRYTGRNAR

SEQ ID NO: 142148 - DNA, 1338 bp, Arabidopsis thaliana
  CDS (1)..(1338)
atgggttgcgttagctcgaagcagacggtctctgtgacgcctgcgatcgatcactcaggcgtcttcaaggataatgaaaatgagtgttctggatcgggtcggattgtggtggaggatccgcctcggccgacgttgaagaagctcgtgtcgtggaggagtaggagcgggaagaggaggagtcagaagagcggtagcgagttagggagtgagtcaggacgtgctagtgactcgcttagttttcgactcggtaatgttagtagataccttgaagctgagcaagtcgctgctggttggcctgcgtggttgagcaacgttgctggtgaagctatccatggttgggtcccacttcgatccgatgcgttcgaaaaactcgaaaagattggacaaggtacttatagcaatgtgtttcgtgcggtggagactgaaactgggaggattgtggcattgaagaaggtgaggtttgataattttgagccggagagtgttaagtttatggcaagagagattttgatacttagaagacttaatcatcccaacattatcaaactggaaggtttgattacttcaaaactatcctgcaacattcaacttgtgttcgagtatatggagcatgatcttactggtcttctttcttcccctgacatcaaatttacgacgccacagattaagtgttacatgaagcaattgttgtctgggcttgatcattgtcattcacgaggcgtgatgcatcgagacataaagggttcgaatcttttgttgagtaatgaagggatattaaaggtggctgattttgggttagcaaacttcagtaatagttctggacacaagaagaaacctcttaccagtcgagttgtgactctgtggtatcgtccaccagaacttttgctcggggcaacggactatggagcatctgttgatttgtggagtgttggttgtgttttcgctgagctgcttcttggaaaacctattctccggggaagaactgaggttgaacagttgcacaagatattcaaactgtgtggatctccaccagaagattactggaaaaagtccaaacttccccatgcaatgcttttcaagccacagcaaacttatgatagttgtctccgcgaaaccttgaaagatttgtctgagactgaaatcaatctgatagaaactcttctttctatagatccccacaaacgcggtactgcctctagtgcccttgtttctcagtattttactacaaagccttttgcttgtgatccctcaagcttgccaatatacccacctagcaaggagatagatacaaagcatcgggacgaagcagcaaggtcagtaatttctttcattacctga

SEQ ID NO: 142149 - protein, 445 aa, Arabidopsis thaliana
MGCVSSKQTVSVTPAIDHSGVFKDNENECSGSGRIVVEDPPRPTLKKLVSWRSRSGKRRSQKSGSELGSESGRASDSLSFRLGNVSRYLEAEQVAAGWPAWLSNVAGEAIHGWVPLRSDAFEKLEKIGQGTYSNVFRAVETETGRIVALKKVRFDNFEPESVKFMAREILILRRLNHPNIIKLEGLITSKLSCNIQLVFEYMEHDLTGLLSSPDIKFTTPQIKCYMKQLLSGLDHCHSRGVMHRDIKGSNLLLSNEGILKVADFGLANFSNSSGHKKKPLTSRVVTLWYRPPELLLGATDYGASVDLWSVGCVFAELLLGKPILRGRTEVEQLHKIFKLCGSPPEDYWKKSKLPHAMLFKPQQTYDSCLRETLKDLSETEINLIETLLSIDPHKRGTASSALVSQYFTTKPFACDPSSLPIYPPSKEIDTKHRDEAARSVISFIT

SEQ ID NO: 142150 - DNA, 1170 bp, Chlamydomonas reinhardtii
  CDS (1)..(1170)
atggcggaccctggggcccaacctgtcccagctccccagtctgcggaagagccggtcaccggaggccttcaagagtccgtggaagtcacagcgtcagggaaattagactcatacaaccgcgagtacaaccaattcctggtttgcggcagcctctttgagtgccccgctaagtacctgcccatcaagcccatcggcaagggggcgtatggcgtcgtctgctccgccaagaacctggacaaccaggagaaggtggccatcaagaagatcgcaaacgcctttgacaacgtcatcgacgccaaacgcaccctgcgcgagatcaagttgttgcgccacctgcagcacgagaacattgtgcagatcaaagacatcatcccgcccaccaaccgcgatgccttcaaggacctctacgtggtgtatgagctgatggacaccgacctgcaccagatcatccgctcgccacaggcgctgtccaacgaccacagccagtacttcctgtaccagctgttgagagggctcaaatacatccacagcgccaacatcctgcacagagatttgaagcccagcaacctgctcgtgaacgccaactgcgacctcaaaatctgcgacttcggccttgcacggaccagcaccagcaacgagaaggagttcatgacggagtacgtggtgacgcgctggtaccgcgcccccgagctgctgctgagctgcagcggctacaccactgccatcgacgtgtggtccgtgggctgcatcttcgcggagctgctgggccgcaagccgctgttccccggcaaggactacgtgcaccagctgtccctcatcaccaaggtgatcggctcccccagcgaggaggagcttggcttcatcaccagcgagaaggccaagcgctacatccgctcgctgccgcgatccgagcgagtggacttcgggcagctgtggccgcacgtcaccaagacggcgctggacctgattgacaagatgctggtgttcgaccccaccaagcgcatcaccgtggagcaggcgctggagcacccctacctggcctcgctgcacgacgtgtccgacgagcccgtgtgccccacacccttcaccttcgacttcgacagcgagcacctcacgccggacgtggtgcgggaggtcatactgcaggacatggccgagctgcacacctga

SEQ ID NO: 142151 - protein, 389 aa, Chlamydomonas reinhardtii; identical to SEQ ID NO: 62986

SEQ ID NO: 142152 - DNA, 1071 bp, Gaeumannomyces graminis; identical to SEQ ID NO: 140266
  CDS (1)..(1071)

SEQ ID NO: 142153 - protein, 356 aa, Gaeumannomyces graminis; identical to SEQ ID NO: 140267

SEQ ID NO: 142154 - DNA, 1068 bp, Botrytis cinerea
  CDS (1)..(1068)
atgacagctcgtgcgcctaatcccgcctcgggatcacgaaagatctctttcaatgtcagcgagcaatatgatatccaggatgttgtaggagaaggagcttatggtgttgtctgctcagctttgcacaagccttcggggcaaaaggtcgctatcaagaagattactccattcgatcactctatgttctgtttgcgaacacttcgtgagatgaagctactccgatacttcaatcacgaaaacatcatctccattctcgacatccagaagccaagaaactatgagtccttcacagaagtttaccttatccaggaactcatggagaccgatatgcatcgtgtaattcgcacccaagatttatccgacgaccattgccaatactttatctatcaaaccctgcgagccttgaaagccatgcactccgcaaatgttctacacagagatttgaaaccatctaatctgttactcaatgccaactgcgatttgaaggtctgcgattttggtcttgctagatcggctgcatcccaagaagataactctggtttcatgacagaatatgttgcgaccagatggtaccgtgctccagagattatgttgacgttcaaggagtacaccaaggctattgatgtctggtctgttggatgtatcttggccgagatgttaagcggaaagcccctgttccctggaaaggattatcaccaccaactcacactcattcttgacgttcttggtactccaaccatggaagattactacggtatcaaatctcgtcgtgcaagagaatatatccgatcgttgccattcaagaagaaggttcctttcaagaccatgttcccaaagacctcagatctcgctttggacctcctcgagaagcttctcgcttttaacccagtcaagagaatcactgtcgaagaagcactgaagcacccataccttgaaccataccacgatcccgaagatgagccaaccgccaatcccattccagaagaattctttgatttcgataaaaacaaggacaacctcaccaaggaacaactcaaaaaattgatttatgatgagatcatgagatag

SEQ ID NO: 142155 - protein, 355 aa, Botrytis cinerea
MTARAPNPASGSRKISFNVSEQYDIQDVVGEGAYGVVCSALHKPSGQKVAIKKITPFDHSMFCLRTLREMKLLRYFNHENIISILDIQKPRNYESFTEVYLIQELMETDMHRVIRTQDLSDDHCQYFIYQTLRALKAMHSANVLHRDLKPSNLLLNANCDLKVCDFGLARSAASQEDNSGFMTEYVATRWYRAPEIMLTFKEYTKAIDVWSVGCILAEMLSGKPLFPGKDYHHQLTLILDVLGTPTMEDYYGIKSRRAREYIRSLPFKKKVPFKTMFPKTSDLALDLLEKLLAFNPVKRITVEEALKHPYLEPYHDPEDEPTANPIPEEFFDFDKNKDNLTKEQLKKLIYDEIMR

SEQ ID NO: 142156 - DNA, 1800 bp, Beta vulgaris subsp
  CDS (1)..(1800)
atgggttgtgtttttggtaaagagagtttagcaccagaggggagagagagaggtgggaggagagagaaagagaatttggggactgaatctgggaggaaggttgatttgccggttgctgatgtcgtgtcaggttgggatacagggaaagatggtgagaatggtggtgttgagttgaatgatggtggaaagaaggatgaagagaagaatggagaagaggatggggaggaaaagagggagggggaagggaaaggtagaagccagaagcctaggggagagagaaggcgaacgaaggcgaacccaaggttgagtaatcctccaaagaatgtacatggtgaacaggtggctgctggatggccttcttggctttctgctgttgcaggtgaagcaatcgacggttgggttccaaggcgagccgatactttcgaaaagattgataagattgggcaaggaacgtatagtaatgtatataaagccagagattcattaactgggaagatcgttgcacttaagaaggttcggtttgataacttggagcctgagagtgttaagttcatggctagagaaattttgattctacggagattagaccatcccaatgttgtgaaacttgaagggttggttacttcaaggatgtcttgtagtttgtatttggtgtttgagtacatggagcacgatttagctggacttgctgccagtccagatattaagtttacagagccacaggtaaaatgttatatgcaccaacttatctctggactagagcactgtcacaatcgtggcgtccttcaccgtgatatcaaaggatcaaatctccttcttgacaatggaggaatacttaagatagctgattttggattggctactttttttgacccaaacaagaagcatcccatgacaagtcgtgttgtcactctatggtaccgagcgccagagctccttcttggggctactgattatggtgttggcattgatttgaggagtgctggctgcattttggctgagttattggctgggaggcccatcatgcctggccgtactgaggtggagcaattacataagatatataagttatgtggttcgccttctgatgaatactggaagaaatcaaagttgccaaatgcaacaatattcaagccgcgagagccgtacaaaagatgtataagagagacctttagagacttcccaccctcggcattatctttaattgatagtcttcttgcaattgatccagctgaacgcaaaactgccacagatgctttaaatagtgatttcttcagtactgaacctcttgcttgtgatccatcaacgcttccgaagtatccaccaagcaaggagatggatgccaaacgacgtgatgatgaggcccgaaggctaagagctgccagcaaagcacaaggtgatgcgacaaagaaaactcgaacacgtgatcgtccacgggcaatgccagcccctgaagctaatgcagagcttcaggccaatcttgatcgacggcgtataatcactcatgcaaatgcaaagagcaagagtgagaagttccctccaccacaccaggatggagggcttggctatcccttgggtgcttcacagcatattgatccttcaaacatcccacctgatattccttacagttccacgtcattcacatactcaaaaggggtaggccaacattggtccggtccattggtggaccctgcttctgccgggggtcccaggcgaaagaaaaagaatgttgtcgaggggaatgaacccaagtcaactggccgaagagatatcagtagttctcgagctcgaggaaaatga

SEQ ID NO: 142157 - protein, 599 aa, Beta vulgaris subsp
MGCVFGKESLAPEGRERGGRREKENLGTESGRKVDLPVADVVSGWDTGKDGENGGVELNDGGKKDEEKNGEEDGEEKREGEGKGRSQKPRGERRRTKANPRLSNPPKNVHGEQVAAGWPSWLSAVAGEAIDGWVPRRADTFEKIDKIGQGTYSNVYKARDSLTGKIVALKKVRFDNLEPESVKFMAREILILRRLDHPNVVKLEGLVTSRMSCSLYLVFEYMEHDLAGLAASPDIKFTEPQVKCYMHQLISGLEHCHNRGVLHRDIKGSNLLLDNGGILKIADFGLATFFDPNKKHPMTSRVVTLWYRAPELLLGATDYGVGIDLRSAGCILAELLAGRPIMPGRTEVEQLHKIYKLCGSPSDEYWKKSKLPNATIFKPREPYKRCIRETFRDFPPSALSLIDSLLAIDPAERKTATDALNSDFFSTEPLACDPSTLPKYPPSKEMDAKRRDDEARRLRAASKAQGDATKKTRTRDRPRAMPAPEANAELQANLDRRRIITHANAKSKSEKFPPPHQDGGLGYPLGASQHIDPSNIPPDIPYSSTSFTYSKGVGQHWSGPLVDPASAGGPRRKKKNVVEGNEPKSTGRRDISSSRARGK

SEQ ID NO: 142158 - DNA, 1185 bp, Capsicum annuum
  CDS (1)..(1185)
atggatggtccagctcagcaaacggacaccgtgatggcagaggcggcggcggcacagcaaccagctccgccgtcgcagccggtggccggaattgataacattccagccacgttgagtcacggtggccggtttattcaatataacatatttggtaatgtatttgaagttactgcaaagtataagcctccaattatgccaattggtaaaggagcttatggcattgtttgttctgctttgaattcggagacgaatgagcatgttgcgacaaagaaaattgcgaatgcttttgataacaaaattgatgccaagagaacgttgcgtgagatcaagcttcttcgacatatggatcatgaaaatattgttgcgatcagagacataattccacctcctcaaagggaagcatttaatgatgtctatattgcatatgagcttatggacactgatctccatcaaattattcgctctaatcagggattatcagaagaacattgtcagtatttcttgtatcagattctccgtgggttgaaatacatacattctgcaaatgttttgcatagggatttgaagcctagaaatctcctcttgaatgcaaattgtgatttaaagatatgtgattttgggctagctcgtgtcacttctgaaactgactttatgaccgagtatgttgtgacaagatggtatcgacctccggagctgttgttaaattcttctgactatactgcagctattgatgtttggtcagtcggttgcattttcatggaattaatggacagaaagcctctgtttcctggtagagatcatgtacaacagctacgcctgcttatggagttgattggcaccccatctgaggctgaaatggagtttctgaatgagaatgcaaagcggtacatcagacagcttcctctttaccgtcgacaatcatttgtcgaaaagtttccacacgtaaaccctgccgctattgatcttgttgagaaaatgttgacatttgatcccagaaggagacttactgttgaagacgcgcttgcacatccttacctaacatcgcttcatgatattagtgacgagcctgtttgcacgactccttttagcttcgattttgaacagcatgctcttactgaggaacaaatgaaagagctgatttacagggagggccttgcatttaatcccgaataccagcacatgtga

SEQ ID NO: 142159 - protein, 394 aa, Capsicum annuum
MDGPAQQTDTVMAEAAAAQQPAPPSQPVAGIDNIPATLSHGGRFIQYNIFGNVFEVTAKYKPPIMPIGKGAYGIVCSALNSETNEHVATKKIANAFDNKIDAKRTLREIKLLRHMDHENIVAIRDIIPPPQREAFNDVYIAYELMDTDLHQIIRSNQGLSEEHCQYFLYQILRGLKYIHSANVLHRDLKPRNLLLNANCDLKICDFGLARVTSETDFMTEYVVTRWYRPPELLLNSSDYTAAIDVWSVGCIFMELMDRKPLFPGRDHVQQLRLLMELIGTPSEAEMEFLNENAKRYIRQLPLYRRQSFVEKFPHVNPAAIDLVEKMLTFDPRRRLTVEDALAHPYLTSLHDISDEPVCTTPFSFDFEQHALTEEQMKELIYREGLAFNPEYQHM

SEQ ID NO: 142160 - DNA, 2223 bp, Arabidopsis thaliana
  CDS (1)..(2223)
atgggttgtgtgaattctaggcataggccttttagaagaaagtcaacaacactgaaagagtcatcagaggagaaacgttcctctcggattgattcgtcgaggaggattgatgattggattcaaccggaagatgggtttgatagattgagtaacagtggagatgctaaagttaggttgattgaatccgaaatgtttagtacaagtaggtgtcatgatcatcagattgggaagatattagagaatcctgcgacagttgctcatatggatagagttgtgcatgatcaggaattgagaagggcctctagtgctgttgtagactcggacttggatattgatccaaaggttgttaaggccaagctagatagatggaatagcaaagattccaaagttcggttgattgaatctgaaaagttgagttctagcatgttttctgagcatcatcagatagagaagggagtagagaaacctgaggttgaagcttcggttcgagtggttcatcgggaactgaagaggggttcaagcattgttagtccaaaggatgcagagcggaagcaagtggcagcaggatggccgtcttggctggtctctgttgctggtgagtcactagtggattgggctccacgacgagcaaatacttttgaaaagctggagaaaattggccaaggaacatatagcagcgtatacagagctcgcgatcttcttcataacaagattgttgcgctaaaaaaagtccggtttgatcttaacgatatggaaagtgttaagtttatggcaagagagatcatagtaatgcgacggcttgatcatcctaatgtcctgaaattggaaggattgatcactgcccctgtctcatcgtccctttacttagtttttgagtacatggatcatgatctcttaggactttcttcactacctggtgtcaagtttacagagcctcaggttaaatgttacatgcgacaacttctaagtgggcttgaacattgtcacagccgtggcgttcttcaccgtgatataaaaggctcaaacctactaattgacagtaagggagtcttgaagatagcagattttgggttagcaacttttttcgaccctgcaaaaagtgtttcattgactagccatgttgtcactctttggtaccggccaccagaacttttgcttggagcctctcattacggtgttggggttgatttatggagcacaggttgcatcttaggtgaattatatgccggtaaaccgatcctccctggaaaaaccgaggtagaacaattgcataaaatcttcaagctttgcggttcaccaacagaaaattactggagaaaacagaagttaccatcttcagctggattcaaaaccgcgattccttataggcggaaagtatcagagatgtttaaggactttcctgcaagtgttctttcacttttagagactttactctccatagatcctgatcaccggagctctgcagatcgtgcccttgagagtgagtacttcaaaaccaagccgtttgcttgcgatccatcgaacttaccaaaatatcctcctagtaaagagattgatgcgaaaatgcgtgatgaagcgaaaaggcaacaacctatgagggcggagaaacaagaaagacaagactctatgacgagaatatcacacgagagaaaatttgtaccaccggtcaaagcaaataactctctgtcaatgacaatggagaaacaatataaagatttgaggagtaggaacgatagtttcaagtcgtttaaggaggagaggactcctcatggaccagttcctgattatcaaaatatgcagcacaacagaaacaatcaaactggtgtgagaatttcacactcaggtccattgatgagcaaccggaacatggctaagtcaacaatgcatgtgaaggagaatgcacttcctagataccctccagctagagtaaacccgaagatgttatcaggctcagtctcctccaaaacattattagaacggcaagatcaaccagtcacgaaccaaagaagaagagatcggcgagcatacaatagagctgatactatggatagtagacatatgacagcaccaattgacccatcttggtataatcctagtgatagcaagatttacatgtcaggaccattgttggctcagccaagcagagtggaccagatgcttgaagaacatgacagacagcttcaggaattcaatagacaggcactcaagacaccacaaggctga

SEQ ID NO: 142161 - protein, 740 aa, Arabidopsis thaliana
MGCVNSRHRPFRRKSTTLKESSEEKRSSRIDSSRRIDDWIQPEDGFDRLSNSGDAKVRLIESEMFSTSRCHDHQIGKILENPATVAHMDRVVHDQELRRASSAVVDSDLDIDPKVVKAKLDRWNSKDSKVRLIESEKLSSSMFSEHHQIEKGVEKPEVEASVRVVHRELKRGSSIVSPKDAERKQVAAGWPSWLVSVAGESLVDWAPRRANTFEKLEKIGQGTYSSVYRARDLLHNKIVALKKVRFDLNDMESVKFMAREIIVMRRLDHPNVLKLEGLITAPVSSSLYLVFEYMDHDLLGLSSLPGVKFTEPQVKCYMRQLLSGLEHCHSRGVLHRDIKGSNLLIDSKGVLKIADFGLATFFDPAKSVSLTSHVVTLWYRPPELLLGASHYGVGVDLWSTGCILGELYAGKPILPGKTEVEQLHKIFKLCGSPTENYWRKQKLPSSAGFKTAIPYRRKVSEMFKDFPASVLSLLETLLSIDPDHRSSADRALESEYFKTKPFACDPSNLPKYPPSKEIDAKMRDEAKRQQPMRAEKQERQDSMTRISHERKFVPPVKANNSLSMTMEKQYKDLRSRNDSFKSFKEERTPHGPVPDYQNMQHNRNNQTGVRISHSGPLMSNRNMAKSTMHVKENALPRYPPARVNPKMLSGSVSSKTLLERQDQPVTNQRRRDRRAYNRADTMDSRHMTAPIDPSWYNPSDSKIYMSGPLLAQPSRVDQMLEEHDRQLQEFNRQALKTPQG

SEQ ID NO: 142162 - DNA, 1224 bp, Oryza sativa subsp
  CDS (1)..(1224)
atggaggcgccgccggggccggagcccatggagctggacgcgccaccgccccccgccgccgtggcggcggcggcggcgaccgccggcatcagcgagaaggtgctgcagaagaaggaggagggcgggggcgacgccgtgacgggtcacatcatctccaccaccatcggcggcaagaacggcgagccgaagcggacaattagttatatggcggagcgagttgtaggaactggttctttcgggattgtgttccaggctaagtgcttggagacgggggaaacggtggccatcaagaaggtgttgcaggaccggcgttacaagaaccgtgaactgcagcttatgcgcgcaatggaacaccccaatgtcatctgcctgaagcactgcttcttctcaaccacaagcagggatgagctgttcctgaatcttgttatggagtacgtccctgagacactctaccgtgtgctcaagcactacagcaatgctaaccagcggatgccattgatctatgtgaagctttacatctatcagcttttcagagggttagcttatattcatactgttccaggagtctgccacagggatgtgaaaccacaaaatgttttggttgatcctctcactcatcaagtcaagctatgtgactttggaagtgcaaaggttctggttcctggtgaaccgaacatatcatacatttgctctcgctattatcgtgctcctgagctcatatttggtgcaaccgagtatacaacttcaattgacatatggtcagctggatgcgttcttgcagagttacttcttggtcagccactgtttcctggagagagtgctgttgaccagctagtagagataatcaaggttcttggtactccaacccgtgaggaaatacgatgcatgaaccccaactatactgagttcaaatttcctcagattaaggctcatccttggcacaagattttccacaagagaatgcctccagaagccatagaccttgcttcccgtcttctccaatattcaccaagtctacgctgcactgctcttgacgcatgtgcacattccttctttgatgagctacgagagcccaatgcacgcctgccaaatggtcgtccattccctcctctgttcaacttcaagcatgaactagccagcgcctctccagaactcatccacaggctcataccggatcatatcagacggcaacatggcctcaactttgcgcatgctgggagctaa

SEQ ID NO: 142163 - protein, 407 aa, Oryza sativa subsp
MEAPPGPEPMELDAPPPPAAVAAAAATAGISEKVLQKKEEGGGDAVTGHIISTTIGGKNGEPKRTISYMAERVVGTGSFGIVFQAKCLETGETVAIKKVLQDRRYKNRELQLMRAMEHPNVICLKHCFFSTTSRDELFLNLVMEYVPETLYRVLKHYSNANQRMPLIYVKLYIYQLFRGLAYIHTVPGVCHRDVKPQNVLVDPLTHQVKLCDFGSAKVLVPGEPNISYICSRYYRAPELIFGATEYTTSIDIWSAGCVLAELLLGQPLFPGESAVDQLVEIIKVLGTPTREEIRCMNPNYTEFKFPQIKAHPWHKIFHKRMPPEAIDLASRLLQYSPSLRCTALDACAHSFFDELREPNARLPNGRPFPPLFNFKHELASASPELIHRLIPDHIRRQHGLNFAHAGS

SEQ ID NO: 142164 - DNA, 1170 bp, Euphorbia esula
  CDS (1)..(1170)
atggaagacgcctccgctaccaccaccgctccttccgattctctcaacaaccaccagcttcctcctactgctggcatcgagaatattccggccacgcttagccacggcggaagattcattcagtacaacatatttggtaacatatttgaggtcactgctaaatataggcctcctattatgcccatcggtaaaggcgcttacggcatcgtttgttcggcattgaattcggagaccggagagcatgtggcaataaagaagatagcgaatgcttttgataataaaatcgatgctaaaaggactcttcgtgaaatcaagttgcttcgacatatggatcatgaaaacgtggttgcgatcagggatataatgcctccaccacaaagggaagtgtttaatgatgtttacatagcttatgagctaatggacactgatctgcatcagattattcgttccaatcaagcattatcagaagagcactgccagtattttctgtatcaaattctccgagggttgaaatacatacactctgcaaatgttctgcatagagatttaaaaccaagcaatctcctcctgaatgcaaattgtgacctaaagatttgtgattttggtttagcacgtgttacctcagaaactgatttcatgacagaatatgttgttacaagatggtaccgagcaccagaattgcttttgaactcctcagactatactgcagctatagatgtatggtctgttggttgtattttcatggagttaatggatcgaaaacccttatttcctggtagagatcatgtgcatcagcttcgtttactcatggagctaattgggactccatcagaggaagaattggggtttttgaatgaaaatgcaaagaggtatatacggcaaatgtctgttttccgtagacaatctttcaccgagaagttcccaactgtgcatccagcagctattgatctcgtggaaaagatgttgacttttgatcccagacaaaggattacagttgaggatgcactggcccatccatacctaacatcgcttcacgatataagcgatgaaccggtgtgcatgaccccgttcagctttgactttgagcagcatgctttgactgaagaacagatgaaggagttgatttatagggaggctctggcatttaacccggagtatcagcaacaatga

SEQ ID NO: 142165 - protein, 389 aa, Euphorbia esula
MEDASATTTAPSDSLNNHQLPPTAGIENIPATLSHGGRFIQYNIFGNIFEVTAKYRPPIMPIGKGAYGIVCSALNSETGEHVAIKKIANAFDNKIDAKRTLREIKLLRHMDHENVVAIRDIMPPPQREVFNDVYIAYELMDTDLHQIIRSNQALSEEHCQYFLYQILRGLKYIHSANVLHRDLKPSNLLLNANCDLKICDFGLARVTSETDFMTEYVVTRWYRAPELLLNSSDYTAAIDVWSVGCIFMELMDRKPLFPGRDHVHQLRLLMELIGTPSEEELGFLNENAKRYIRQMSVFRRQSFTEKFPTVHPAAIDLVEKMLTFDPRQRITVEDALAHPYLTSLHDISDEPVCMTPFSFDFEQHALTEEQMKELIYREALAFNPEYQQQ

SEQ ID NO: 142166 - DNA, 1119 bp, Pisum sativum
  CDS (1)..(1119)
atggcgactccggtcgagcctccgaacgggataagagcggacgggaagcattattactccatgtggcaaactctatttgagatcgacactaaatatgttccgattaagccgattggtcgaggggcgtatgggattgtgtgttcttctgttaatagggagacaaatgagaaagttgcgatcaagaagatacagaacgcgtttgagaatcgtgttgacgcgcttagaactttgagggagcttaaacttcttcggcatcttcatcatgagaatgttattgctttgaaagacatcatgatgcctgttcataggactagttttaaggatgtttatctggtttatgaacttatggacactgatttgcatcagattattaaatcttctcaaacattgtctaatgatcactgccaatatttcctctttcagttgcttcggggtttgaaatatctacactcagctaacatccttcatcgcgacttgaaacctggaaatcttttaattaatgcaaattgtgacctgaaaatatgtgattttgggttagcacgcacaaactgcagcaagaaccagttcatgacggagtatgttgtcactcggtggtatagggcaccagaactgctactttgctgtgacaactatgggacatctattgacgtctggtcagtgggatgcatctttgcagagctccttggacgaaaacctattttccctggttcagagtgtctcaaccaactaaagcttattatcaatatccttggtagtcaaagggaggaggatatcgaatttattgataacccaaaagctaagaggtacatcaaatcacttccgtattctcctggaacccccttttcccgactttaccccaatgcacatccgctggcaattgatctactagctaagatgcttgtttttgatcccacaaagaggattagtgttacggaagcacttcaacaccctttcatggcctctctctatgatcctaattgtgatcctcctgccatcattccaattgatcttgacattgatgaggatctaggggaagagatgataagggagttgatgtggagggaaatggttcattaccatcctggatctgctatgggaaatgcagagttgtcgtcttga

SEQ ID NO: 142167 - protein, 372 aa, Pisum sativum
MATPVEPPNGIRADGKHYYSMWQTLFEIDTKYVPIKPIGRGAYGIVCSSVNRETNEKVAIKKIQNAFENRVDALRTLRELKLLRHLHHENVIALKDIMMPVHRTSFKDVYLVYELMDTDLHQIIKSSQTLSNDHCQYFLFQLLRGLKYLHSANILHRDLKPGNLLINANCDLKICDFGLARTNCSKNQFMTEYVVTRWYRAPELLLCCDNYGTSIDVWSVGCIFAELLGRKPIFPGSECLNQLKLIINILGSQREEDIEFIDNPKAKRYIKSLPYSPGTPFSRLYPNAHPLAIDLLAKMLVFDPTKRISVTEALQHPFMASLYDPNCDPPAIIPIDLDIDEDLGEEMIRELMWREMVHYHPGSAMGNAELSS

SEQ ID NO: 142168 - DNA, 1116 bp, Pisum sativum
  CDS (1)..(1116)
atggccggagttaatcaaaacggcgtcgccgagttcccggcggttcagactcacggtggacagttcgttcaatacaacgttttcggtaatctctttgaagttactgctaagtatcgtcctccgatcatgccgattggtcgcggcgcttacggaatcgtttgttcgctcttgaacacggagacgaatgagttggttgctgttaagaaaatagcgaatgctttcgataatcacatggatgcgaagcgtacgctgcgtgagattaagcttcttaggcatttagatcatgaaaatgtcattggtttaagagatgttattcctccacccttgcgtagagagtttaatgatgtctacataaccaccgaactcatggatactgatcttcatcaaatcattcgctccaatcaaaatctgtcagatgaacactgtcagtactttttgtatcagattcttcgtggactgaggtatatacattctgcaaacattatccatagagatttgaagccaagcaatctgttgctgaatgcaaattgcgacttgaagattattgattttggtcttgcgcggccaactatggaaaatgacttcatgacagaatatgtagtcacaagatggtatagagctcctgaattgttgttgaactcctcagattacacctctgccatagatgtttggtctgttggttgtatcttcatggagcttatgaataaaaaacctctatttcctggcaaagaccatgtgcatcagatgcgcttattgacagagcttcttggcactccaactgacgctgatgtcgggttagtgaaaaatgaagatgcaagaagatatatccgacaacttcctcaatatcctcgccaacctttaaatagggttttcccccatgttcatcccttggccatcgatctcatcgataaaatgttgacaattgatcccactagaagaatcacagttgaagaagcactagcccatccataccttgaaaaactacacgatgtagctgatgaacccatctgcatggaaccattctcatttgagtttgaacaacagcatttggacgaagagcaaataaaggagatgatctacagggaggcattagcactcaatcctgagtacgcttaa

SEQ ID NO: 142169 - protein, 371 aa, Pisum sativum
MAGVNQNGVAEFPAVQTHGGQFVQYNVFGNLFEVTAKYRPPIMPIGRGAYGIVCSLLNTETNELVAVKKIANAFDNHMDAKRTLREIKLLRHLDHENVIGLRDVIPPPLRREFNDVYITTELMDTDLHQIIRSNQNLSDEHCQYFLYQILRGLRYIHSANIIHRDLKPSNLLLNANCDLKIIDFGLARPTMENDFMTEYVVTRWYRAPELLLNSSDYTSAIDVWSVGCIFMELMNKKPLFPGKDHVHQMRLLTELLGTPTDADVGLVKNEDARRYIRQLPQYPRQPLNRVFPHVHPLAIDLIDKMLTIDPTRRITVEEALAHPYLEKLHDVADEPICMEPFSFEFEQQHLDEEQIKEMIYREALALNPEYA

SEQ ID NO: 142170 - DNA, 1104 bp, Lentinula edodes
  CDS (1)..(1104)
atggatgaccggacgactgcttttatcgtcggttcttcgtaccaaccactggacataattggggaaggcgcttatggagtcgtctgttctgcagtacacattcaatcacaacggaaagtagctatcaagcggataacgccgttcgaccactcaatgttctgcctccggacattgcgagaaatcaaacttttgcgccattttcagcatgaaaatatcatcgggatacttgacatactcaaaccaaatttgggaccagacggaagcctagatggcatgacggaggtgtatcttgttcaagagctgatggagactgatctccaccgagtcatcaaaacacaagagttgagcgatgaccattgtcaatatttcatctaccaaacactccgtgcactgaaagcactacacagtgccgacgttttgcaccgggacctcaagccgtccaaccttttattaaatgcaaattgcgatctgaagttatgtgacttcgggctcgcccgttcggcaagtcctcttcctgaccacccagtagacgcgtcgacattcatgacagaatatgtcgctaccagatggtatcgcgctccagaggtcatgttaaccttcaaacaatacaccaaagccatagacaagtggtctcttggctgtgttctcgcagaaatgctgtccggaaagcccctcttccctggtcgagattatcaccaccagttgtcattaatcctcgatgtcctgggtacccctacgcttgacgatttctacgctatctcatcctcccgttcgcgtgaatacatccgtgcactaccctttcgaaaaaagaaagtcttcggaaaacccgtccatgaaggtggcgtcaaaggcttcgagggcaaaaatcctcttgctattgatcttatggaaaaatgtttaagctttaatccgaaaaggaggattgacgtcgagggtgctttagctcatccctatctcgcaccctaccacgacccatccgatgagcccggcgctgagcgcattgacagcgaattttggtcttttgacaccttcaacaatggaaaaggtctcagcaaagaagagctcaaggttttaatctatgaagaagttatgcgtggggcataa

SEQ ID NO: 142171 - protein, 367 aa, Lentinula edodes
MDDRTTAFIVGSSYQPLDIIGEGAYGVVCSAVHIQSQRKVAIKRITPFDHSMFCLRTLREIKLLRHFQHENIIGILDILKPNLGPDGSLDGMTEVYLVQELMETDLHRVIKTQELSDDHCQYFIYQTLRALKALHSADVLHRDLKPSNLLLNANCDLKLCDFGLARSASPLPDHPVDASTFMTEYVATRWYRAPEVMLTFKQYTKAIDKWSLGCVLAEMLSGKPLFPGRDYHHQLSLILDVLGTPTLDDFYAISSSRSREYIRALPFRKKKVFGKPVHEGGVKGFEGKNPLAIDLMEKCLSFNPKRRIDVEGALAHPYLAPYHDPSDEPGAERIDSEFWSFDTFNNGKGLSKEELKVLIYEEVMRGA

SEQ ID NO: 142172 - DNA, 1065 bp, Emericella nidulans
  CDS (1)..(1065)
atggtgcagcagatgccgcctcagggaggctcaaggaagatttcctttaacgtctcagatcaatatgagattcaagacgtcattggtgaaggcgcctatggtgttgtttgctctgctatccacaagccctctggccagaaggtagccatcaagaagatcaccccctttgaccattcgatgttttgcctgcgaaccctacgagagatgaagctgctccgctacttcaaccatgagaatatcatctccattttggacatccagaggccgcgaaactatgagagtttcaacgaagtctacctcattcaggaattgatggaaacagatatgcaccgcgttatccgcacgcaagacctgtcagatgaccactgccagtactttatttaccaaactttgcgtgcgctgaaggccatgcactccgctaacgtcctccaccgtgatctcaaaccatcgaaccttctcctcaatgcaaattgtgacctgaaggtctgcgactttggtctagctcgatctgcggcttcgactgacgataattctggtttcatgacggaatacgtggcgacgcgctggtaccgtgcacctgaaatcatgttgacgttcaaggaatacacaaaggcaattgatgtgtggagtgtgggctgcattcttgcagagatgctgagcgggaagcccttgttccctggaaaggactatcaccatcaattgactctaattctggatgttcttggaacacctaccatggaagactactacggaatcaagtcccgacgggctcgggagtacatccgttctctcccattcaagaagaagattccgttcaaggcactgttccctaagagcaacgacctagctctggatctgctagagaagcttttggccttcaacccgacgaagcgaatcaccgtggaggaggctctgcgtcacccgtacctggaaccatatcatgatccagatgacgagccaacagcgcccccaatcccggaaggcttctttgacttcgacaagaataaggatgctctcagcaaagagcagttgaaaattctgatttacgaggagatcatgcggtag

SEQ ID NO: 142173 - protein, 354 aa, Emericella nidulans; identical to SEQ ID NO: 140275

SEQ ID NO: 142174 - DNA, 1059 bp, Cochliobolus heterostrophus; identical to SEQ ID NO: 140276
  CDS (1)..(1059)

SEQ ID NO: 142175 - protein, 352 aa, Cochliobolus heterostrophus; identical to SEQ ID NO: 140277

SEQ ID NO: 142176 - DNA, 1068 bp, Glomerella lagenarium
  CDS (1)..(1068)
atgtcgcgcgccaacgctcccaacccatcggggtcccggaagatctccttcaacgtaagtgaacagtacgatattcaagatgtcgtaggcgagggcgcctatggagttgtgtgctccgcgatacacaagccgtctggtcaaaaagtggccatcaagaagattacacccttcgatcattccatgttctgcctgcgaactttgcgcgagatgaagctcctcagatacttcaaccacgagaacatcatttcgatcctcgacattcaaaagcctcgcagctacgagactttcaacgaggtttacctgatccaggaactcatggagacggatatgcaccgcgtcatccgcacccaagacctatccgacgatcactgccagtactttatctatcagaccttgcgcgctttgaaggctatgcattctgcaaatgtccttcatcgtgatttgaagccttcgaacctgttgctgaacgctaactgcgaccttaaagtctgcgactttggcttggcgcgttcagctgcatctcaggaagataattccggatttatgacggaatatgtcgcaacgagatggtaccgagctcctgaaatcatgttgactttcaaggagtatacgaaagcaattgatgtttggtctgtcggctgcattcttgcagagatgctgagtggaaagcccttgtttcccggcaaagactatcaccaccaattgactttgattcttgatgttctcggtactccgacaatggaggactactacggcatcaaatcccgacgtgcaagagagtatatccggtcgctgcctttcaagaagaaggtaccatttcgaacactcttccccaagacttccgacttggccctcgaccttctcgagaagctccttgctttcaaccccgtcaagcgcattacagttgaggatgctcttaagcatccctatctcgagccctaccacgatcccgatgatgagcccactgcgccacccattcccgaggaattcttcgattttgacaagcacaaggacaatttgagcaaggagcagctcaagcagttgatctaccaggagattatgcggtga

SEQ ID NO: 142177 - protein, 355 aa, Glomerella lagenarium
MSRANAPNPSGSRKISFNVSEQYDIQDVVGEGAYGVVCSAIHKPSGQKVAIKKITPFDHSMFCLRTLREMKLLRYFNHENIISILDIQKPRSYETFNEVYLIQELMETDMHRVIRTQDLSDDHCQYFIYQTLRALKAMHSANVLHRDLKPSNLLLNANCDLKVCDFGLARSAASQEDNSGFMTEYVATRWYRAPEIMLTFKEYTKAIDVWSVGCILAEMLSGKPLFPGKDYHHQLTLILDVLGTPTMEDYYGIKSRRAREYIRSLPFKKKVPFRTLFPKTSDLALDLLEKLLAFNPVKRITVEDALKHPYLEPYHDPDDEPTAPPIPEEFFDFDKHKDNLSKEQLKQLIYQEIMR

SEQ ID NO: 142178 - DNA, 1827 bp, Medicago sativa
  CDS (1)..(1827)
atgcagaaagatcaactcaagaaggatgttaaagaggtaaagtttttcactgattacggagacgccaacagatacaaaattctcgaagttgttggtaaaggtagctatggagttgtttgtgcagcgattgacacacacactggaggaaaagttgcgatcaagaagattcatgatgtttttgaacatatctctgatgccattagaatcctcagggaagtcaagttgctaagacttttaagacaccctgatatcgttgagattaaacggattatgttgccgccttcaaagagggaatttaaagatatttatgttgtctttgagctcatggagtctgatctccatcaagtcatcaaagctaatgatgacttgactcgtgaacaccaacagttttttctttatcaaatgcttcgtgcactgaagtttatgcatacagcaaatgtatatcacagagacctcaaacccaaaaatatacttgcaaatgcaaactgcaaactcaaagtctgtgattttggactggcaagagttgcattcaatgataccccaacgacaactttttggacggattacgttgctacaagatggtatagagcccctgaactatgcgggtctttctttgctaagtacacaccagcaattgatatatggagcattggatgtatttttgcggaagtgcttacaggaaagccattgtttcctggtaaaagtattgtgcatcaattagatttgattactgatcttcttggaactccaccacccgaaattatctctggagttcgaaatgagaaggcaaggaagtacttgatggagatgcggaagaaacttcctgtgccatttgaacggaaatttccaaatgctgatccattggcacttcgcctattgcaaaggcttttagcatttgatccaaaggatcgaccgacagcccaagaggcactagctgatccttttttcaagggtttggcaaaaattgaaagagaaccttcttctcagccaatttcaagaatggagtttgactttgagagaaggcgggtgtcaaaagacgatattaaggaactaatatatcgggaaatacttgaatatcatcctcagctgcttaaagattacattagtggaactgaaggcacaaatttcatgtaccctagtgctatagaccaattcagaaagcaatttgcttatctggaggagaataatggtaaatgtggcccggtgattcctccagaaaggaagcatgtctcccttcctaggtccactgttctctctagtacaattcctcccagcacacaaccgtcttttgctccatatgcgaacagacaaatcacacaagaggcattcagtattcccagagcagcagaatcaaattctctaagtcaatcaaagggtttacgaccacctccaagagcgcctgcagccaaatcaggaagagttacagggccagttctctatgacaatggaagaagcacaaaagataattatgacgcaaggatcttctaccaaaatgctattcctcaagcaatctctccacactgtttccaaagggttgcaaacgcgcaccaaactagcacaaaaactacaccagaaacatacaaggataattcacaaggcaaacatcaactctcaccgaagaagtgtaacgtgccagctagaccagctttcgatcttaataccaatccatatcaccaacagagcaagaatgatctgttaaacgatcctgtcaccgttattgacgcaaaattgttgaaggcacaatctcaatttggtgcagctggtgctgccgcagtagccgttgctgctcacaggcattctgcaggctttcagtatggattgacatag

SEQ ID NO: 142179 - protein, 608 aa, Medicago sativa
MQKDQLKKDVKEVKFFTDYGDANRYKILEVVGKGSYGVVCAAIDTHTGGKVAIKKIHDVFEHISDAIRILREVKLLRLLRHPDIVEIKRIMLPPSKREFKDIYVVFELMESDLHQVIKANDDLTREHQQFFLYQMLRALKFMHTANVYHRDLKPKNILANANCKLKVCDFGLARVAFNDTPTTTFWTDYVATRWYRAPELCGSFFAKYTPAIDIWSIGCIFAEVLTGKPLFPGKSIVHQLDLITDLLGTPPPEIISGVRNEKARKYLMEMRKKLPVPFERKFPNADPLALRLLQRLLAFDPKDRPTAQEALADPFFKGLAKIEREPSSQPISRMEFDFERRRVSKDDIKELIYREILEYHPQLLKDYISGTEGTNFMYPSAIDQFRKQFAYLEENNGKCGPVIPPERKHVSLPRSTVLSSTIPPSTQPSFAPYANRQITQEAFSIPRAAESNSLSQSKGLRPPPRAPAAKSGRVTGPVLYDNGRSTKDNYDARIFYQNAIPQAISPHCFQRVANAHQTSTKTTPETYKDNSQGKHQLSPKKCNVPARPAFDLNTNPYHQQSKNDLLNDPVTVIDAKLLKAQSQFGAAGAAAVAVAAHRHSAGFQYGLT

SEQ ID NO: 142180 - DNA, 1107 bp, Prunus armeniaca
  CDS (1)..(1107)
atggcaactttagttgagcctccagatggaattaggcaacgggggaagcattattactcaatgtggcaaacattgtttgaggttgacaccaagtacgttccgatcaaacccatagggcgaggagcatatggcatagtgtgctcatccatcaatagggcaacaaatgagaaagttgcaatcaagaagatcaataatgtgtttgagaaccgaatcgatgcattgaggactctgagggagttgaagcttcttaggcatatccggcacgagaatgtgattgctttgaaggatgttatgatgcctatccacaggacaagtttcaaggatgtgtattttgtttatgagctcatggatacagatcttcatcaaattataaagtcctctcaaccactttccagtgaccattgcaaatactttctatttcagttgcttcgagggctcaagtatcttcactcagcaaacatccttcaccgggacttgaagcctggaaacctgctcatcaatgctaactgtgacttaaaaatatgtgattttgggttggcccgaaccagtggaggtactggccaattcatgacagagtatgttgtcactcgctggtatcgtgcaccagagctgctattgtgctgtgacaattatggaacatccattgacgtctggtccgtaggatgcatctttgctgagattcttggtcggaaaccaatcttccctggaactgaatgcctcaaccaactaaaactaattatcaatgttcttggtagccagcatgaacctgatcttgcattcattgacaatccgaaagccaggaagtacatcaaatcactgccctattctaggggaacacatttttcccgtctatacccccaagctgatccgttagctatagacttgttgcaaaggatgcttgtgtttgatccaactaagagaatctctgtcacagaagcactccaacacccttacatgtcagggttatatgatccaagatgcaatcctcctgcccaggttccgatcaacctcgacatagatgagaatttagcggaaccaatgattagggagatgatgtggcatgagatgcttcactaccacccagaagctgcttttgtgaatgcctag

SEQ ID NO: 142181 - protein, 368 aa, Prunus armeniaca; identical to SEQ ID NO: 62996

SEQ ID NO: 142182 - DNA, 1098 bp, Ipomoea batatas
  CDS (1)..(1098)
atggtgggcggcggcgacttccttgcggttcagactcacggcgggcagtacgtacagtatgacatcttcgggaacttgttcgaggtcacttccaagtatgctcctccgattaccccgattggccgcggcgcttacggaatcgtctgttcggctttgaacgctgagacgaacgagatggttgcgattaagaagatcgctgatgctttcgacaattacatggacgcgaagcgaactcttcgcgagattaagcttcttcgccatttagaacacgaaaatgtaatagctataaaggatgttattcctccaccattaagaagggaattcaatgatgtctatattgccaccgagcttatggacacggatcttcaccagataatccgatcaaatcaaggtttatcagaggagcattgtcagtatttcttgtatcagatccttcgtgggctaaagtacatacattctgcgaatgttattcatagagacttgaagccaagcaacctgttgctgaattcgaattgtgatcttaagatttgtgactttggacttgctcgcacaaatttagacaatgagttcatgacagaatatgttgttaccagatggtaccgggcacccgagcttctgttgaactcttcagattacactgctgctatagatgtgtggtctgttggttgcatcttcatggagcttatgaacagaaaacctctgtttcaaggaaaagatcatgtacatcagatgcgcttaataaccgagcttcttggcacaccaaccgattccgatcttggatctattcagaatgaaaatgcaagaaggtatatcaggcaacttccactacgtccacgccagcagttagcaaatggtttcccacacgtgcatcctttagccattgatctcatggataaaatgttgacatttaacccctccaaaagaattacagttgaggaagcattagctcatccctaccttgcccagttacatgacaaatctgatgaacccatatgcccggttccattcactgatttcgagaaacaagcctatggagaagagcaaataaaagacatgatttaccaggaggcactggcaatgaatccaggatatgcataa

SEQ ID NO: 142183 - protein, 365 aa, Ipomoea batatas
MVGGGDFLAVQTHGGQYVQYDIFGNLFEVTSKYAPPITPIGRGAYGIVCSALNAETNEMVAIKKIADAFDNYMDAKRTLREIKLLRHLEHENVIAIKDVIPPPLRREFNDVYIATELMDTDLHQIIRSNQGLSEEHCQYFLYQILRGLKYIHSANVIHRDLKPSNLLLNSNCDLKICDFGLARTNLDNEFMTEYVVTRWYRAPELLLNSSDYTAAIDVWSVGCIFMELMNRKPLFQGKDHVHQMRLITELLGTPTDSDLGSIQNENARRYIRQLPLRPRQQLANGFPHVHPLAIDLMDKMLTFNPSKRITVEEALAHPYLAQLHDKSDEPICPVPFTDFEKQAYGEEQIKDMIYQEALAMNPGYA

SEQ ID NO: 142184 - DNA, 1257 bp, Emericella nidulans
  CDS (1)..(1257)
atgtctgacttacaagtacagggacggaaagtctttaaggtcttcaatcaggacttcattgttgatgaccgttatactgtcaccaaggagctgggtcaaggtgcttatggcattgtttgcgccgctacgaatgtccagacgggggagggcgttgccatcaaaaaggtaaccaacgtcttcagcaagaagattttggccaagcgcgcccttagggagatcaagctgctccaacacttcagaggccaccgcaatattacctgtctctatgatatggatattccccgaccggacaacttcaatgagacatatctatacgaagaactcatggagtgtgatttagctgctattattcgatccggccagccactgaccgatgcgcactaccaatccttcatctaccaaatcctatgtggactcaagtatattcactccgccaatgtccttcacagagatctaaagcccggaaacttgctggtcaatgcggactgtgagctcaagatttgtgattttggtctggctcgtggtttctcaattgaccctgaggagaacgccggttacatgactgaatatgttgcgacaagatggtatcgcgctccggaaatcatgttgagtttccagagctacacaaaagctatcgatgtgtggtccgtaggttgcattctggcggagttgttaggtggccgccccttcttcaagggtcgcgactatgtcgaccagctcaaccagatcttgcactacctgggcactccgaacgaagaaactctgagccgcattggctcaccacgtgcccaggagtatgtgcgtaacttgccctttatgcccaaggtgcccttccagcgcctgttcccgaacgccaatcccgatgctctcgatctactcgaccgcatgcttgctttcgacccttcgtcacgtatctcggtggaagaggctctggaacacccttaccttgcaatttggcacgacgcatccgatgagcctagctgccccaccacctttgacttccactttgaggtggttgacgatgtgcaggagatgcgccgcatgatctacgaggaagtcgtccgttttcgccaatcggtgcgcatgcccccgcaggcgcaatctctcgcccaacaacagcaaataggcaacatccccattcccgagcatcagcagggagtgtggaggcaagaagagcctaggcctcaagaagcaggcgccgtaggcggcaaccacaacgatctggaatcgtccttgcagcgggggatggatgcgtaa

SEQ ID NO: 142185 - protein, 418 aa, Emericella nidulans
MSDLQVQGRKVFKVFNQDFIVDDRYTVTKELGQGAYGIVCAATNVQTGEGVAIKKVTNVFSKKILAKRALREIKLLQHFRGHRNITCLYDMDIPRPDNFNETYLYEELMECDLAAIIRSGQPLTDAHYQSFIYQILCGLKYIHSANVLHRDLKPGNLLVNADCELKICDFGLARGFSIDPEENAGYMTEYVATRWYRAPEIMLSFQSYTKAIDVWSVGCILAELLGGRPFFKGRDYVDQLNQILHYLGTPNEETLSRIGSPRAQEYVRNLPFMPKVPFQRLFPNANPDALDLLDRMLAFDPSSRISVEEALEHPYLAIWHDASDEPSCPTTFDFHFEVVDDVQEMRRMIYEEVVRFRQSVRMPPQAQSLAQQQQIGNIPIPEHQQGVWRQEEPRPQEAGAVGGNHNDLESSLQRGMDA

SEQ ID NO: 142186 - DNA, 1125 bp, Medicago sativa
  CDS (1)..(1125)
atggaaaacaaaaaccctgaatctgagaaagcaaactccaaaggaactttgattcacgatggaaaatacattcaatacaacgtcttaggcaaccttttcgaagtctactccaactacattcctcctcttcaacccgtcggtcgcggcgcatacggcatcgtttgctgtgcaacgaactcagatacgaatgaaggcgttgcgataaagaagattggcgatgcgtttgataataggattgatgctaagagaacacttagagaaattaaacttctctgtcacatggatcatgataatgtgattaagatcaaggatataattaagccagctgacaaggaaaagtttaatgatgtgtatattgtgtatgagttgatggatactgatctgcatcagattattcaatctaatcaagctctcactgatgagcactgtcagtattttctatatcaactcttgagaggattgaagtacatacactctgcaaatgttttgcaccgcgatctaaagccaagcaatttacttctcaaggcaaactgtgatctcaaaatatgcgactttgggcttgccagaacaacctctgagacagacttcatgacagagtatgttgtgactcgttggtacagagcccctgaattgctactgaactgttcagaatatactgctgctattgatgtatggtcggttggttgcattttgatggagataattagaagggagcctctgtttcctggtaaagattatgttcagcaattggcgctcataactgagttgttaggttcaccaaatgaagaagatctcggattcctcagaagtgataatgcaaagaaatatgttaagcagctcccgcacgtagacaagcagccctttgcagagaggtttcctgatatgtctccactggcacttgatcttgctgagaaaatgttggtttttgatccctccaaacgcataactgttgaggaagcactgaatcacccatatatgtcaagtcttcatgagatcaacgaggagcctgtatgtccatcccctttcgtctttgattttgaacaggcaactctgaatgaagatgatataaaggagctcatatggagggagtctctgaacttctgcaaggagcagattcttgaatag

SEQ ID NO: 142187 - protein, 374 aa, Medicago sativa
MENKNPESEKANSKGTLIHDGKYIQYNVLGNLFEVYSNYIPPLQPVGRGAYGIVCCATNSDTNEGVAIKKIGDAFDNRIDAKRTLREIKLLCHMDHDNVIKIKDIIKPADKEKFNDVYIVYELMDTDLHQIIQSNQALTDEHCQYFLYQLLRGLKYIHSANVLHRDLKPSNLLLKANCDLKICDFGLARTTSETDFMTEYVVTRWYRAPELLLNCSEYTAAIDVWSVGCILMEIIRREPLFPGKDYVQQLALITELLGSPNEEDLGFLRSDNAKKYVKQLPHVDKQPFAERFPDMSPLALDLAEKMLVFDPSKRITVEEALNHPYMSSLHEINEEPVCPSPFVFDFEQATLNEDDIKELIWRESLNFCKEQILE

SEQ ID NO: 142188 - DNA, 885 bp, Triticum aestivum
  CDS (1)..(885)
atggagcagtacgagaaggtggagaagatcggggagggcacgtacggggtggtgtacaaggcccgggacaggaccaccaacgagaccatcgcgctcaagaagatccgcctggagcaggaggacgagggcgtcccctccaccgccatccgcgagatctcgctcctcaaggagatgcagcacggcaacatcgtcaagctgcacgatgttgtccacagcgagaagcgcatatggctcgtctttgagtacctggatctggacctgaagaagttcatggactcctgtccagagtttgccaagagccccgccttgatcaagtcatatctctatcagatactccgcggcgttgcttactgtcattctcatagagttcttcatcgagatttgaaacctcagaatttattgatagaccggcgtactaatgcactgaagcttgcagactttggtttagcaagggcatttggaattcctgtccgtacatttactcatgaggtagtaacattatggtacagagctcctgaaatccttcttggagcaaggcagtattccacaccagttgacgtgtggtcagtgggctgtatctttgcagaaatggtgaaccagaaaccactgttccctggcgattctgagattgatgagctatttaagatattcagggtactcggcactccaaatgaacaaacttggccaggcgtgagttccttgcctgactacaagtccgccttccccaggtggcaggcagaggaccttgcaaccgttgtccccaatcttgaacctgttggcctggaccttctctcgaaaatgcttcggttcgagccaaacaagaggatcacggctaggcaggctcttgagcatgagtacttcaaggacatggagatggtacagtga

SEQ ID NO: 142189 - protein, 294 aa, Triticum aestivum; identical to SEQ ID NO: 62998

SEQ ID NO: 142190 - DNA, 1200 bp, Zea mays
  CDS (1)..(1200)
atggacggcggggggcagcccccggacaccgagatgtcggaggccggcgcgggcggcggagggcagccgccgcagcagccactgccgccggtgggcgggggcgtgatgttggacaacatccaggcgacgctcagccacggcggccgcttcatccagtacaacatcttcggcaacgtgttcgaggtcaccgccaagtacaagccccccttactccccatcggcaagggcgcctacggcatcgtctgctcggcggtcaactccgagacggcggcagaaggtgggccatcaaagaagatcgccaacgccttcgacaacaagatcgatgccaagcgcacgctccgcgagatcaagctgctccgccacatggaccacgagaatattgttgcaataagggatatcatacctcctgcgcagagggctgcattcaatgatgtgtatattgcatatgaattgatggatactgatctgcatcaaattattcgttcaaatcaagctttgtcagaggagcactgtcagtattttctttatcaaattcttcgtggcttgaagtatatacattcagcaaatgttcttcaccgtgacttgaagcctagcaatcttcttttgaatgcaaactgtgacctcaagatatgtgattttgggcttgctcgcaccacctcagaaactgattttatgactgaatatgttgtcacaagatggtatagagcaccagagcttttgttgaactcctcagaatatactgctgccatcgatgtgtggtctgtgggctgtatatttatggaactgatggaccgcaaacccttgtttcctggaagagaccatgtccatcagctacgtcttctaatggagctcattggcacgccaaatgagggtgatcttgattttgtaaatgaaaatgcaagaagatatatccgccaacttcctcgtcaccctagacagtccttacctgaaaaatttccacatgtacaacccttagcaattgacctggtggaaaagatgctgacttttgatcctagacagagaataactgttgaaggcgcacttgcacacccttacttggcatcacttcatgacataagtgatgagccaggctgctcaatgcccttcagctttgacttcgagcagcatgcattgtctgaagaacaaatgaaggatcttatctaccaagaggctcttgcattcaaccctgattatcagtag

SEQ ID NO: 142191 - protein, 399 aa, Zea mays
MDGGGQPPDTEMSEAGAGGGGQPPQQPLPPVGGGVMLDNIQATLSHGGRFIQYNIFGNVFEVTAKYKPPLLPIGKGAYGIVCSAVNSETAAEGGPSKKIANAFDNKIDAKRTLREIKLLRHMDHENIVAIRDIIPPAQRAAFNDVYIAYELMDTDLHQIIRSNQALSEEHCQYFLYQILRGLKYIHSANVLHRDLKPSNLLLNANCDLKICDFGLARTTSETDFMTEYVVTRWYRAPELLLNSSEYTAAIDVWSVGCIFMELMDRKPLFPGRDHVHQLRLLMELIGTPNEGDLDFVNENARRYIRQLPRHPRQSLPEKFPHVQPLAIDLVEKMLTFDPRQRITVEGALAHPYLASLHDISDEPGCSMPFSFDFEQHALSEEQMKDLIYQEALAFNPDYQ

SEQ ID NO: 142192 - DNA, 885 bp, Medicago sativa
  CDS (1)..(885)
atggaacagtacgagaaagttgagaagataggagaaggtacttacggtgtggtttacaaggctcgtgaccgtgctaccaatgagacgatagctttgaagaagattcgtcttgagcaggaagatgagggagttccgagtaccgctattcgagagatttctctcttgaaggaaatgcagcacaggaacattgttaggttgcaggatgtggtgcacagtgagaagcgattgtatctggtttttgagtaccttgacttggatctaaagaagtttatggattcatctccagaatttgcaaaagatcaacggcaaataaagatgttcctttatcaaattctctgtggcattgcttactgtcattctcatagagttcttcatagagacttgaaaccacagaatctgctgattgatcgcagctctaatgccgtaaagcttgcagattttggattggccagggcatttggaattcctgtcaggacatttacacatgaggtggtgacactctggtacagagctccagaaatattgcttgggtctcgtcattattctaccccggttgatgtctggtcagtgggatgcatatttgcagagatgataaaccaacggccacttttcccaggggactctgagattgatgaattgtttaaaatattcagaatcacgggtacaccgaatgaggaaacatggcctggagtgacttcattgcctgattttaaatcagcctttcccaagtggccagctaaggacctggcaactcaagtcccaaatctggagccagctggtcttgatcttctatccagtacttgtcgcttggatcccaccagaagaattactgccaggggagctcttgagcatgaatacttcaaagacattaagtttgtcccatga

SEQ ID NO: 142193 - protein, 294 aa, Medicago sativa; identical to SEQ ID NO: 63002

SEQ ID NO: 142194 - DNA, 954 bp, Candida albicans; identical to SEQ ID NO: 63005
  CDS (1)..(954): transl_table=12

SEQ ID NO: 142195 - protein, 317 aa, Candida albicans; identical to SEQ ID NO: 63006

SEQ ID NO: 142196 - DNA, 885 bp, Chenopodium rubrum
  CDS (1)..(885)
atggatcagtatgaaaaagttgagaagataggggaaggaacctatggagtggtttataaggcgcgggacaaggttacgaacgagactatagctttgaagaaaattcggttggaacaggaggatgagggagttccgagcacggcgatcagagaaatatcacttttgaaggagatgcagcatggcaacattgtcaggttgcaggatgtggtgcatagtgagaagcgcttatatctggtttttgagtatttggaccttgatttgaagaaacacatggattcatgccctgattttgcaaaggatccacgtatgattaaaaggtttctttatcagattcttcgtggtatcgcttattgtcactctcatagggtcctgcaccgagatctgaagccgcagaatctgttgatagatcgccaaactaatgcactaaaacttgcagattttggattggcaagggcatttggtattcctgtgaggacttttacacatgaggtggtgacattgtggtacagagctccagaaatattgcttggatctcgacattactctactcctgtggatgtgtggtctgtgggttgtatctttgctgagatggtgaatcagaagccattatttcctggagattccgagattgatgaacttttcaagattttcaggaccttgggtacaccaaatgaggagacatggcctggagtgacctcccttcccgatttcaaatcttcatttcctaaatggatctccaaggatttgtctgcagtagtaccaaatcttgatccagctggtattgatcttctaaataaaatgctttgcttggatccgagcaaaaggattacagccaggaatgctcttgaacatgaatacttcaaggacattggttttgtaccctga

SEQ ID NO: 142197 - protein, 294 aa, Chenopodium rubrum; identical to SEQ ID NO: 63022

SEQ ID NO: 142198 - DNA, 885 bp, Arabidopsis thaliana
  CDS (1)..(885)
atggatcagtacgagaaagttgagaagattggtgaaggaacttacggtgtggtttataaggcacgtgacaaagtgactaatgagacaattgctttgaagaagatcaggctagagcaggaggatgaaggtgttcctagcacagcaatcagagaaatctccctcttgaaagaaatgcagcatagcaacattgtcaaattgcaggatgtggtgcacagcgagaaacgtttgtatctggtttttgagtatcttgacttggatctcaaaaagcacatggattctactcctgatttctccaaggatctacatatgatcaaaacatatctttaccagattctccgtggaattgcgtattgccactctcatagggttctccatcgtgatctgaagccacagaatttgttgattgatcgccgcacaaactcactgaagcttgctgattttggactggccagagcattcggtatccctgtcaggacatttactcatgaggttgttactctctggtaccgagcaccagagatactcctaggatctcatcattactctacacctgttgatatttggtctgtggggtgcatatttgctgagatgatcagccaaaagcccttatttcctggagactccgagattgatcaactcttcaagattttcagaatcatgggaactccgtacgaggatacatggcgtggggtaacttctctaccggattataaatctgctttccctaaatggaaaccaacggacctagaaacttttgtccccaatctagatcccgatggagtcgatctcctttctaaaatgctgttaatggatccgaccaaaagaatcaacgcaagagccgccctggagcatgaatacttcaaggatcttggaggcatgccttag

SEQ ID NO: 142199 - protein, 294 aa, Arabidopsis thaliana [sequence omitted]

SEQ ID NO: 142200 - DNA, 885 bp, Oryza sativa subsp; identical to SEQ ID NO: 140318
  CDS (1)..(885)

SEQ ID NO: 142201 - protein, 294 aa, Oryza sativa subsp; identical to SEQ ID NO: 63000

SEQ ID NO: 142202 - DNA, 879 bp, Oryza sativa subsp
  CDS (1)..(879)
atggagcagtacgagaaggtggagaagatcggggaggggacgtacggggtggtgtacaagggcaagcaccggcataccaacgagacgatcgcgctcaagaagatccgcctggagcaggaggacgagggcgtcccctccaccgccatccgcgagatctcgctgctcaaggagatgcagcatcgcaacatcgtcaggctgcaggacgtcgtgcacaaggagaaatgcatatacctcgtcttcgagtacctcgaccttgacctcaagaagcacatggactcatccccggatttcaagaaccaccgcatagtcaaatcgttcctctaccagattctccggggcattgcgtactgccactcgcaccgtgttctccaccgagatttgaagccccagaacctgctgatagatcggcgtaccaactcattgaagctcgcggactttgggttggccagggcatttggcattcctgtccggacatttactcacgaggtggtgacattgtggtatagagcacctgaaattcttcttggtgcaaggcattattccacccctgttgacatgtggtcagttggttgcatttttgctgaaatggtgaatcagaagccactatttcctggagattctgagattgatgaactctttaagattttcagtattatgggcactccaaatgaagaaacttggccaggtgttgcttcactacctgactacatatcaactttcccaaagtggccatctgtggatcttgcaaccgtggtcccaacacttgattcttcaggactcgatcttctctctaaaatgctccgtttagatccaagcaaaagaatcaatgcccgtgctgccctcgagcacgagtacttcaaggacctggaagtggcgtag

SEQ ID NO: 142203 - protein, 292 aa, Oryza sativa subsp; identical to SEQ ID NO: 63004

SEQ ID NO: 142204 - DNA, 1518 bp, Arabidopsis thaliana
  CDS (1)..(1518)
atggcgatggcatcattcgggcagctaaatctcgaggaacctcctccaatctggggatctcgcagcgttgattgctttgagaagctcgaacaaattggtgaaggcacttacggtcaagtttacatggctaaagaaatcaaaactggtgaaattgtggctctcaaaaagatacgtatggacaatgaaagagaagggtttcctataacagctattagagagataaagattctgaagaagcttcatcatgaaaatgtcattcagctgaaagagattgtgacttcaccaggtcgggacagggatgaccaaggaaagccagataataacaaatacaagggtggcatctacatggtttttgagtacatggatcatgatttgactggactagcagatcgtcctggactgagatttactgttcctcaaattaagtgttacatgaagcaattgcttaccgggcttcactattgtcatgtgaatcaagtgcttcaccgtgatataaaaggctcaaatctccttatcgacaatgagggaaatttaaagctggctgattttgggcttgcacggtcgtattctcatgatcatactggaaatcttacaaatcgtgtcatcacattgtggtataggccccctgaattactacttggggctacaaaatatggcccagcaattgacatgtggtcggttggttgcatatttgccgaacttttgcatgcaaaaccaatcttacctgggaaaaatgagcaagaacaattgaacaagatatttgagctttgtggatcacctgatgaaaaactttggcctggggtttccaagatgccttggttcaacaatttcaagcctgcacggcccttgaagaggcgtgtaagagagttcttcagacactttgatcggcatgctcttgaattactggagaaaatgttggtgcttgatccagcacagagaatatcggcaaaggatgctcttgatgccgagtacttttggactgatccgttgccatgtgacccaaagagtctgcccacatatgaatcatcacatgagttccagacaaagaaaaagcggcaacagcagcgccaaaacgaggaagcagcaaaaagacagaaactgcagcatccaccgctgcagcactctcgcttacccccattacaacatggtggacagtctcatgctgctccacattggcctgcaggtccaaaccatcccactaacaacgcaccaccacaagtacctgctggacccagccacaacttctatgggaagccgcgtggtccacctggtccaaaccgctaccctcctagcggaaaccagagcgggggttataatcaaagccgaggaggttacagcagtggatcatatcctccacaaggacgtggagctccttatgtggctggtcctagagggcctagtggtggcccgtacggggttggacctcctaactacacacaaggtggtcagtatggtggctctggtagctcgggaagagggcagaatcagagaaaccagcaatacggatggcaacagtaa

SEQ ID NO: 142205 - protein, 505 aa, Arabidopsis thaliana
MAMASFGQLNLEEPPPIWGSRSVDCFEKLEQIGEGTYGQVYMAKEIKTGEIVALKKIRMDNEREGFPITAIREIKILKKLHHENVIQLKEIVTSPGRDRDDQGKPDNNKYKGGIYMVFEYMDHDLTGLADRPGLRFTVPQIKCYMKQLLTGLHYCHVNQVLHRDIKGSNLLIDNEGNLKLADFGLARSYSHDHTGNLTNRVITLWYRPPELLLGATKYGPAIDMWSVGCIFAELLHAKPILPGKNEQEQLNKIFELCGSPDEKLWPGVSKMPWFNNFKPARPLKRRVREFFRHFDRHALELLEKMLVLDPAQRISAKDALDAEYFWTDPLPCDPKSLPTYESSHEFQTKKKRQQQRQNEEAAKRQKLQHPPLQHSRLPPLQHGGQSHAAPHWPAGPNHPTNNAPPQVPAGPSHNFYGKPRGPPGPNRYPPSGNQSGGYNQSRGGYSSGSYPPQGRGAPYVAGPRGPSGGPYGVGPPNYTQGGQYGGSGSSGRGQNQRNQQYGWQQ

SEQ ID NO: 142206 - DNA, 1560 bp, Oryza sativa subsp
  CDS (1)..(1560)
atggcggtggcggcgccggggcagctgaacctcgacgagtcgccgtcgtggggctcccgcagcgtcgattgcttcgagaagctcgagcagatcggcgagggcacatacgggcaagtgtacatggcgagggagacggagacgcaggagatcgtcgcgctcaagaagatccgcatggataacgagcgcgagggcttccccatcactgcaatccgcgaaatcaaaatcctcaagaagctgcaccaccagaacgtcatccagctcaaggagatcgtcacctcgccaggaccggagagagatgagcaggggaaaccaatccatggtaacaagtacaaggggagcatttacatggtcttcgagtacatggaccatgacttgactgggttggcagataggcctgggatgcgtttcaccgtgccgcagattaagtgttacatgaagcaactccttacaggccttcattattgtcacattaatcaagttctgcatcgtgatattaaaggatccaatctcttgatagacaatgaaggtaacttgaagctggctgattttggcctagcaagatcattttcaaatgatcataacggaaatctcactaatcgtgtgatcactttgtggtacagacctccagagttgctgctcggaagcaccaagtatggaccagcagttgacatgtggtctgtcggttgtatttttgcagagcttctcaatggaaagccaattctgccaggaaagaatgagccagagcaactgagcaaaatatttgatgtttgtggcacacctgatgaatcaaactggccgggtgtcacaaaaatgccttggtacaacaatttcaagcctccccgccaactgaagagacgtgtaaaggagtactttaagcattttgacaggcttgctctggatctgcttgaaaagatgttaacactagatccagcacagaggatatcagcacaagatgcacttgatgcagagtatttctggtctgatcccctaccatgtgatcctaaaagcttgccaaagtatgaatcttcacacgagttccagaccaagaaaaaacgccaacaaatgcgtcaagccgatgaagctgcgaagaggcaaaagacacaacatcctcaaccacatggccgtttgcctccaattcaacaaacaggacagccccatcctcaaatcagaccaggccagccgatgaacaacccccatgcgccgatggctgctgggccaggccatcactatgcaaaacccagagggccaggaggctcaagcaggtatccacagggtgggaaccaaggtggaggatatccgaaccgcggcggacaaggtggtggtggcagctatggaaatgccccttaccctcaacaaggtcgagggccgccgccaccgtaccctggcagtggaatggccggaacaggtggcccaaggggtggcgttggtggtggctatggaggaggatcaaattatccccagcaaggcggcccatatggtccttctggcccaggccgagggtcaaattatccccaacaaggtggttctcgcaaccagcagcagtacggaaactggcagtag

SEQ ID NO: 142207 - protein, 519 aa, Oryza sativa subsp
MAVAAPGQLNLDESPSWGSRSVDCFEKLEQIGEGTYGQVYMARETETQEIVALKKIRMDNEREGFPITAIREIKILKKLHHQNVIQLKEIVTSPGPERDEQGKPIHGNKYKGSIYMVFEYMDHDLTGLADRPGMRFTVPQIKCYMKQLLTGLHYCHINQVLHRDIKGSNLLIDNEGNLKLADFGLARSFSNDHNGNLTNRVITLWYRPPELLLGSTKYGPAVDMWSVGCIFAELLNGKPILPGKNEPEQLSKIFDVCGTPDESNWPGVTKMPWYNNFKPPRQLKRRVKEYFKHFDRLALDLLEKMLTLDPAQRISAQDALDAEYFWSDPLPCDPKSLPKYESSHEFQTKKKRQQMRQADEAAKRQKTQHPQPHGRLPPIQQTGQPHPQIRPGQPMNNPHAPMAAGPGHHYAKPRGPGGSSRYPQGGNQGGGYPNRGGQGGGGSYGNAPYPQQGRGPPPPYPGSGMAGTGGPRGGVGGGYGGGSNYPQQGGPYGPSGPGRGSNYPQQGGSRNQQQYGNWQ

SEQ ID NO: 142208 - DNA, 1542 bp, Arabidopsis thaliana
  CDS (1)..(1542)
atggcggctgcggcttttgggcagttaaatctagaggagcctccaccgatttggggatctcgtagtgtcgattgcttcgagaagcttgaacagattggtgaaggaacttacggccaagtgtacatggctaaagaaattaaaactggtgaaatcgtggctctgaaaaagatccgtatggacaatgaaagagaagggtttccgataaccgctatccgggagatcaaaattctgaagaagctgcatcatgaaaatgtcatccatttgaaagagattgttacttctccaggtcgagatagggatgatcaaggaaagccagataataacaaatacaagggtggaatctacatggtctttgagtacatggatcatgacttgactggacttgctgatcgtcctggactgagatttacggttcctcagataaagtgttacatgaagcaactgctgactgggcttcactattgtcatgtgaatcaagtgcttcaccgtgatataaaaggttcgaatctacttattgacaatgagggaaatttaaagctagcggattttgggcttgctcggtcatattctcatgatcatactggaaacctcacaaatcgtgtcatcactttgtggtataggccccctgaattgttacttggtgcaactaaatatggaccagcgattgacatgtggtcagttggatgcatatttgctgaacttttgaatggaaaaccaatcttgcctgggaaaactgagaatgaacaattgaataagatttatgagctttgtggatcacctgatgaaagcaactggcctggagtttccaagatgccttggtataaccaaatgaaatcatctcggcccttaaagagacgcgtaagggagatctacagacactttgatcgccatgcccttgaactacttgagaaaatgttggtacttgacccatctcagagaatatgcgcaaaggatgctcttgatgctgagtacttttggactgatccgctgccatgtgatccaaagagtctaccgacatatgaatcatcacatgagttccagacaaagaaaaaacggcaacagatgcgtcataatgaggaagcagccaaaaaacagaaactgcagcatccacagcagcaacattctcgtttacctccacagcaacacggtgttggccagtctcatgccgctccactttggcctgctggaccaaaccaccctatgaacaacaacgcaccaccaccccaaatacctgctggtggccattactatggaggaaagccccgtggtggtgcacctgttccaaaccggtaccctcctagcggaaaccagactggtggttataataatcagagccgtggaggttacagcagcggagcatatcctccacaaggtcgtggtgcaccatatggcgccggtcctagaggacctagcggtggctatggtgttggaccacccaactactcacaaggtggtggtcagtatggtggatctggtggctctggaagaggtcagaaccctatgggtggtgctagaaaccaacaatatggatggcaaccgtaa

SEQ ID NO: 142209 - protein, 513 aa, Arabidopsis thaliana
MAAAAFGQLNLEEPPPIWGSRSVDCFEKLEQIGEGTYGQVYMAKEIKTGEIVALKKIRMDNEREGFPITAIREIKILKKLHHENVIHLKEIVTSPGRDRDDQGKPDNNKYKGGIYMVFEYMDHDLTGLADRPGLRFTVPQIKCYMKQLLTGLHYCHVNQVLHRDIKGSNLLIDNEGNLKLADFGLARSYSHDHTGNLTNRVITLWYRPPELLLGATKYGPAIDMWSVGCIFAELLNGKPILPGKTENEQLNKIYELCGSPDESNWPGVSKMPWYNQMKSSRPLKRRVREIYRHFDRHALELLEKMLVLDPSQRICAKDALDAEYFWTDPLPCDPKSLPTYESSHEFQTKKKRQQMRHNEEAAKKQKLQHPQQQHSRLPPQQHGVGQSHAAPLWPAGPNHPMNNNAPPPQIPAGGHYYGGKPRGGAPVPNRYPPSGNQTGGYNNQSRGGYSSGAYPPQGRGAPYGAGPRGPSGGYGVGPPNYSQGGGQYGGSGGSGRGQNPMGGARNQQYGWQP

SEQ ID NO: 142210 - DNA, 1197 bp, Arabidopsis thaliana
  CDS (1)..(1197)
atggaacagccgaagaaagttgctgataggtatctaaagcgagaggttcttggtcaaggtacttatggagtcgtcttcaaagctactgatacaaagaatggagaaactgtagcgatcaagaaaataagacttggtaaagagaaagaaggtgtgaatgtaacagctcttagagaaatcaaattacttaaagagcttaagcatccacatataattgagttgattgatgcgtttcctcacaaggagaatttgcacatcgtgtttgagttcatggagactgatctcgaagcagttatccgagatcgtaatctctatctttcgcctggtgatgtcaaatcttacctccaaatgatattgaaaggtcttgaatattgccatggcaaatgggttctgcacagagatatgaagccaaacaacttgttgataggacccaatggacagctgaaacttgcagattttgggttagcacgtatatttggtagcccaggtcgtaagtttacccaccaggtgtttgctagatggtatagagcacctgaacttttgtttggtgcaaaacaatatgatggtgcagttgatgtttgggctgctggctgcatttttgctgaacttctattacgcagaccatttcttcagggaaacagtgatattgatcaattaagcaaaatctttgctgcctttgggactccaaaagcagatcagtggcctgacatgatctgccttcctgattatgtagagtatcaatttgtccctgctccttctttacgttctttactcccaacggttagtgaggatgctttagatttgttgtcaaagatgttcacctatgaccccaagtctagaatatcgattcagcaggctctaaaacacaggtacttcacatctgcaccttcacctactgaccctttaaagctcccaagaccagtttccaagcaagatgctaagtcatctgatagtaaacttgaagccattaaagtgctgtcaccagcacataagtttagaagagtgatgcctgaccgaggaaagtctggtaatggtttcaaggaccagagtgttgatgtcatgagacaagctagccatgatggacaagcaccaatgtctttagatttcaccatcttagctgagcggccaccaaaccgaccaaccatcaccagtgcagatagatctcatctgaagaggaaacttgatctcgagttcctatag

SEQ ID NO: 142211 - protein, 398 aa, Arabidopsis thaliana
MEQPKKVADRYLKREVLGQGTYGVVFKATDTKNGETVAIKKIRLGKEKEGVNVTALREIKLLKELKHPHIIELIDAFPHKENLHIVFEFMETDLEAVIRDRNLYLSPGDVKSYLQMILKGLEYCHGKWVLHRDMKPNNLLIGPNGQLKLADFGLARIFGSPGRKFTHQVFARWYRAPELLFGAKQYDGAVDVWAAGCIFAELLLRRPFLQGNSDIDQLSKIFAAFGTPKADQWPDMICLPDYVEYQFVPAPSLRSLLPTVSEDALDLLSKMFTYDPKSRISIQQALKHRYFTSAPSPTDPLKLPRPVSKQDAKSSDSKLEAIKVLSPAHKFRRVMPDRGKSGNGFKDQSVDVMRQASHDGQAPMSLDFTILAERPPNRPTITSADRSHLKRKLDLEFL

SEQ ID NO: 142212 - DNA, 1302 bp, Oryza sativa subsp
  CDS (1)..(1302)
atggaaaggtacaaagtgataagggagataggcgatggcacctgtgggaatgtttttagggcttataacactgaaacaaatgaaattgttgcagttaaaaaaatgaagaggaagtttttccaatgggaagagtgcattagtctgcgagaggtgaaggcacttcaaaaactgaatcatcccaacattgtgaagttaaaggaggtgactatggaaaatcacgagttgttcttcatttttgaaaacatggaatgcaatttgtatgatgtcataagagaaaggcaagctgctttctcagaagaggagatacggaactttatggtgcagatactgcaaggtcttgcatatatgcataacaacggttatttccatcgtgacctgaaacctgaaaatctgttggtgacagatggcactgttaaaattgctgactttgggttggcaagagaagtatcttccagtcctccttatactgactatgtttccaccagatggtatcgagctccagaggtgctgctacaatcgtcagcttacacacctgctattgatatgtgggctgttggtgcaattttggctgagcttttcacactgtctccacttttccctggtggaagcgagactgatcagctatacaaaatatgtgctgtgcttgggacaccggatcatactgtctggccagagggaatgaacctgcctcgttcaagcagctttaattttttccagatcccaccaagaaatctatgggagcttattcctaatgctactttggaagctatcgacttgattcagcaactttgttcctgggatccacgaagaaggccaactgctgagcaatcactacagcatccgttctttaatgtgggcaactgggtaccaaggccactccatgcctctcacacaaagacaattgaaactagaccgaatccaaggttggaactgaacctgtgggattttggtacagaacctgaggacaactaccttgatttaactctgagtctaaagccaagttttcctggaacagatttttctaacaatgttccagagcatacaaaagaggaaattctgctgtacccaggatttgaaaatcctcctgtgcagtcagggttttggcctctcgttgcatcagaccggccaatgggcgatgttccagccatgtcatcctggccacaggcatatgtggttgacggccaagccacacttccagctgttggattctctggttctccattcggtttgtcccccttacaaccaaatctgtttgagaaccgttcgttcgcaacacccatccggcaggtcaatttcttctga

SEQ ID NO: 142213 - protein, 433 aa, Oryza sativa subsp
MERYKVIREIGDGTCGNVFRAYNTETNEIVAVKKMKRKFFQWEECISLREVKALQKLNHPNIVKLKEVTMENHELFFIFENMECNLYDVIRERQAAFSEEEIRNFMVQILQGLAYMHNNGYFHRDLKPENLLVTDGTVKIADFGLAREVSSSPPYTDYVSTRWYRAPEVLLQSSAYTPAIDMWAVGAILAELFTLSPLFPGGSETDQLYKICAVLGTPDHTVWPEGMNLPRSSSFNFFQIPPRNLWELIPNATLEAIDLIQQLCSWDPRRRPTAEQSLQHPFFNVGNWVPRPLHASHTKTIETRPNPRLELNLWDFGTEPEDNYLDLTLSLKPSFPGTDFSNNVPEHTKEEILLYPGFENPPVQSGFWPLVASDRPMGDVPAMSSWPQAYVVDGQATLPAVGFSGSPFGLSPLQPNLFENRSFATPIRQVNFF

SEQ ID NO: 142214 - DNA, 936 bp, Arabidopsis thaliana; identical to SEQ ID NO: 62743
  CDS (1)..(936)

SEQ ID NO: 142215 - protein, 311 aa, Arabidopsis thaliana; identical to SEQ ID NO: 62744

SEQ ID NO: 142216 - DNA, 1101 bp, Cryptococcus neoformans
  CDS (1)..(1101)
atgacaatcgaccaaagccaaatcaacttcaatgttccttctacttataagctcgaagagatcgtgggtgaaggtgcatatggtcttgtagtagctggcacccaccttccctctgggactcaagtcgctatcaagcgtatcacgccatttgaccataccatgttctgccaacgaacgttgagagagatcaagcttcttaggcattttcatcacgaaaatatcatttccattcttgacctgattcaaccagaaagctatgaggtattcaacgaagtctatctcgtccaggaacttatggagactgatttgcaccgagtgatcagaagtcaggaactatcagatgatcactgccaatactttgtctaccagactcttcggggtctgaaagccctccattctgccgacgtccttcaccgtgatctcaaaccctcaaaccttctgttaaacgccaattgtgacctcaaaatctgtgatttcggtcttgcccgatcatctgccaagcctccacctggtacatcagacggaggacagggattcatgacggaatatgtcgctacaagatggtatcgagcgcccgaagtcatgctatcattccaagaatataccaaggctatcgatttgtggagtgtaggctgcattcttgctgaaatgatcaacggcaagccgttattccctgggagagattaccaccaccaattatctttgattttacaagtgctcggtacccctactatggacgacttcaacgagatcacctctcaacgatcaaaggattatcttcgagcactagagttcacccgacgtcaagacttttctgcgatttgccctaaagccaagcctgcggcggttgatcttttaaaacaaaccctcaccttttccccgtccaagaggatcacagtggaagaagcgttgatgcattcttacgtcgaagcttatcacgacccgcatgacgaacctaatgctgaacccctaaaacccggattctttgactttgagttccatcaagagaaattgagtagagatcaatggaaacgaatgatttacgatgaggtgcaagatccggtacccaccatcctctctcaatggacggaaagccattaa

SEQ ID NO: 142217 - protein, 366 aa, Cryptococcus neoformans
MTIDQSQINFNVPSTYKLEEIVGEGAYGLVVAGTHLPSGTQVAIKRITPFDHTMFCQRTLREIKLLRHFHHENIISILDLIQPESYEVFNEVYLVQELMETDLHRVIRSQELSDDHCQYFVYQTLRGLKALHSADVLHRDLKPSNLLLNANCDLKICDFGLARSSAKPPPGTSDGGQGFMTEYVATRWYRAPEVMLSFQEYTKAIDLWSVGCILAEMINGKPLFPGRDYHHQLSLILQVLGTPTMDDFNEITSQRSKDYLRALEFTRRQDFSAICPKAKPAAVDLLKQTLTFSPSKRITVEEALMHSYVEAYHDPHDEPNAEPLKPGFFDFEFHQEKLSRDQWKRMIYDEVQDPVPTILSQWTESH

SEQ ID NO: 142218 - DNA, 1254 bp, Candida albicans
  CDS (1)..(1254): transl_table=12
atgatgaatatagatcaacatcatcagcttcaacagcaacatcaacaacaaatgttacaacaacaagctcaggctcaggctcaggctcaagctcaagcacaacaacaacaacaggcagcagccgcagccgcagcagctaacgctgcagctactacttcttcttcttcccctcgtcaagtttcattcaacgtatctgatcattatcaaatattagaaattgttggagaaggagcatatggaatagtttgttcagccattcataaaccatcacaacaaaaagttgccattaaaaaaattgaaccatttgaaagaagtatgttatgtttacgtacattacgagaattaaaattattaaaacattttaatcatgaaaatatcattagtatattagctatacaacgaccaattaattatgaatcatttaatgaaatttatttaattcaagaattgatggaaactgatttacatcgagtcattagaactcaaaatttatctgatgatcatatacaatatttcatttatcaaactttaagagctttaaaagctatgcattcagctaatgtattacatcgagatttaaaaccactgaatttattattaaattcaaattgtgatttaaaaatttgtgattttggtttagcaagatcaattgcttcacaagaagataattatggattcatgacggaatatgtagctacaagatggtatagagctccagaaatcatgttaacttttcaagaatatactactgctattgatgtttggtcagttggttgtatattggcagaaatgttgagtggtagacctttattccctggtagagattatcataatcaattatggttaattatggaagttttaggaacaccaaatatggaagattattataatattaaatctaaacgagcaagagaatatattagaagtttacccttttgtaaaaaaattccgttcagtgaattatttgccaataccaacaacaatactagtactagtaatactggcggtaggacaaatattaatccattggcattagatttattagaaaaattattaatttttaatcctgctaaaagaattactgttgaagatgctttaaaacatccttatttacaattatatcatgatcctaatgatgaaccaattagtgataaaatcccagaagattttttcgattttgataaaatgaaagatcaattaacaattgaagatttgaaaaaattgttatatgaagagattatgaagccattataa

SEQ ID NO: 142219 - protein, 417 aa, Candida albicans
MMNIDQHHQLQQQHQQQMLQQQAQAQAQAQAQAQQQQQAAAAAAAANAAATTSSSSPRQVSFNVSDHYQILEIVGEGAYGIVCSAIHKPSQQKVAIKKIEPFERSMLCLRTLRELKLLKHFNHENIISILAIQRPINYESFNEIYLIQELMETDLHRVIRTQNLSDDHIQYFIYQTLRALKAMHSANVLHRDLKPSNLLLNSNCDLKICDFGLARSIASQEDNYGFMTEYVATRWYRAPEIMLTFQEYTTAIDVWSVGCILAEMLSGRPLFPGRDYHNQLWLIMEVLGTPNMEDYYNIKSKRAREYIRSLPFCKKIPFSELFANTNNNTSTSNTGGRTNINPLALDLLEKLLIFNPAKRITVEDALKHPYLQLYHDPNDEPISDKIPEDFFDFDKMKDQLTIEDLKKLLYEEIMKPL

SEQ ID NO: 142220 - DNA, 1131 bp, Drosophila melanogaster; identical to SEQ ID NO: 140280
  CDS (1)..(1131)

SEQ ID NO: 142221 - protein, 376 aa, Drosophila melanogaster; identical to SEQ ID NO: 140281

SEQ ID NO: 142222 - DNA, 1062 bp, Saccharomyces cerevisiae
  CDS (1)..(1062)
atgccaaagagaattgtatacaatatatccagtgacttccagttgaagtcgttactgggagagggtgcatacggtgtggtatgttctgcaacgcataagcccacgggagaaatcgtggcaataaaaaagatcgaaccattcgataagcctttgttcgcattacgtacgctgcgtgaaataaagatcctgaagcacttcaagcacgaaaatatcataacaatcttcaacattcaacgccctgactcgttcgaaaacttcaatgaggtctacataattcaagagctaatgcagacagatttacaccgtgtaatctccacccagatgctgagtgacgatcatatacaatattttatataccaaaccttgagagcagtgaaagtgctgcatggttcgaacgtcatccatcgtgatttaaagccctccaaccttctcataaactccaactgtgacttgaaagtatgtgatttcggtttagcaagaatcattgacgagtcagccgcggacaattcagagcccacaggtcagcaaagcggcatgaccgagtatgtggccacacgttggtacagggcgccagaggtgatgttaacctctgccaaatactcaagggccatggacgtgtggtcctgcggatgtattctcgctgaacttttcttaagacggccaatcttccctggcagagattatcgccatcaactactactgatattcggtatcatcggtacacctcactcagataatgatttgcggtgtatagagtcacccagggctagagagtacataaagtcgcttcccatgtaccctgccgcgccactggagaagatgttccctcgagtcaacccgaaaggcatagatcttttacagcgtatgcttgtttttgaccctgcgaagaggattactgctaaggaggcactggagcatccgtatttgcaaacataccacgatccaaacgacgaacctgaaggcgaacccatcccacccagcttcttcgagtttgatcactacaaggaggcactaacgacgaaagacctcaagaaactcatttggaacgaaatatttagttag

SEQ ID NO: 142223 - protein, 353 aa, Saccharomyces cerevisiae
MPKRIVYNISSDFQLKSLLGEGAYGVVCSATHKPTGEIVAIKKIEPFDKPLFALRTLREIKILKHFKHENIITIFNIQRPDSFENFNEVYIIQELMQTDLHRVISTQMLSDDHIQYFIYQTLRAVKVLHGSNVIHRDLKPSNLLINSNCDLKVCDFGLARIIDESAADNSEPTGQQSGMTEYVATRWYRAPEVMLTSAKYSRAMDVWSCGCILAELFLRRPIFPGRDYRHQLLLIFGIIGTPHSDNDLRCIESPRAREYIKSLPMYPAAPLEKMFPRVNPKGIDLLQRMLVFDPAKRITAKEALEHPYLQTYHDPNDEPEGEPIPPSFFEFDHYKEALTTKDLKKLIWNEIFS

SEQ ID NO: 142224 - DNA, 1068 bp, Alternaria brassicicola; identical to SEQ ID NO: 140202
  CDS (1)..(1068)

SEQ ID NO: 142225 - protein, 355 aa, Alternaria brassicicola; identical to SEQ ID NO: 140203

SEQ ID NO: 142226 - DNA, 1203 bp, Arxula adeninivorans; identical to SEQ ID NO: 140224
  CDS (1)..(1203)
  misc_feature (1139)..(1139): r is g or a

SEQ ID NO: 142227 - protein, 400 aa, Arxula adeninivorans; identical to SEQ ID NO: 140225
  misc_feature (380)..(380): The Xaa at location 380 stands for Arg, or Gln.

SEQ ID NO: 142228 - DNA, 1362 bp, Ashbya gossypii
  CDS (19)..(1362)
atgtggcgagcaaggacgatggcgagccaagaggagttctaccggacgcagatcttcgggacagtgttcgagatcacgaaccggtatgcagacctgaacccggtggggatgggcgcgttcgggctggtgtgctctgcggtggacacgtacacgcagcagccggtggcgattaagaagatcatgaagccgttctcgacggcggtgctggcgaagcggacgtaccgggagctgaagctgctgaagcacctgcggcacgagaacctgatatgcctggaggatatcttcctgtcgccgctggaggacatctactttgtgacggagctgcagggcacggacctgcaccggctgctgcagacgcggccgctggagaagcagtttctgcagtactttctgtaccagatcctgcgggggctgaagtacgtgcactccgcgggcgtgatacaccgcgacctgaagcccagcaacatcctgatcaacgagaactgcgatctgaagatctgcgactttgggcttgcgcgcatccaggacccgcagatgacgggctacgtgtcgacgcgctactaccgcgcgccggagatcatgctgacatggcagaagtacaacgtggaggtggacatctggtccgcgggctgcatatttgcggaaatgatcgagggcaagccgctgttcccgggcaaggaccacgtgcaccagttctcgatcattaccgacctgctgggctccccgccgaaagatgtcattgacaccatttgctccgagaacaccctgaagtttgtgacgtcgctcccccaccgcgatcctgttccgttcacagagcgtttcaagaatctgaaacccgacgctgtggatttgttggagaaaatgcttgtcttcgaccccaaaaagagaatcacagcgggcgacgctctgactcatccctatctggcgccctaccacgatccgactgacgagccggttgcagacgccaagttcgattggaacttcaacgatgcagacctcccggttgacacatggcgtgttatgatgtactccgagattctcgattttcaccaggtaccagactcgcaaatcaatccaaacgatacatttgacgatcaggtagctgctgcaaccgccgctgccgaggctgccaggcaacaacagcagcagaagcagcagcagcagaaacagcagcagcaacgtcatcagggtgtggagcatggtgcacaacacgtacaactgcaacatggtgccaagcagctttctgccgaccccctagtcggtgactccaatggcggaattcctctaaacgtctccgctgctaatgagacattgaataactttgcaaatcaggctgcacagtacgctacggacttcgagtaa

SEQ ID NO: 142229 - protein, 447 aa, Ashbya gossypii
MASQEEFYRTQIFGTVFEITNRYADLNPVGMGAFGLVCSAVDTYTQQPVAIKKIMKPFSTAVLAKRTYRELKLLKHLRHENLICLEDIFLSPLEDIYFVTELQGTDLHRLLQTRPLEKQFLQYFLYQILRGLKYVHSAGVIHRDLKPSNILINENCDLKICDFGLARIQDPQMTGYVSTRYYRAPEIMLTWQKYNVEVDIWSAGCIFAEMIEGKPLFPGKDHVHQFSIITDLLGSPPKDVIDTICSENTLKFVTSLPHRDPVPFTERFKNLKPDAVDLLEKMLVFDPKKRITAGDALTHPYLAPYHDPTDEPVADAKFDWNFNDADLPVDTWRVMMYSEILDFHQVPDSQINPNDTFDDQVAAATAAAEAARQQQQQKQQQQKQQQQRHQGVEHGAQHVQLQHGAKQLSADPLVGDSNGGIPLNVSAANETLNNFANQAAQYATDFE

SEQ ID NO: 142230 - DNA, 1098 bp, Aspergillus clavatus
  CDS (1)..(1098)
atggcggagttcgtgcgtgcccagatcttcggcaccacctttgagatcaccagcagatacacagacctgcagcccgtgggaatgggggcctttggcctggtctgttctgcgagagatcaattgacaggacagcccgtggctgtcaagaagattatgaagcccttcagcacccccgttttgtccaagagaacataccgcgaacttaagctgctgaagcatttacgacatgaaaatatcattagtttgagcgacatcttcatttcgccgctcgaggacatctactttgtcaccgaacttcttggaaccgaccttcacagacttttgacttcgagaccgttggaaaagcaattcattcagtacttcttataccagattctgcggggattgaaatatgtccactcggccggtgtcgtccaccgtgacctcaaacccagcaacatccttatcaacgaaaattgcgatttgaaaatttgcgacttcggccttgcccgtatccaggatcctcagatgaccggctatgtctcgacacgatactaccgcgctccggaaatcatgttgacatggcaaaaatatgacgtggaggtagacatctggagcaccggttgtatcttcgccgagatgctcgagggaaagcccctgttccccggaaaggaccacgtcaatcagttttccatcatcaccgagctcctcgggactccccccgatgatgtgattcagactatctgcagcgaaaatactctgcggttcgtcaagtcactgcctaagcgtgaacgccagcctcttgcgaacaagttcaagaacgccgaccctgacgcggttgatcttttggagcgcatgctcgttttcgaccccaagaagagaatccgtgccacagaagcacttgcgcacgaatacctttctccctaccacgatcccaccgatgagcccgaggcggaagagaagttcgattggtcattcaacgacgccgacctccccgtcgatacctggaaaatcatgatgtactcggagatcctcgacttccacaacatcgaccaaggcaacgatgccagccaggcccttgccgaaggcttgggacaaggccagcagaacttcgcctga

SEQ ID NO: 142231 - protein, 365 aa, Aspergillus clavatus
MAEFVRAQIFGTTFEITSRYTDLQPVGMGAFGLVCSARDQLTGQPVAVKKIMKPFSTPVLSKRTYRELKLLKHLRHENIISLSDIFISPLEDIYFVTELLGTDLHRLLTSRPLEKQFIQYFLYQILRGLKYVHSAGVVHRDLKPSNILINENCDLKICDFGLARIQDPQMTGYVSTRYYRAPEIMLTWQKYDVEVDIWSTGCIFAEMLEGKPLFPGKDHVNQFSIITELLGTPPDDVIQTICSENTLRFVKSLPKRERQPLANKFKNADPDAVDLLERMLVFDPKKRIRATEALAHEYLSPYHDPTDEPEAEEKFDWSFNDADLPVDTWKIMMYSEILDFHNIDQGNDASQALAEGLGQGQQNFA

SEQ ID NO: 142232 - DNA, 1101 bp, Aspergillus fumigatus
  CDS (1)..(1101)
atggccgagttcgtgcgtgcccagattttcggcaccacctttgagatcactagcaggtatacagatctgcaaccggtgggaatgggagcctttggacttgtctgctctgcaagagatcaattgacaggccaacccgtggctgtaaagaagatcatgaagcctttcagcactcctgttttgtcgaagagaacataccgtgagctgaaactgttgaagcacttacggcacgagaacatcattagcttaagcgatatcttcatctctcctctcgaggacatttactttgtcacagagctccttgggacagacctccaccgacttctaacttcgagaccattggagaaacaattcattcaatacttcctatatcagattttgcgaggtctgaaatacgttcactcagcaggcgtcgtccaccgtgatctcaaacccagcaacattcttatcaacgaaaactgcgatttgaaaatctgcgattttggccttgctcgtatccaagaccctcagatgaccggctatgtttcaacgagatactaccgagcccctgaaatcatgcttacatggcagaaatatgacgtggaagtcgacatctggagtgcaggctgtatttttgccgagatgctggaaggaaagcctttatttcctggaaaggaccatgtcaaccagttctctatcatcacagaactgcttgggactccgccggacgatgtgattcaaactatctgcagtgagaataccctgcggtttgtcaagtccctaccgaagcgtgaacgtcaacctcttgccaacaaattcaagaacgctgatcctgaggcggtcgatcttctagagcgaatgctcgtttttgatcccaagaagaggatccgcgcgggggaagcacttgcgcacgaatacctctctccctaccacgaccctaccgatgagcctgaggctgaggagaagttcgattggtcattcaatgacgccgaccttcccgtggatacctggaagattatgatgtactcggagattctcgacttccacaacatcgaccagggtaacgacgctggccaggtgctcatggaaggaggcgtggcccaagcgcaacaaaactatgcataa

SEQ ID NO: 142233 - protein, 366 aa, Aspergillus fumigatus
MAEFVRAQIFGTTFEITSRYTDLQPVGMGAFGLVCSARDQLTGQPVAVKKIMKPFSTPVLSKRTYRELKLLKHLRHENIISLSDIFISPLEDIYFVTELLGTDLHRLLTSRPLEKQFIQYFLYQILRGLKYVHSAGVVHRDLKPSNILINENCDLKICDFGLARIQDPQMTGYVSTRYYRAPEIMLTWQKYDVEVDIWSAGCIFAEMLEGKPLFPGKDHVNQFSIITELLGTPPDDVIQTICSENTLRFVKSLPKRERQPLANKFKNADPEAVDLLERMLVFDPKKRIRAGEALAHEYLSPYHDPTDEPEAEEKFDWSFNDADLPVDTWKIMMYSEILDFHNIDQGNDAGQVLMEGGVAQAQQNYA

SEQ ID NO: 142234 - DNA, 1074 bp, Blumeria graminis
  CDS (1)..(1074)
atggctgaattcgtacgagctcagatttttgggacaacctttgagataacctcgagatactctgatctccagcctgttggaatgggcgcgttcggtctagtatgctcggcgaaagataaccttaccggccagaatgtcgcggttaagaaaatcatgaagccatttagcacgcctgtcctatcgaagagaacatatcgcgagcttaaactactaaagcaccttagacatgaaaacgttatctccctcagtgatatatttatatcgcctctggaagatatctattttgttaccgaactcttaggtactgatcttcatcgtttgctaacatcgagaccgctcgaaaaacaattcattcaatattttctttaccaaattttacgaggactcaagtatgtacattctgctggtgtcgtccatcgtgatcttaaaccaagcaacatcctcgtcaatgaaaactgcgacctcaaaatctgcgactttggcttagctcgaattcaagatccccagatgaccggatatgtgtcaactagatattacagagcacctgaaattatgctcacatggcaaaaatacgatgtggaagttgacatatggagtgccgggtgtatttttgctgagatgttagagggcaagcctttatttcccggaaaggatcacgtcaatcaattctccatcataactgaacttttgggaactccaccagacgatgttattcacactattgcaagcgaaaatactctaagatttgtccagtctcttccaaagcgtgtgagacagccacttaaggataagtttaccaacgctgatccacttgctatcggtctcctcgaagagatgctagtattcgatccacgcagacgtatcaaggccaccgatgctcttgcgcatgagtaccttgctccataccacgacccgaccgatgagcctattgcactggaaaaatttgactggtcattcaacgacgctgacctcccggtggatacgtggaaaattatgatgtactcagaaattctcgattatcataatgtggactcagagaaccaagccatggaggatcctctcgaatgtccttga

SEQ ID NO: 142235 - protein, 357 aa, Blumeria graminis
MAEFVRAQIFGTTFEITSRYSDLQPVGMGAFGLVCSAKDNLTGQNVAVKKIMKPFSTPVLSKRTYRELKLLKHLRHENVISLSDIFISPLEDIYFVTELLGTDLHRLLTSRPLEKQFIQYFLYQILRGLKYVHSAGVVHRDLKPSNILVNENCDLKICDFGLARIQDPQMTGYVSTRYYRAPEIMLTWQKYDVEVDIWSAGCIFAEMLEGKPLFPGKDHVNQFSIITELLGTPPDDVIHTIASENTLRFVQSLPKRVRQPLKDKFTNADPLAIGLLEEMLVFDPRRRIKATDALAHEYLAPYHDPTDEPIALEKFDWSFNDADLPVDTWKIMMYSEILDYHNVDSENQAMEDPLECP

SEQ ID NO: 142236 - DNA, 1344 bp, Candida glabrata
  CDS (1)..(1344)
atggctactaatgaagagttcataagaacccagatattcggcacagtcttcgagataactaaccgttactcagacttgaaccccgttggtatgggtgccttcgggctggtgtgctcggctacagacactttgactaaccaacaagtggcaatcaagaagatcatgaagcctttcgccacagcggtgctggccaagagaacctacagagaattgaaacttctgaaacatctgagacatgaaaacttgatctgtctccaggatatcttcctgtcgccactcgaggatatatacttcgtcaccgagctgcagggaactgatctccaccgcttactacaaaccagacctctagagaagcaattcgtacagtacttccattatcagatattgagaggtctgaaatacgttcactcagcaggagtagtccacagagatttgaaaccaagcaatatcctaatcaatgaaaactgtgacctgaagatctgtgatttcggacttgcaagaatccaggacccacagatgacaggctacgtctccacaagatactacagagcccccgaaatcatgttaacttggcagaaatacgacgtcgaggtcgacatatggtccgcagggtgcatctttgccgagatgatagaaggtaaacctttgtttccaggtaaagaccacgtccaccaattctccatcattactgatctgttgggttctcctccaagtgatgtcattgacaccatctgttctgaaaacacattgaagttcgtcacttctttaccacatagagaccctattccattctctgaaagattcaagactgtcgagccggacgcagttgacctactggaaaaaatgctggtatttgatccaaagaagagaattaccgcagcagatgcattggctcatccatatctagcaccatatcacgatcctaccgacgaaccggtagcagaggcaaagtttgactggcatttcaatgatgcagatctaccagtagacacatggagagttatgatgtactcagaaatactggacttccataaaatcggaggcacagatggtcaaatcgatacatccgcaactttcgatgaccaagttgcagctgctacggtagctgctgctcaagcccaagcacatgcattggcacaagcccagatgtctcagaatatgattgacccaaaccaacttctaaatgaagatggtacaccagtgagtggaagcatagcagagaacagctcgaattctgcaacaactaacctaaacggtgctgctgcaggtatgaacagtgcaagtgatactatcaatgagtatgctaatcaagcagtgcattttgcaaatgaattccaacaataa

SEQ ID NO: 142237 - protein, 447 aa, Candida glabrata
MATNEEFIRTQIFGTVFEITNRYSDLNPVGMGAFGLVCSATDTLTNQQVAIKKIMKPFATAVLAKRTYRELKLLKHLRHENLICLQDIFLSPLEDIYFVTELQGTDLHRLLQTRPLEKQFVQYFHYQILRGLKYVHSAGVVHRDLKPSNILINENCDLKICDFGLARIQDPQMTGYVSTRYYRAPEIMLTWQKYDVEVDIWSAGCIFAEMIEGKPLFPGKDHVHQFSIITDLLGSPPSDVIDTICSENTLKFVTSLPHRDPIPFSERFKTVEPDAVDLLEKMLVFDPKKRITAADALAHPYLAPYHDPTDEPVAEAKFDWHFNDADLPVDTWRVMMYSEILDFHKIGGTDGQIDTSATFDDQVAAATVAAAQAQAHALAQAQMSQNMIDPNQLLNEDGTPVSGSIAENSSNSATTNLNGAAAGMNSASDTINEYANQAVHFANEFQQ

SEQ ID NO: 142238 - DNA, 1083 bp, Chaetomium globosum
  CDS (1)..(1083)
atggccgaattcgtgcgcgcccagatctttgggaccaccttcgagatcacctcgagatattccgacctccagcccgttggcatgggagcgttcggcttggtttgctctgcgaaggatcaacttaccagccagaatgtcgccatcaaaaaaattatgaagcccttcagcacccctgtgctcgccaagaggacgtatcgtgagttgaagctgctcaagcacctcaagcacgagaatgtcatctccctcagcgacatcttcatttctccgctcgaggatatctatttcgtcacagagctcctcggcaccgacctccacaggctactcacctcgaggcccctggagaagcagtttattcagtacttcctttaccagatcatgcgcggtctcaaatatgtccactctgccggcgtcgttcatagggacttgaagcccagcaacattttggtcaacgagaactgcgacctgaagatctgcgattttggcttggcccgtatccaggacccgcagatgaccggctacgtatcaacgagatactaccgtgcgcccgagatcatgctcacttggcaaaagtacgacgtcgaggtcgacatctggagcgccggctgcatctttgccgagatgctcgagggcaagccgctcttccccggcaaggaccacgtcaaccagttctctatcatcaccgagctcctcggcacgccaccagacgacgttatcaacaccattgctagtgagaataccctacgattcgtcaagtcactccccatgcgtgagaggcaacccctcaagaacaagttcaagaatgccgacccgacggccattgacctccttgagcgcatgctcgtcttcgatcctaagaagcggataacggcgaccgaggccctcgctcacgagtacctggcgccttaccatgaccccaccgacgagcccaccgccgagctaaagttcgattggagtttcaacgacgccgatctacccgtcgacacttggaagatcatgatgtactcagagattctcgactaccacaacgtcgaagccgccagcgtcggggagatggagaaccagcagcagtatctcgcacaatga

SEQ ID NO: 142239 - protein, 360 aa, Chaetomium globosum
MAEFVRAQIFGTTFEITSRYSDLQPVGMGAFGLVCSAKDQLTSQNVAIKKIMKPFSTPVLAKRTYRELKLLKHLKHENVISLSDIFISPLEDIYFVTELLGTDLHRLLTSRPLEKQFIQYFLYQIMRGLKYVHSAGVVHRDLKPSNILVNENCDLKICDFGLARIQDPQMTGYVSTRYYRAPEIMLTWQKYDVEVDIWSAGCIFAEMLEGKPLFPGKDHVNQFSIITELLGTPPDDVINTIASENTLRFVKSLPMRERQPLKNKFKNADPTAIDLLERMLVFDPKKRITATEALAHEYLAPYHDPTDEPTAELKFDWSFNDADLPVDTWKIMMYSEILDYHNVEAASVGEMENQQQYLAQ

SEQ ID NO: 142240 - DNA, 1095 bp, Coccidioides immitis
  CDS (1)..(1095)
atggcggaattcgtgcgggcccagatcttcggcacgactttcgaaatcacgacgagatacacggacttgcaaccggttggcatgggagcatttggtctcgtctgctcggctcgagatcaattgacaaatcaagccgttgccgtcaagaagattatgaagccatttagcactccagtgcttgcaaagaggacttatcgagagctcaagcttctaaagcacttgcgacatgaaaatgttatcagtctcagcgacatctttatctccccgctagaagacatatatttcgtcacagaactccttggaaccgatctacatcgtttattgacttcacggccattagaaaagcagttcattcagtatttcctataccaaattctgagaggcttgaaatatgtgcattcagcaggagtggttcaccgagatctcaagccaagtaatatcctaattaatgagaactgcgatttgaagatttgcgattttggtcttgcccgtgttcaagacccccaaatgaccggctatgtctctacaagatactatcgtgccccagagattatgctcacatggcagaaatatgatgttgaggttgatgtatggagtgcgggatgcatattcgcagagatgctttcaggtcgaccgttgttccccgggaaagaccatgtgaatcaattttcgattattacagaactattagggtcaccaccagatgatgtgattaaaaccatctgcagtgcaaacaccctgcaatttgtgcagtcactgccaaagcgagagcggcaaccactgagtgaaaaattcaaaggcgcagaacctctagccgttgatcttttagaaagaatgcttgtcttcgaccccaagaagcgtatcactgctgcagagggtcttgcccatgaataccttgcaccgtaccatgaccctacagatgaacctgtagcggagactcagtttgactggtccttcaacgatgcggagttgccgatcgattcgtggaaggtcatgatgtattccgaaatccttgattaccacaatgtcgatcaagactctcaaggaatccacggtactcctctgaacacagaggctcagagggtgccaatgtag

SEQ ID NO: 142241 - protein, 364 aa, Coccidioides immitis
MAEFVRAQIFGTTFEITTRYTDLQPVGMGAFGLVCSARDQLTNQAVAVKKIMKPFSTPVLAKRTYRELKLLKHLRHENVISLSDIFISPLEDIYFVTELLGTDLHRLLTSRPLEKQFIQYFLYQILRGLKYVHSAGVVHRDLKPSNILINENCDLKICDFGLARVQDPQMTGYVSTRYYRAPEIMLTWQKYDVEVDVWSAGCIFAEMLSGRPLFPGKDHVNQFSIITELLGSPPDDVIKTICSANTLQFVQSLPKRERQPLSEKFKGAEPLAVDLLERMLVFDPKKRITAAEGLAHEYLAPYHDPTDEPVAETQFDWSFNDAELPIDSWKVMMYSEILDYHNVDQDSQGIHGTPLNTEAQRVPM

SEQ ID NO: 142242 - DNA, 1065 bp, Cochliobolus miyabeanus; identical to SEQ ID NO: 140190
  CDS (1)..(1065)

SEQ ID NO: 142243 - protein, 354 aa, Cochliobolus miyabeanus; identical to SEQ ID NO: 140191

SEQ ID NO: 142244 - DNA, 1098 bp, Cryptococcus neoformans
  CDS (1)..(1098)
atggccgattttgtcaagctctccatctttggaaccgtttttgaggttaccacgcgttatgtcgacctccaacctgtcggtatgggcgctttcggtctcgtctgttccgccaaggatcagctctctggaacttctgtggctatcaagaagattatgaagccgttttcaaccccggttctttccaagaggacttaccgagagctcaagcttctcaaacacttgagacatgagaacattatctctcttagtgacattttcatctctcccctcgaagatatttactttgtcaccgagctgctcggtaccgaccttcatcgactccttacctctcgccctcttgagaagcaattcatccaatacttcctttaccaaatcctccgtggcctcaagtatgtccactctgccggtgtagtccatcgagacttgaagccttcaaacattctcgtcaacgagaactgtgacttaaaaatttgcgattttggccttgcgaggatccaagaccctcagatgactggttatgtttctacgaggtactatcgagcacccgagatcatgttgacatggcaaaagtatgatgtcgcggtcgacatttggagtaccggctgtatctttgcggagatgctggagggcaagccattattccccggaaaggaccacgtgaaccaattctcaatcatcaccgaattgctcggtaccccgccggacgatgtcattcaaactatcgcctctgaaaacactctccgcttcgtccagagtctgcccaagcgcgaaaaggtcccattttccaccaagttccccaatgccgaccctgtttctcttgatttgttagagaagatgctcgtgtttgaccctcgtacccgtatatccgccgcggaaggtcttgcgcacgagtaccttgcaccttaccatgatcctaccgatgagcctgttgccgcagaggtgtttgattggagttttaacgatgccgatttgccggtggatacttggaaggtgatgatgtacagcgaaattcttgacttccacaacctcggggacatttcccagaacgaagcagagggacccgttacaggcgaagtccccgctgctcctgccagctaa

SEQ ID NO: 142245 - protein, 365 aa, Cryptococcus neoformans
MADFVKLSIFGTVFEVTTRYVDLQPVGMGAFGLVCSAKDQLSGTSVAIKKIMKPFSTPVLSKRTYRELKLLKHLRHENIISLSDIFISPLEDIYFVTELLGTDLHRLLTSRPLEKQFIQYFLYQILRGLKYVHSAGVVHRDLKPSNILVNENCDLKICDFGLARIQDPQMTGYVSTRYYRAPEIMLTWQKYDVAVDIWSTGCIFAEMLEGKPLFPGKDHVNQFSIITELLGTPPDDVIQTIASENTLRFVQSLPKREKVPFSTKFPNADPVSLDLLEKMLVFDPRTRISAAEGLAHEYLAPYHDPTDEPVAAEVFDWSFNDADLPVDTWKVMMYSEILDFHNLGDISQNEAEGPVTGEVPAAPAS

SEQ ID NO: 142246 - DNA, 1164 bp, Debaryomyces hansenii; identical to SEQ ID NO: 140282
  CDS (1)..(1164)

SEQ ID NO: 142247 - protein, 387 aa, Debaryomyces hansenii; identical to SEQ ID NO: 140283

SEQ ID NO: 142248 - DNA, 1140 bp, Emericella nidulans
  CDS (1)..(1140)
atggcggaatttgtacgtgcccagattttcggcacgaccttcgagatcaccagcagatatacagacttgcaacccgtaggaatgggtgcttttggactggtctgctccgcgagggatcaattgaccgcacagccggttgctgttaagaaaattatgaagcctttcagcacgccggttctttccaagaggacttatcgcgaactgaagcttctgaagcacctgcgacacgaaaacatcatcagcttgagcgatatcttcatttctcctcttgaggacatctatttcgtcacggagcttctgggtaccgatttgcatagactcatctcctccaggccgttggagaagcagtttatacaatacttcttatatcagattatgcgaggacttaaatatgtccactcggcaggggtcgtgcatcgcgatctcaaacccagcaatatcctcatcaacgaaaattgtgatcttaagatctgcgatttcggactcgcgcgcattcaagatcctcagatgacaggatatgtttcgaccaggtactaccgtgcgccagaaatcatgctcacatggcagaaatatgatgcaaaggtggatgtttggagcgcagcgtgcattttcgctgagatgttgctgggagcgccattgttccccgggaaagaccatgtcaaccagttttccatcatcacagagcttctcggaactcctccagatgatgtaattcagaccatttgcagtgaaaacactctgcggttcgtcaagtcgctaccaaagcgggagcctcaagatttggcgaaattgccgaagttcctggcgctcgtgcatcccgacaagaaacccgaagaggatgaagattataaaaacactatcaaccttcttaaagcaatgctcgtttacaacccgaaggaccgaatcagcgctgaagcggcgctcgcggccccatacctagcgccataccacgatgagacagatgagccggtagcggaggagaaattcgattggtctttcaatgacgccgacttgcccgtggacacgtggaaaatcatgatgtattcggagattctggacttccacaacatcgatcagggcggcgacatcaaccccgcccttgtcgagggagccgggctcaaccagcaaggtttccaataa

SEQ ID NO: 142249 - protein, 379 aa, Emericella nidulans
MAEFVRAQIFGTTFEITSRYTDLQPVGMGAFGLVCSARDQLTAQPVAVKKIMKPFSTPVLSKRTYRELKLLKHLRHENIISLSDIFISPLEDIYFVTELLGTDLHRLISSRPLEKQFIQYFLYQIMRGLKYVHSAGVVHRDLKPSNILINENCDLKICDFGLARIQDPQMTGYVSTRYYRAPEIMLTWQKYDAKVDVWSAACIFAEMLLGAPLFPGKDHVNQFSIITELLGTPPDDVIQTICSENTLRFVKSLPKREPQDLAKLPKFLALVHPDKKPEEDEDYKNTINLLKAMLVYNPKDRISAEAALAAPYLAPYHDETDEPVAEEKFDWSFNDADLPVDTWKIMMYSEILDFHNIDQGGDINPALVEGAGLNQQGFQ

SEQ ID NO: 142250 - DNA, 1101 bp, Eurotium herbariorum
  CDS (1)..(1101)
atggcggaattcgtgcgtgccacgattttcggcaccaccttcgaaatcaccagccggtacacggagctgcaaccggtgggaatgggtgcctttggtcttgtctgtgccgcaagagatcaattgaccggagcgcccgtcgccgtcaagaagattatgaagcctttcagcacacccgtcctgtccaagagaacatatcgcgaactgaagctcttgaaacatttgggccatgagaacattatctgcctgagcgacattttcatttccccgctcgaggacatttattccgtcaccgaactcctgggcaccgaccttcatagactcttaacttctcgaccattagagaagcaattcatccaatatttcctttaccagattttgcggggtctaaaatatgtccactcagccggtgtcgtgcatcgtgatctcaaaccgagcaatatcctgatcaacgaaaactgtgacctgaagatttgcggttttggtttggcccgggttcaagacccgcagatgactggttacgtgtcgacgagatattatcgcgccccggagattatgcttacatggcaaaagtatgatgtggaggtcgacatctggagtgcagggtgtatctttgctgagatgctcgacgggaagccgctgttccctggcaaggaccatgtcaaccaattctccattatcaccgaattactgggtacgccgccagacgacgtgatcgagaccatttgcagtgaaaacacattgcgattcgtcaagtcgcttcctaagcgggaacggcaaccattgactagcaggttcaagaatgcggaccctgaggcggtggaccttctggaacgaatgctggtctttgaccccaagaagcgaatccgcgccggtgaggctctggcgcacgaataccttgctccataccacgatcccaccgacgagcccgaggcgcaagagaaatttgactggtcgttcaacgatgcggatctgccggtcgacacatggaggattatgatgtactcggagatcctcgacttccacaacatcgaccaaagcgaggatgccgggcaagtccttgtcgaaggcgtcggggatggccagcaggcattcgcggcctaa

SEQ ID NO: 142251 - protein, 366 aa, Eurotium herbariorum
MAEFVRATIFGTTFEITSRYTELQPVGMGAFGLVCAARDQLTGAPVAVKKIMKPFSTPVLSKRTYRELKLLKHLGHENIICLSDIFISPLEDIYSVTELLGTDLHRLLTSRPLEKQFIQYFLYQILRGLKYVHSAGVVHRDLKPSNILINENCDLKICGFGLARVQDPQMTGYVSTRYYRAPEIMLTWQKYDVEVDIWSAGCIFAEMLDGKPLFPGKDHVNQFSIITELLGTPPDDVIETICSENTLRFVKSLPKRERQPLTSRFKNADPEAVDLLERMLVFDPKKRIRAGEALAHEYLAPYHDPTDEPEAQEKFDWSFNDADLPVDTWRIMMYSEILDFHNIDQSEDAGQVLVEGVGDGQQAFAA

SEQ ID NO: 142252 - DNA, 1074 bp, Glomerella lagenarium
  CDS (1)..(1074)
atggccgaattcatcagagcacagattttcggtaccacctttgagatcacctcgaggtattcagacttgcagcccgttggcatgggcgcgttcggtttggtttgctccgcccgcgaccagctcaccaaccagaatgtcgctgtcaagaagatcatgaagcccttcagcactcccgtactggcgaagcgcacgtaccgagagttgaagctcttgaagcacctgaggcacgagaacgtcatctctctcagcgacatctttatctcccctctggaggatatctacttcgtaacagaactgcttggcaccgacttgcacaggctgctcacttcgcggcctctcgagaagcagttcattcaatacttcctttaccagatcatgcgtggtctcaaatatgtccactcggccggcgtggttcaccgtgatctgaagcctagcaacatcctcgtgaacgagaactgtgacttgaaaatttgcgactttggcctcgctcgtattcaggatcctcagatgaccggttatgtttctacaagatactaccgtgctcccgaaatcatgctcacgtggcaaaaatacgacgtcgaagttgacatctggagcgcgggctgcatctttgccgagatgctcgagggcaagcctctcttccccggcaaggaccacgtgaaccagttctccatcattaccgagctcctcggcacaccgcccgacgatgtgatcaacactatcgctagtgaaaatactcttcgcttcgtcaagtcgctgcccaagcgggagaggcaaccattgaagaacaagttcaagaacgctgacccctccgctatcgacctgctcgagaggatgcttgtctttgaccccaagaagcgaataaccgctaccgaggcactgtcccacgactaccttgccccgtaccatgaccctacggacgagcctgttgcggaggagaagttcgactggagcttcaacgacgccgaccttcccgtggacacgtggaagatcatgatgtactcggagattctcgattaccacaatgtcgacgcgtcagcgcagcaaatcgaggagcagttcaacggacaatag

SEQ ID NO: 142253 - protein, 357 aa, Glomerella lagenarium
MAEFIRAQIFGTTFEITSRYSDLQPVGMGAFGLVCSARDQLTNQNVAVKKIMKPFSTPVLAKRTYRELKLLKHLRHENVISLSDIFISPLEDIYFVTELLGTDLHRLLTSRPLEKQFIQYFLYQIMRGLKYVHSAGVVHRDLKPSNILVNENCDLKICDFGLARIQDPQMTGYVSTRYYRAPEIMLTWQKYDVEVDIWSAGCIFAEMLEGKPLFPGKDHVNQFSIITELLGTPPDDVINTIASENTLRFVKSLPKRERQPLKNKFKNADPSAIDLLERMLVFDPKKRITATEALSHDYLAPYHDPTDEPVAEEKFDWSFNDADLPVDTWKIMMYSEILDYHNVDASAQQIEEQFNGQ

SEQ ID NO: 142254 - DNA, 1080 bp, Hortaea werneckii; identical to SEQ ID NO: 140252
  CDS (1)..(1080)

SEQ ID NO: 142255 - protein, 359 aa, Hortaea werneckii; identical to SEQ ID NO: 140253

SEQ ID NO: 142256 - DNA, 1335 bp, Kluyveromyces lactis
  CDS (1)..(1335)
atgtcgaatgaggaatttattaggactcaaatttttggtacagttttcgaaattaccaatcggtatactaatttgaacccggttggtatgggtgccttcgggttggtttgttctgctacagatacgctaacaagccagcctgtagcgattaagaagattatgaaaccgttttctacttccgtactggcaaaaagaacgtatagggaactcaaattgttaaagcatctaaggcatgagaatttgatttgtctcgaagatatcttcttgtcaccattagaagatatttatttcgtcactgaattgcaagggacggatctacatagattgttgcagacaaggcctttggaaaaacaattcgttcaatatttcttataccagatcttgagggggcttaaatacgttcattccgcaggtgtgatccatagagatttgaaaccttccaatatcttgatcaatgagaactgtgatttaaagatctgcgatttcggacttgctaggattcaagatcctcaaatgactggttacgtgtcaacccgttactatagagccccagaaatcatgttgacctggcaaaaatataatgttgaagtagacatctggtctgctggttgtatctttgccgaaatgatcgagggtaagcctttgttcccaggtaaagatcacgtgcatcaattttctatcatcactgatctattaggatcgcctccaaaagatgtcatagacactatttgctcagagaacactctcaaatttgttacttcattacctcatagagatcctgtaccattcagttcgaggttccagaacttggaaccagatgctatagatcttctagaaaaaatgcttgtgttcgatccaaagaagagaattacagcagctgatgccttggcccatccttacctttccccatatcatgacccaaccgacgaacctatcgcagaagctaagtttgattggaatttcaacgatgctgacttacctgttgacacctggcgtgtaatgatgtattccgagatcttggatttccatcaaatcggtgacccacaaatcaatacaaatgctactttcgacgaccaagtagccgctgccactgtcgccgccgcggaggctgcctctaagcaacagcagcagcaacaacaccaaactgaagagcaaactcaacagacaatcgcctctactcctccccaggctcaagtgaccccacaacaacttgaaagtggcgctaactctaattccaattctaacccttctttctctattggccctgatccagcaaacgaaacattgacgaattttgctaatcaagcagaccaatacgtctccaaattcaaataa

SEQ ID NO: 142257 - protein, 444 aa, Kluyveromyces lactis
MSNEEFIRTQIFGTVFEITNRYTNLNPVGMGAFGLVCSATDTLTSQPVAIKKIMKPFSTSVLAKRTYRELKLLKHLRHENLICLEDIFLSPLEDIYFVTELQGTDLHRLLQTRPLEKQFVQYFLYQILRGLKYVHSAGVIHRDLKPSNILINENCDLKICDFGLARIQDPQMTGYVSTRYYRAPEIMLTWQKYNVEVDIWSAGCIFAEMIEGKPLFPGKDHVHQFSIITDLLGSPPKDVIDTICSENTLKFVTSLPHRDPVPFSSRFQNLEPDAIDLLEKMLVFDPKKRITAADALAHPYLSPYHDPTDEPIAEAKFDWNFNDADLPVDTWRVMMYSEILDFHQIGDPQINTNATFDDQVAAATVAAAEAASKQQQQQQHQTEEQTQQTIASTPPQAQVTPQQLESGANSNSNSNPSFSIGPDPANETLTNFANQADQYVSKFK

SEQ ID NO: 142258 - DNA, 1074 bp, Magnaporthe grisea
  CDS (1)..(1074)
atggcggaattcgtgcgggcccagatcttcggcaccacgttcgagataacttcgagatactcggacttacaacctgttggcatgggcgcatttggactggtgtgctctgcgagggatcaacttacaaaccagaatgtcgccatcaagaagattatgaagcccttcagcacacctgtgttggcaaagaggacatacagagagctcaagctgctgaagcacctgaagcacgaaaatgtcatctcgctcagtgacatcttcatctcgccgctggaggacatctactttgtgacagaactcctgggcaccgacctgcacaggctcctgacatccaggcctttggagaagcagttcatccagtacttcctttaccaaatcatgcgtggcctgaaatacgtccactcagctggtgtggtacacagggatctgaagcctagcaatatcctggtcaacgagaactgcgacttgaagatctgcgactttggtcttgctcgcattcaggacccccagatgaccggatatgtttccactaggtactaccgcgcgccggagattatgcttacttggcaaaaatacgacgtcgaggtagatatctggagcgcgggatgcattttcgccgagatgcttgagggcaagccactcttccctggcaaggatcacgtaaaccaattttccatcatcacggagttgttgggaaccccgcccgacgatgtgatcaacacaatcgccagcgaaaatactctgcgattcgtcaagtcactccccaagcgggagcgacagcctctcaagaacaaattcaagaacgctgacccatcagcaatcgatctgttggagaggatgctcgtattcgatcccaagaagcgtatcacagcgacagaggcattggcccacgaatacctgaccccgtaccacgaccccaccgacgagcccatagcggaggagaagttcgactggagcttcaatgacgcagacctacctgtggacacatggaaaattatgatgtactcggagattctggactaccataatgcggaagctggtatgcaacagatggacgaccagtttaccggccaataa

SEQ ID NO: 142259 - protein, 357 aa, Magnaporthe grisea
MAEFVRAQIFGTTFEITSRYSDLQPVGMGAFGLVCSARDQLTNQNVAIKKIMKPFSTPVLAKRTYRELKLLKHLKHENVISLSDIFISPLEDIYFVTELLGTDLHRLLTSRPLEKQFIQYFLYQIMRGLKYVHSAGVVHRDLKPSNILVNENCDLKICDFGLARIQDPQMTGYVSTRYYRAPEIMLTWQKYDVEVDIWSAGCIFAEMLEGKPLFPGKDHVNQFSIITELLGTPPDDVINTIASENTLRFVKSLPKRERQPLKNKFKNADPSAIDLLERMLVFDPKKRITATEALAHEYLTPYHDPTDEPIAEEKFDWSFNDADLPVDTWKIMMYSEILDYHNAEAGMQQMDDQFTGQ

SEQ ID NO: 142260 - DNA, 1074 bp, Mycosphaerella graminicola
  CDS (1)..(1074)
atggccgaattcgtgcgtgcgcagatcttcggcacgacctttgagatcacgagccgatacaccgatcttcaacccgtcggcatgggcgccttcgggctggtatgctcggcaaaagatcagctcaccggccaggccgttgccgtgaagaagatcatgaagcccttcagcacaccggttctctccaagcgaacctaccgtgagctgaagcttctcaagcatctcaagcacgagaacgtgatcagcctcagcgacatcttcatttcgcctctggaagacatctattttgtgaccgaattgctcggcaccgatctccaccgcctcctcacgtcgagaccgctcgagaagcagtttatccagtactttctgtaccaaatcctccgcggcctgaaatacgtccactccgccggtgtcgttcaccgtgacctcaagccctccaacatcctggtgaacgagaactgcgacttgaagatttgtgactttggtctggcccgtattcaggatccacaaatgacgggatatgtctcgacgagatactaccgagctcctgagatcatgctcacgtggcaaaagtacgatgtagaagtggatatctggagtgcgggatgcatctttgcggaaatgctcgagggcaagcccctgtttccaggaaaggatcacgtcaaccagttctcgatcatcacggatttgttggggacaccaccagatgatgttatcagcaccatctgcagcgagaataccctcagattcgtgcagtcgcttcccaagcgtgaacgccagccgctcaagaacaagttcaagaacgccgacccacaagcgatcgagctcctcgagcgtatgcttgtcttcgacccacggaaacgcgtcaaggctggcgaggctctggccgacccatacctctcaccataccacgaccctactgacgagccagaggcggaagagaagtttgattggtcgttcaacgacgcagatctgcccgtggacacctggaagatcatgatgtactccgaaatcctcgactaccataacgtggactctgcgaacaacggagagggccaggagaacggcggcgcataa

SEQ ID NO: 142261 - protein, 357 aa, Mycosphaerella graminicola
MAEFVRAQIFGTTFEITSRYTDLQPVGMGAFGLVCSAKDQLTGQAVAVKKIMKPFSTPVLSKRTYRELKLLKHLKHENVISLSDIFISPLEDIYFVTELLGTDLHRLLTSRPLEKQFIQYFLYQILRGLKYVHSAGVVHRDLKPSNILVNENCDLKICDFGLARIQDPQMTGYVSTRYYRAPEIMLTWQKYDVEVDIWSAGCIFAEMLEGKPLFPGKDHVNQFSIITDLLGTPPDDVISTICSENTLRFVQSLPKRERQPLKNKFKNADPQAIELLERMLVFDPRKRVKAGEALADPYLSPYHDPTDEPEAEEKFDWSFNDADLPVDTWKIMMYSEILDYHNVDSANNGEGQENGGA

SEQ ID NO: 142262 - DNA, 1077 bp, Neurospora crassa
  CDS (1)..(1077)
atggccgaatttatccgcgcccagatcttcggaactacctttgagatcacctcgaggtattccgatctccagcctgttggcatgggagcctttggtcttgtctgctccgcgaaagaccagctcaccaaccagaatgtcgccatcaagaagattatgaagcccttcagcacaccggtccttgccaaacgcacgtaccgtgagctgaagcttctcaagcacttgaggcacgaaaacgtcatctctctgagcgatatcttcatctctcctctcgaggatatctactttgttaccgagcttctcggaaccgatcttcacagacttcttacgtccaggcctcttgagaagcagtttatccagtacttcctgtaccagattatgcgcggtctcaaatacgttcactccgccggtgttgtccaccgtgacctgaagccaagtaacatcctggtcaacgagaattgcgacttgaagatttgcgatttcggccttgcgcgtatccaggatcctcagatgacgggctacgtttctactcgttactaccgcgcccccgagatcatgctcacttggcaaaagtacgacgtcgaggtcgatatctggagtgccggctgcattttcgccgagatgctggagggcaagcccctcttccctggcaaggaccatgtcaaccagttctccatcatcaccgagcttctcggcactcccccagacgatgtcatcaacacgattgctagcgagaacaccctgagattcgtcaagtcccttcccaagcgcgagcgtcagcccctgaagaataagttcaagaacgccgattcatcagccgtcgatctgctcgagcgcatgcttgtctttgaccctaagaagcggataactgccaccgaggccctttcacacgagtaccttgctccttaccacgaccccaccgacgagccggttgccgaggagaagttcgattggagtttcaatgatgctgatctcccggtcgacacatggaagatcatgatgtactccgagatcctggactatcacaacgtcgaagcctcggggcaaatgatgttccaggaagatgttccgccgcaataa

SEQ ID NO: 142263 - protein, 358 aa, Neurospora crassa; identical to SEQ ID NO: 140255

SEQ ID NO: 142264 - DNA, 1158 bp, Pichia stipitis
  CDS (1)..(1158): transl_table=12
atgtcatcggacggagaattcacaagaacccaaatctttggcacggtctttgaaataaccaacagatacaccgacttgaaccccgtgggcatgggagcatttggtttggtgtgttctgcagtggacaagttgacgggccagaacgtcgccgtcaagaagatcatgaagccgtttctgacatcggtgttggccaagagaacttatagagagttgaagttgttgaaacacttgaagcacgagaacttgatcacgttggacgacatcttcttatcgccgcttgaagacatctacttcgtcaacgagttacaaggaacagacttacaccggttgttgacgtcgagaccgttggaaaagcagttcattcaatactttacctaccagatcttgcgggggttgaagtatatccattcggccggtgtgattcatcgtgatttgaagccttcgaacatcttgatcaatgaaaactgtgacttgaagatctgtgactttggcttggccagaatccaggatcctcagatgaccggatatgtgtctacaagatattaccgtgcaccggaaatcatgttgacgtggcagaagtacgacaccgaagtcgatttatggtctgtgggctgtattttggcagagatgatcgaaggaaagccattgtttccgggcaaagaccacgtccaccagttctctatcatcacggaattattgggatcgcctccaccagacgtcattgataccatttgttctgaaaacaccctcagattcgtacaatcgttgccccacagagatcctattccgttcaatgaaagattcgcacaatgtacccatgtagagccagaagctattgacttgttagccaagatgcttatttttgaccccaagaagagaattagtgctgcttccgctttaactcatccatacatggaaccttaccatgatcctaccgatgagcctatttgtgaaaccaagtttgactggagtttcaacgatgctgacttgcctgtagacacatggagagtgatgatgtacagcgagattctagattttcaccagataggtggtgtaggagaagaagctggtcagagtgtaactcaagaagaaatagcccatattcagcaggacggcattcaggccccacaacaaccccaggaacagcaagtagaatag

SEQ ID NO: 142265 - protein, 385 aa, Pichia stipitis
MSSDGEFTRTQIFGTVFEITNRYTDLNPVGMGAFGLVCSAVDKLTGQNVAVKKIMKPFSTSVLAKRTYRELKLLKHLKHENLITLDDIFLSPLEDIYFVNELQGTDLHRLLTSRPLEKQFIQYFTYQILRGLKYIHSAGVIHRDLKPSNILINENCDLKICDFGLARIQDPQMTGYVSTRYYRAPEIMLTWQKYDTEVDLWSVGCILAEMIEGKPLFPGKDHVHQFSIITELLGSPPPDVIDTICSENTLRFVQSLPHRDPIPFNERFAQCTHVEPEAIDLLAKMLIFDPKKRISAASALTHPYMEPYHDPTDEPICETKFDWSFNDADLPVDTWRVMMYSEILDFHQIGGVGEEAGQSVTQEEIAHIQQDGIQAPQQPQEQQVE

SEQ ID NO: 142266 - DNA, 1050 bp, Schizosaccharomyces pombe; identical to SEQ ID NO: 140306
  CDS (1)..(1050)

SEQ ID NO: 142267 - protein, 349 aa, Schizosaccharomyces pombe; identical to SEQ ID NO: 140307

SEQ ID NO: 142268 - DNA, 1284 bp, Torulaspora delbrueckii
  CDS (1)..(1284)
atggcaactcatgaagagtttattaggactcaagtgttcggtacggtcttcgagatcacaaaccgttacacagatctcaatcctgtaggtatgggggcgttcgggctcgtttgctccgctactgatactttggctcaacaacccgttgcgattaaaaaaattatgaaacctttctcgactgctgtcttggccaagaggacgtaccgtgaattgaaattgctgaaacatttgagacatgaaaatctaatttgtctacaggatatcttcttatctccgctggaagatatctatttcgttactgagttgcaagggactgatttacaccgtcttttgcagactcgtcccctggaaaaacagtttgttcagtattttctttaccagatcctaagaggtctgaaatatgtgcattcagccggtgtgattcatagggatttgaaacctagtaacattttgataaacgagaattgtgatttgaagatttgcgattttggattggcaaggattcaggatccgcagatgacgggttatgtttctactcgttactatagggctccggagattatgttgacatggcaaaaatacgacgtggaagttgatatttggtctgctggttgtatctttgcggagatgacagaggggaagcctttgttccctggtaaggatcatgttcatcagttttctatcattacggatctgttgggttcgccaccggaagatgttatcaatacgatatgttctgaaaatacgctgaaatttgtgacttctttgccccatcgtgatcccgtgccttttagagagagattcaagaccgtagagcccgaagccgttgatctgttggagaaaatgctggtgttcgatccaaagaagagaatcaccgccgctgatgcactggtgcatccgtatttggcgccatatcacgatcctactgacgaaccggtagcagatgcgaaattcgattggaatttcaatgacgctgacctaccggttgatacttggcgtgtgatgatgtactctgagattttggatttccacaagatcggtgggggcgatggtcaaatcgatacttcggctacttttgacgaccaggtggcagctgcaactgcagctgctgcacatgctgctgctgtggctcaggctcaggctcaggctcattcaaactcttcaaattcaaattcatcgtcaaatgtaaattcaaaatcaaaggcggctagggattccgctaatgatgcaatcactaattatggtaaccaagcggttcactatgcaaatgagttccaacagtaa

SEQ ID NO: 142269 - protein, 427 aa, Torulaspora delbrueckii
MATHEEFIRTQVFGTVFEITNRYTDLNPVGMGAFGLVCSATDTLAQQPVAIKKIMKPFSTAVLAKRTYRELKLLKHLRHENLICLQDIFLSPLEDIYFVTELQGTDLHRLLQTRPLEKQFVQYFLYQILRGLKYVHSAGVIHRDLKPSNILINENCDLKICDFGLARIQDPQMTGYVSTRYYRAPEIMLTWQKYDVEVDIWSAGCIFAEMTEGKPLFPGKDHVHQFSIITDLLGSPPEDVINTICSENTLKFVTSLPHRDPVPFRERFKTVEPEAVDLLEKMLVFDPKKRITAADALVHPYLAPYHDPTDEPVADAKFDWNFNDADLPVDTWRVMMYSEILDFHKIGGGDGQIDTSATFDDQVAAATAAAAHAAAVAQAQAQAHSNSSNSNSSSNVNSKSKAARDSANDAITNYGNQAVHYANEFQQ

SEQ ID NO: 142270 - DNA, 1071 bp, Trichoderma harzianum
  CDS (1)..(1071)
atggccgagtttgtgcgtgcgcagatctttggcaccacgttcgagatcacctcaaggtactcggacctccagcccgtgggcatgggagcgtttggtcttgtctgctctgcgcgagaccagctcaccaaccagaatgtcgccgtcaagaagatcatgaagccctttagcacgcccgtgctcgctaagcggacgtaccgtgagctgaagctgctcaagcatctccgacacgaaaatgtcatctctcttagcgatatcttcatctctcccctcgaggacatctatttcgtcacagagcttcttggcaccgatctgcaccggttactaacctcccgaccgctcgagaaacaattcatccagtacttcctctaccagatcatgcgcggcctgaaatatgtccactcggccggtgtcgtccatcgtgatctcaagcccagcaacatcctcgtcaacgaaaactgcgatttgaagatttgcgactttggtctggctcgaatccaggacccgcagatgacgggttatgtgtcaacacgatactaccgcgccccggaaatcatgctcacatggcaaaagtacgacgtcgaggtcgatatctggagtgctgggtgcatctttgccgagatgctcgagggcaagcccctgttcccgggcaaggaccacgtgaatcagttttccatcatcaccgagctgcttggtactcctccggacgatgtcatcaacactattgctagcgagaatacgttgcgtttcgtcaagtcactacctaagcgagaacgacagccacttcgaaacaagtttaagaatgcagacgattcagccattgatcttttggagcgaatgcttgttttcgaccccaagaagcgagtaacagccactcaggctctggcccacgagtacctccagccatatcacgaccccaccgatgagcctgttgccgatgagaagtttgactggagttttaatgatgccgacctccccgttgatacctggaagattatgatgtactcggaaattcttgactaccacaacgtcgagggcgcacccaacatggaggagcaattccccccacaatag

SEQ ID NO: 142271 - protein, 356 aa, Trichoderma harzianum
MAEFVRAQIFGTTFEITSRYSDLQPVGMGAFGLVCSARDQLTNQNVAVKKIMKPFSTPVLAKRTYRELKLLKHLRHENVISLSDIFISPLEDIYFVTELLGTDLHRLLTSRPLEKQFIQYFLYQIMRGLKYVHSAGVVHRDLKPSNILVNENCDLKICDFGLARIQDPQMTGYVSTRYYRAPEIMLTWQKYDVEVDIWSAGCIFAEMLEGKPLFPGKDHVNQFSIITELLGTPPDDVINTIASENTLRFVKSLPKRERQPLRNKFKNADDSAIDLLERMLVFDPKKRVTATQALAHEYLQPYHDPTDEPVADEKFDWSFNDADLPVDTWKIMMYSEILDYHNVEGAPNMEEQFPPQ

SEQ ID NO: 142272 - DNA, 1077 bp, Ustilago maydis
  CDS (1)..(1077)
atggccgactttgtcaagctctccatttttggtaccgtctttgaggtcaccacccgatatgtcgacttgcagcccgtcggcatgggcgctttcggtctggtctgctccgcaaacgaccagctcacaagcacctcggttgccatcaagaagatcatgaaacctttttccactcccgttctctccaagcgtacctaccgagagctcaagctgctcaaacacattcgtcacgaaaacattatcagcctcagcgacattttcatctcgcctcttgaggatatttactttgtcaccgagctcctcggcactgatctccaccgactgctcaccagccgtccactcgagaagcaattcattcagtacttcttgtaccagatcctccgaggtctcaagtacgttcactcggccggtgtcgtccaccgtgacttgaagccaagcaacattctcgtcaacgagaactgcgatctgaagatctgcgactttggtcttgcccgtatccaggacccccagatgaccggttacgtcagcacaagatattaccgtgcccccgaaatcatgctcacctggcaaaagtacgatgtggctgtcgatgtttggagtgcaggttgcatttttgcagagatgcttgaaggcaagccgctcttcccaggaaaggaccacgtcaaccaattctccattatcaccgagctgctcggcaccccaccagacgaagtcatcaagaccatctgttcggaaaatacgcttcgattcgtccagtcgctgcccaagcgagagcgtgttcctttctcacaaaagttcaagaacgccgacccgatggcgttggatctcctcgaaaaaatgctcgtctttgaccccaggacacggatcagcgccgccgaagcgctcgcacatccctacctcgctccttaccacgaccctaccgacgaaccagaggctgaggaggcttttgactggtccttcaacgatgccgacctacctgtcgacacatggaaggtcatgatgtactctgaaatcctcgacttccacaacattgacaattcgggtcaagacgagggtcccgtgccgcccgtcaacaattaa

SEQ ID NO: 142273 - protein, 358 aa, Ustilago maydis
MADFVKLSIFGTVFEVTTRYVDLQPVGMGAFGLVCSANDQLTSTSVAIKKIMKPFSTPVLSKRTYRELKLLKHIRHENIISLSDIFISPLEDIYFVTELLGTDLHRLLTSRPLEKQFIQYFLYQILRGLKYVHSAGVVHRDLKPSNILVNENCDLKICDFGLARIQDPQMTGYVSTRYYRAPEIMLTWQKYDVAVDVWSAGCIFAEMLEGKPLFPGKDHVNQFSIITELLGTPPDEVIKTICSENTLRFVQSLPKRERVPFSQKFKNADPMALDLLEKMLVFDPRTRISAAEALAHPYLAPYHDPTDEPEAEEAFDWSFNDADLPVDTWKVMMYSEILDFHNIDNSGQDEGPVPPVNN

SEQ ID NO: 142274 - DNA, 1161 bp, Yarrowia lipolytica
  CDS (1)..(1161)
atggcggactttatccggacccagatcttcggcacgtgtttcgaaatcacgtcgcgatacgtggatctcaaccccgtggggatgggagcctttggtctcgtgtgttcggccaaggaccagctcacggaccagaacgtggccatcaagaaaatcatgaagccgttcggcactcccgtgctgtcgaaacggacgtaccgagagctcaagctgctcaagcacctgcgccacgaaaacctcatttgcctgagcgacattttcatctcgccgctggaagacatttactttgtcaccgagctgctgggcacagacctgcaccgtctgctcatgacccggcctctggagaagcagttcattcagtactttctttaccagattctgcgaggcctgaagtacgtgcactctgccggtgtggtccatcgagacctcaagccgtccaacatcctcgtcaacgagaactgcgacctgaaaatctgcgactttggccttgcccgaatccaggacacccagatgaccggctacgtgtcgacccggtactaccgagcgcctgaaatcatgctcacgtggcagaagtacgatgtggaggtggatatttggtccacgggctgcatcttcgccgagatgctggagggcaagcccctgttccccggcaaggaccacgtgcaccagttctccatcatcaccgagctgctgggctcgcccccagaagatgtgattcacaccatctgctcggaaaacactttgaggttcgtcagaactctgccccggcgagaacgaatccctctggcgtccaagttccgaaacgccgaccccgaggccatcgatctcatggagaaaatgctggttttcgaccccaaaaagcgaataaccgcggccgaggctctggcccacccttacttggcaccataccacgaccccagcgacgagcctgtagccgaggaacggttcgactggtcgttcaatgacgcagacttgccggtggacacatggaaggtgatgatgtactcggagattctcgacttccacaatgtggacattgacgtcaacggccagcctccacagggccagtttgagcaggtccatgcccaggcacaagcggccgtcgcacagaacgaggctgccagggctagggaacaggagcagcagcagcaggagcagcagtaa

SEQ ID NO: 142275 - protein, 386 aa, Yarrowia lipolytica
MADFIRTQIFGTCFEITSRYVDLNPVGMGAFGLVCSAKDQLTDQNVAIKKIMKPFGTPVLSKRTYRELKLLKHLRHENLICLSDIFISPLEDIYFVTELLGTDLHRLLMTRPLEKQFIQYFLYQILRGLKYVHSAGVVHRDLKPSNILVNENCDLKICDFGLARIQDTQMTGYVSTRYYRAPEIMLTWQKYDVEVDIWSTGCIFAEMLEGKPLFPGKDHVHQFSIITELLGSPPEDVIHTICSENTLRFVRTLPRRERIPLASKFRNADPEAIDLMEKMLVFDPKKRITAAEALAHPYLAPYHDPSDEPVAEERFDWSFNDADLPVDTWKVMMYSEILDFHNVDIDVNGQPPQGQFEQVHAQAQAAVAQNEAARAREQEQQQQEQQ

SEQ ID NO: 142276 - DNA, 1308 bp, Saccharomyces cerevisiae
  CDS (1)..(1308)
atgaccactaacgaggaattcattaggacacagatattcggtacagttttcgagatcacaaatagatacaatgatttaaaccccgttgggatgggggcatttgggttggtttgctcagccacggacactttgacatctcagccagttgccattaagaaaatcatgaaacctttttccactgcagtgctggccaaaaggacatatcgtgaactaaaactactaaaacatctaagacacgagaacttgatttgccttcaggacatatttctttctccattggaagatatatattttgtcacggaattacaaggaacagatttacatagactcttgcaaacaagacccttggaaaagcaatttgttcagtatttcctataccaaattctaaggggtttaaaatacgttcactccgcgggcgtcattcatagagatttgaaaccgagcaacattctgattaatgaaaactgtgatttgaagatttgcgatttcggtctagcaagaattcaagaccctcaaatgacaggctatgtttccactagatactacagggcacctgaaatcatgctaacgtggcaaaaatatgacgtcgaggtcgacatttggtccgctggttgtatttttgccgaaatgattgaaggtaagcctttgttccctgggaaagatcatgttcaccaattttcgatcatcactgacttgttgggatctccgccaaaggatgtgataaatactatttgttccgaaaatactctaaaatttgttacttcgttaccacacagagatccaattccattttctgaaagatttaaaacagtcgaacctgatgccgtagaccttttggaaaaaatgctggtttttgatcctaagaagagaatcactgcggcggatgccttggctcatccttattcggctccttaccacgatccaacggatgaaccagtagccgatgccaagttcgattggcactttaatgacgctgatctgcctgtcgatacctggcgtgttatgatgtactcagaaatcctagacttccataagattggtggcagtgatggacagattgatatatctgccacgtttgatgaccaagttgctgcagccaccgctgccgcggcgcaggcacaggctcaggctcaggctcaagttcagttaaacatggctgcgcattcgcataatggcgctggcactactggaaatgatcactcagatatagctggtggaaacaaagtcagcgatcatgtagctgcaaatgacaccattacggactacggtaaccaggccatacagtacgctaatgagttccaacagtaa

SEQ ID NO: 142277 - protein, 435 aa, Saccharomyces cerevisiae
MTTNEEFIRTQIFGTVFEITNRYNDLNPVGMGAFGLVCSATDTLTSQPVAIKKIMKPFSTAVLAKRTYRELKLLKHLRHENLICLQDIFLSPLEDIYFVTELQGTDLHRLLQTRPLEKQFVQYFLYQILRGLKYVHSAGVIHRDLKPSNILINENCDLKICDFGLARIQDPQMTGYVSTRYYRAPEIMLTWQKYDVEVDIWSAGCIFAEMIEGKPLFPGKDHVHQFSIITDLLGSPPKDVINTICSENTLKFVTSLPHRDPIPFSERFKTVEPDAVDLLEKMLVFDPKKRITAADALAHPYSAPYHDPTDEPVADAKFDWHFNDADLPVDTWRVMMYSEILDFHKIGGSDGQIDISATFDDQVAAATAAAAQAQAQAQAQVQLNMAAHSHNGAGTTGNDHSDIAGGNKVSDHVAANDTITDYGNQAIQYANEFQQ

SEQ ID NO: 142278 - DNA, 1224 bp, Zygosaccharomyces rouxii
  CDS (1)..(1224)
atggctacacatgaagaattcatcaggactcaagtcttcgggacggttttcgaaatcaccaacaggtacacggatctaaatccggttggtatgggggcatttgggctagtatgctcagcaacggatactttggcgggtcaaccagtagccatcaaaaaaataatgaagccgttctctacggcagtgttggctaaacgtacttacagagaattgaaactgctgaagcacctgagacatgaaaacttgatttgtttgcaagatatcttcttatcgccgctcgaggatatctacttcgtcacagaactacaaggcacagatttgcatcgtctcctacaaacgaggccattggagaaacagtttgtgcaatatttcctttaccagattctcagaggattgaagtatgtgcactcggcaggtgtcatccacagagatctcaagcccagtaacattcttataaacgagaactgcgatttaaagatatgtgattttgggttggcaagaatccaggatcctcagatgacagggtatgtgtctaccaggtactacagagcacctgagattatgttaacgtggcagaaatacgatgtggaggtcgatatttggtcagcaggctgtattttttcggaaatgatagaaggtaagcctctgttcccaggtaaggttcatgttcatcaattttccatcattacagatttattgggttcgccaccaagggatgttataattacgatatgttcggaagacactttgaaatttgttacgtctttgccacacagagatccagttccattccaagagagattcaaggctgtggaacctgatgcggtggatctgttaggacgcatgctggttttcgatccaaagaagagaattacggctgctgatgcattagtacacccatatttagcaccatatcacgatccaactgacgagccgattgccgaggcacagttcgactgggatttcaacgatgcggatttgcccgtcgacacttggcgcgtgatgatgtactcagagattttagatttccacaagatcggcggtagtgatggccaaatcgataccaatgctgcctttgatgatcaagttgcggcggcaactgccgggcccatgctgccgctatggctcaacagcaacatcaacatcaacaacagtcatccggtaaacatacaagttcaactgcttcgtcatcaacaaccacgaataacggtagtgtaccaatag

SEQ ID NO: 142279 - protein, 407 aa, Zygosaccharomyces rouxii
MATHEEFIRTQVFGTVFEITNRYTDLNPVGMGAFGLVCSATDTLAGQPVAIKKIMKPFSTAVLAKRTYRELKLLKHLRHENLICLQDIFLSPLEDIYFVTELQGTDLHRLLQTRPLEKQFVQYFLYQILRGLKYVHSAGVIHRDLKPSNILINENCDLKICDFGLARIQDPQMTGYVSTRYYRAPEIMLTWQKYDVEVDIWSAGCIFSEMIEGKPLFPGKVHVHQFSIITDLLGSPPRDVIITICSEDTLKFVTSLPHRDPVPFQERFKAVEPDAVDLLGRMLVFDPKKRITAADALVHPYLAPYHDPTDEPIAEAQFDWDFNDADLPVDTWRVMMYSEILDFHKIGGSDGQIDTNAAFDDQVAAATAGPMLPLWLNSNININNSHPVNIQVQLLRHQQPRITVVYQ

SEQ ID NO: 142280 - DNA, 1263 bp, Zygosaccharomyces rouxii
  CDS (1)..(1263)
atggctacacatgaagaatttattaggacccaagtgtttgggacggttttcgaaattaccaacaggtacacggatctaaatcctgttggtatgggggcatttggtctggtatgctcagcaacagataccttggtggggcaaccagtagctatcaaaaaaataatgaaaccattctctaccgcagtattggctaaacgtacttacagagagctgaaattattaaaacatttaagacatgaaaatttgatttgcttacaagatatcttcttatctccactcgaagatatctatttcgttacagaattacaaggtacagatttgcatcgtcttctacaaacgagaccattggaaaaacaatttgttcaatattttctgtaccaaattcttagaggattaaagtatgtgcattcggcaggtgtaattcatagggatctcaaacctagtaacatacttataaacgagaactgcgatctaaagatatgtgatttcggattagctagaattcaggatcctcaaatgacagggtacgtttcgactaggtactatagagcacctgagattatgttaacgtggcaaaagtatgatgttgaagttgatatttggtccgcgggttgtattttttcggaaatgatagagggtaaaccattattccctggtaaagatcacgtccatcaattttcgattattacagatttattgggctcacctccaagggatgttataaataccatatgttcggagaatactttgaaatttgttacgtctttgccacacagagatccagttccattccaagaaaggttcaagactgtggaacccgatgcagtagatctattaagacgtatgttagtattcgttcctaagaagaggattacagcagctgatgcattagtacatccatatttagcaccttatcacgatccaactgatgaaccaactgccgaagcccagttcgattgggatttcaatgatgcagatttgcctgttgatacttggcgtgtaatgatgtattcagaaattctagatttccataaaattggtggtggtgatggtcaaattgatacgaatgcggcattcgatgatcaagttgcagctgctcatgctgcagctatggctcaacaccatcatcaaactcaacaacaatcatccggcaaacatacaaatccaactacttcatcatcggccgctacgataacagtaacggtccccatagcaatcacgatgccatcgctaattatggtaatcaagcggttcactacgtaa

SEQ ID NO: 142281 - protein, 420 aa, Zygosaccharomyces rouxii
MATHEEFIRTQVFGTVFEITNRYTDLNPVGMGAFGLVCSATDTLVGQPVAIKKIMKPFSTAVLAKRTYRELKLLKHLRHENLICLQDIFLSPLEDIYFVTELQGTDLHRLLQTRPLEKQFVQYFLYQILRGLKYVHSAGVIHRDLKPSNILINENCDLKICDFGLARIQDPQMTGYVSTRYYRAPEIMLTWQKYDVEVDIWSAGCIFSEMIEGKPLFPGKDHVHQFSIITDLLGSPPRDVINTICSENTLKFVTSLPHRDPVPFQERFKTVEPDAVDLLRRMLVFVPKKRITAADALVHPYLAPYHDPTDEPTAEAQFDWDFNDADLPVDTWRVMMYSEILDFHKIGGGDGQIDTNAAFDDQVAAAHAAAMAQHHHQTQQQSSGKHTNPTTSSSAATITVTVPIAITMPSLIMVIKRFTT

SEQ ID NO: 142282 - DNA, 1119 bp, Drosophila melanogaster
  CDS (1)..(1119)
atgacgacagctcagcaccaacactacaccgtcgaggtgggggacaccaacttcaccatccacagtcggtacattaatctacggcccataggatcaggtgcccaaggaatagtatgcgccgcttacgatactatcacccagcaaaatgtggcgattaagaaactatctcgaccattccaaaatgtaacccatgccaagcgagcatatagggaattcaagctaatgaagcttgttaaccataaaaacataattggcttacttaatgcttttacgccgcaaaggaacttggaagagtttcaggatgtctacctggtcatggagctgatggacgctaatctctgccaggtcatccaaatggacttggatcacgacagaatgtcctatttgctttatcaaatgttgtgcggaataaaacatttacactcagcaggaattattcacagagacttaaagccatccaatatagttgtaaaggccgactgcactctaaaaattttggatttcggtctggcacgtactgcaggaactacctttatgatgactccctatgtggtcacccgatattacagggctccagaggtcattttgggcatgggatacacagagaacgtggacatatggtccgtcggttgcattatgggcgaaatgatacggggcggtgtgctgtttcctggaacggatcatatagatcagtggaataaaattattgagcaattaggtacaccatcaccctcgtttatgcaacggttacagccaaccgtccgaaactatgtggaaaatcgtcctagatacactggatactcatttgatagacttttccccgatggcttgtttccaaatgataataatcagaatagccgccggaaggcttctgacgctagaaatcttcttagtaaaatgctagtcattgatccagagcagcggatatctgtggacgaggctttgaagcatgaatatatcaacgtgtggtatgatgctgaggaagtggatgctcccgctccggagccatatgatcacagcgtggacgaaagggaacacactgtggagcagtggaaggagctaatctatgaggaagtcatggactacgaagcacacaatacaaataatagaacgcggtag

SEQ ID NO: 142283 - protein, 372 aa, Drosophila melanogaster
MTTAQHQHYTVEVGDTNFTIHSRYINLRPIGSGAQGIVCAAYDTITQQNVAIKKLSRPFQNVTHAKRAYREFKLMKLVNHKNIIGLLNAFTPQRNLEEFQDVYLVMELMDANLCQVIQMDLDHDRMSYLLYQMLCGIKHLHSAGIIHRDLKPSNIVVKADCTLKILDFGLARTAGTTFMMTPYVVTRYYRAPEVILGMGYTENVDIWSVGCIMGEMIRGGVLFPGTDHIDQWNKIIEQLGTPSPSFMQRLQPTVRNYVENRPRYTGYSFDRLFPDGLFPNDNNQNSRRKASDARNLLSKMLVIDPEQRISVDEALKHEYINVWYDAEEVDAPAPEPYDHSVDEREHTVEQWKELIYEEVMDYEAHNTNNRTR

SEQ ID NO: 142284 - DNA, 1239 bp, Arabidopsis thaliana
  CDS (1)..(1239)
atgacttcgataccattggggcctcctcagcctccgtctttagctcctcagccgccgcatcttcacggcggagattctttgaaacgtcgtcccgatatagacaacgacaaggaaatgtctgctgctgttatagaaggaaatgatgctgttaccggtcacataatttctactacaattggaggcaaaaatggtgaacctaaacagaccattagttacatggccgaacgtgttgttggaacaggatcattcggaattgtattccaggcaaaatgcttggaaactggagaatcagtagccattaagaaggttttgcaagatcgccgttataaaaaccgagagttgcaattaatgcgactaatggaccatccaaatgtggtttccttgaagcattgtttcttctctacaacgactagagatgagctcttcctcaatctcgttatggagtatgtaccagagacattgtaccgggttttgaagcactatactagttcaaaccagcggatgcctatcttctatgtcaaactttacacataccaaatcttcagaggcttggcttatatccatactgctcctggtgtctgccacagagatgtgaaaccacaaaatcttttggttgatcccctcacccatcagtgtaagctctgtgattttggaagtgcaaaagtactggtgaaaggtgaagcaaacatatcatatatctgctctcggtattaccgagctccagaactcatctttggtgccacagagtatacatcatccattgatatatggtctgctggttgtgttctggcagagctacttcttgggcagccgttattcccgggagaaaattctgtggaccagctagtggagatcataaaggttcttggtactccaactcgcgaagaaatccggtgcatgaacccaaactacacagacttcagattcccacaaatcaaagcccacccttggcataaggttttccacaagcggatgcctccggaagccattgaccttgcatctcggcttcttcaatactcaccaagtctacgttgcactgcgctcgaggcatgtgcgcatccgtttttcaatgaactccgtgagccaaatgctcgtcttccaaatggccgacctctaccaccgttgttcaacttcaaacaagagttgtctggggcttcaccggagcttatcaacaggctaataccagagcatgtgaggcgacagatgaatggtggctttccatttcaagctggaccctag

SEQ ID NO: 142285 - protein, 412 aa, Arabidopsis thaliana
MTSIPLGPPQPPSLAPQPPHLHGGDSLKRRPDIDNDKEMSAAVIEGNDAVTGHIISTTIGGKNGEPKQTISYMAERVVGTGSFGIVFQAKCLETGESVAIKKVLQDRRYKNRELQLMRLMDHPNVVSLKHCFFSTTTRDELFLNLVMEYVPETLYRVLKHYTSSNQRMPIFYVKLYTYQIFRGLAYIHTAPGVCHRDVKPQNLLVDPLTHQCKLCDFGSAKVLVKGEANISYICSRYYRAPELIFGATEYTSSIDIWSAGCVLAELLLGQPLFPGENSVDQLVEIIKVLGTPTREEIRCMNPNYTDFRFPQIKAHPWHKVFHKRMPPEAIDLASRLLQYSPSLRCTALEACAHPFFNELREPNARLPNGRPLPPLFNFKQELSGASPELINRLIPEHVRRQMNGGFPFQAGP

SEQ ID NO: 142286 - DNA, 1143 bp, Arabidopsis thaliana
  CDS (1)..(1143)
atggctgatgataaggagatgcctgctgctgtagttgatggacatgatcaagtcactggtcatattatttccaccacaatcggtggcaaaaatggtgaaccaaaacagacaattagttacatggcggagcgagttgttggtacaggctcgttcgggatcgttttccaagcaaaatgtttggagactggagaaaccgtggcgataaagaaggttttgcaagatagaagatacaagaaccgagaacttcagttgatgcgtgtgatggatcatccgaatgtggtttgtttgaagcattgcttcttttcgactacaagtaaagacgagcttttcttgaacttggttatggagtatgtccctgagagcttgtatcgagttctgaaacattatagtagtgcaaaccaaagaatgcctcttgtctatgttaaactttacatgtatcagatcttccggggacttgcttacattcacaatgttgctggagtttgtcacagagatctaaagcctcaaaatcttctggttgatcctcttactcatcaagtcaaaatctgtgactttggcagtgcgaaacagctcgttaaaggtgaagccaacatttcttacatctgctcacgattctaccgtgcacccgagctcatatttggtgccactgagtacacaacttctattgatatctggtctgctggttgtgttcttgctgagcttcttcttggtcagccattatttcccggagaaaatgctgtggatcagctcgttgaaattataaaagttcttggtacaccaactcgagaagaaatccgttgtatgaatccacattacacagatttcaggtttccacagataaaggcacatccctggcacaagatcttccacaaaaggatgcccccagaagcgattgattttgcatcaaggctgcttcaatactctccaagtctaagatgcacagcgctcgaagcttgtgcacatccgttctttgatgaactcagagaaccaaacgctcgtttaccaaatggacggcctttcccgcctctcttcaacttcaaacaagaagtagctggatcatcacctgaactggtcaacaagttgattccagaccatatcaagagacaattgggtctaagcttcttgaatcaatctggaacttaa

SEQ ID NO: 142287 - protein, 380 aa, Arabidopsis thaliana
MADDKEMPAAVVDGHDQVTGHIISTTIGGKNGEPKQTISYMAERVVGTGSFGIVFQAKCLETGETVAIKKVLQDRRYKNRELQLMRVMDHPNVVCLKHCFFSTTSKDELFLNLVMEYVPESLYRVLKHYSSANQRMPLVYVKLYMYQIFRGLAYIHNVAGVCHRDLKPQNLLVDPLTHQVKICDFGSAKQLVKGEANISYICSRFYRAPELIFGATEYTTSIDIWSAGCVLAELLLGQPLFPGENAVDQLVEIIKVLGTPTREEIRCMNPHYTDFRFPQIKAHPWHKIFHKRMPPEAIDFASRLLQYSPSLRCTALEACAHPFFDELREPNARLPNGRPFPPLFNFKQEVAGSSPELVNKLIPDHIKRQLGLSFLNQSGT

SEQ ID NO: 142288 - DNA, 1419 bp, Arabidopsis thaliana
  CDS (1)..(1419)
atgaacgtgatgcgtcgtctcaagagcattgcttcgggtcggacctccatttcttcggatcctggtggggactatgcgttgaagagagctaagctggatcaagagaacgacaacttgtgtgttgatccaatgcaggttgaccaaaatagttcttgttttgagatgaaagctgacgttttgtcacaagaaagtgttgctggaacgtcaaatgtgcctgctgtatcggaaaaacccgtggatgatcagcttcccgatgttatgatcgaaatgaagattagagacgagcgaaatgccaaccgcgaggataaggatatggaaacaactgttgtaaacggcagtgggaccgaaacgggacaagttattacgacgacagttgggggtagagatggaaagccaaagcagactatctcatacatggcccagcgagtggttggaaccggctcattcggagtagtgttccaggccaagtgcctggaaacgggtgaacaagttgcaattaagaaggttctgcaggataaaagatacaagaacagagaacttcagatcatgcgtttgcaagaccatcccaacgttgtgcggctgaggcattctttcttttcaacaactgacaaggatgagctgtatctcaaccttgtccttgagtatgttcccgaaactgtatacagagcatcgaagcactataccaaaatgaatcagcatatgccaattatctttgttcagctctatacttatcagatttgccgtgcgctgaactacttacatcgcgtggttggggtgtgtcaccgtgacattaagccacaaaatctactggttaatccccaaactcatcaattaaaaatatgcgattttggaagcgcaaagatgttggtacccggtgaacctaacatatcctatatatgctcccggtactacagggccccagaacttatatttggggcgacagagtataccaatgccattgacatgtggtccggcggttgtgtcatggcagagcttttacttggtcaaccactgtttcccggggaaagtggcattgatcagctggtggagataatcaagattcttgggacgcctacaagagaagaaatacggtgtatgaatccgaattacacagagttcaagtttcctcaaatcaaagctcacccgtggcacaagattttccacaagcgaatgccacctgaagcagtagacctcgtctcaagactccttcagtactcaccaaaccttcgttgcactgcattggaagcttgtgcacaccccttctttgatgacttacgggatccaaatgtttcactgccaaatggaagagcactgcctccattgtttaacttcactgcccaagaacttgcgggtgcatcaacagagctgcgacagcgtctaattccagcacattgccagggaacgggaagtagctcttag

SEQ ID NO: 142289 - protein, 472 aa, Arabidopsis thaliana
MNVMRRLKSIASGRTSISSDPGGDYALKRAKLDQENDNLCVDPMQVDQNSSCFEMKADVLSQESVAGTSNVPAVSEKPVDDQLPDVMIEMKIRDERNANREDKDMETTVVNGSGTETGQVITTTVGGRDGKPKQTISYMAQRVVGTGSFGVVFQAKCLETGEQVAIKKVLQDKRYKNRELQIMRLQDHPNVVRLRHSFFSTTDKDELYLNLVLEYVPETVYRASKHYTKMNQHMPIIFVQLYTYQICRALNYLHRVVGVCHRDIKPQNLLVNPQTHQLKICDFGSAKMLVPGEPNISYICSRYYRAPELIFGATEYTNAIDMWSGGCVMAELLLGQPLFPGESGIDQLVEIIKILGTPTREEIRCMNPNYTEFKFPQIKAHPWHKIFHKRMPPEAVDLVSRLLQYSPNLRCTALEACAHPFFDDLRDPNVSLPNGRALPPLFNFTAQELAGASTELRQRLIPAHCQGTGSSS

SEQ ID NO: 142290 - DNA, 1224 bp, Arabidopsis thaliana
  CDS (1)..(1224)
atggcctcattaccattggggcctcagcctcatgctcttgctccgccgctgcagcttcacgacggcgacgctttgaaacgccgtcctgaattggattctgataaggaaatgtctgcagctgttattgagggaaatgacgctgttactggtcatatcatttccactactataggaggcaaaaacggcgaaccaaagcagaccattagttacatggctgagcgggttgttggaacaggttcattcgggattgtttttcaggcgaaatgcttggaaactggagaatcagtagccattaaaaaggtcttgcaagatcgacgctataaaaaccgtgagttgcaactaatgcgaccaatggatcacccaaatgtcatctccttgaagcactgtttcttctctacaacgagtagagatgagctcttcctcaaccttgttatggagtatgtacctgagactttataccgggttttgaggcactatactagttctaatcagaggatgccaattttctatgtcaagctttacacatatcaaatctttagaggtttggcttacatccatactgttcccggtgtttgccacagagatgtgaaaccacaaaatctcttggttgatcccttgacccatcaggttaagctgtgtgattttggaagtgcaaaagtattggtcaaaggtgaaccaaacatatcatatatctgctcccgttattatcgtgctccagaactcatctttggcgccacagagtatacagcatccatagatatatggtctgctggttgtgtactggcagagcttcttcttggccagccgttatttccaggagaaaattcagttgatcagcttgtggagatcataaaggttcttggtactccaactcgtgaagaaattcgatgtatgaacccgaactacacagattttaggttcccacaaatcaaagctcacccttggcacaaggtttttcataaacggatgcctccagaagcaatagaccttgcatctcggcttcttcaatattcaccaagtctacgctgcactgcgctcgaagcatgtgctcatccgtttttcaatgaactccgagagccaaacgcccgtcttccaaatggtcgtccattaccgccattgttcaatttcaaacaagagttaggtggagcttcaatggagctaatcaacaggctaatacctgagcatgtgagacgacaaatgagcacaggattacaaaacagttaa

SEQ ID NO: 142291 - protein, 407 aa, Arabidopsis thaliana
MASLPLGPQPHALAPPLQLHDGDALKRRPELDSDKEMSAAVIEGNDAVTGHIISTTIGGKNGEPKQTISYMAERVVGTGSFGIVFQAKCLETGESVAIKKVLQDRRYKNRELQLMRPMDHPNVISLKHCFFSTTSRDELFLNLVMEYVPETLYRVLRHYTSSNQRMPIFYVKLYTYQIFRGLAYIHTVPGVCHRDVKPQNLLVDPLTHQVKLCDFGSAKVLVKGEPNISYICSRYYRAPELIFGATEYTASIDIWSAGCVLAELLLGQPLFPGENSVDQLVEIIKVLGTPTREEIRCMNPNYTDFRFPQIKAHPWHKVFHKRMPPEAIDLASRLLQYSPSLRCTALEACAHPFFNELREPNARLPNGRPLPPLFNFKQELGGASMELINRLIPEHVRRQMSTGLQNS

SEQ ID NO: 142292 - DNA, 1407 bp, Brassica napus
  CDS (1)..(1407)
atgaacgtgatgcgtcgtctgaagagcattgcttcgggtcggacctctatttcttcggatcctggtgtggactctagtcttaagagacccaagctcgatcaagacaacgacaacttatcttctcgtggtgatgatcccatgcaggttgaccaaagtactgacatggtggtggtgtcccaagatactgttgccggaacctcaaatgtgcctcctcctcctgatcagcttccggaagtaatgaacgatatgagattaagagaggacgagcctcatgccaaccgcggcgaggaggacaaagatatggaaccacctattgttaatggctgtgggactgaaactggtcaagttattacaaccactgtcggaggtcgtgatggaaagcctaagcagacgatctcatacatggcccagagagtggttggaacaggctcatttggagttgtcttccaggccaagtgtctggaaacgggtgaacaagtcgcaattaagaaggttctgcaggataaaagatacaagaacagagaacttcagatcatgcgcttgcaagaccaccccaatgtcgtgcggctgaggcattctttcttttcgactactgacaaggatgagctctatcttaaccttgtccttgagtttgttcccgagactgtatacagagcgctaaagcactataccaaaatgaatcagcatatgccaatcatccttgttcagctctacacctatcagatctgccgtgcgctgaactacttgcatcgtgtggttggggtgtgtcatcgtgatatcaagccacaaaatctactggtcaatacccacacccatcaattaaaaatatgtgattttggaagcgcaaagatgttggtcccaggtgaacctaacatatcctatatatgctcccggtactacagggccccagaacttatattcggggcaacagagtataccaatgccattgacatgtggtctggtggttgtgttatggcagagcttttactcggccaaccactgtttcccggagaaagtggcattgatcagctggtggagattatcaagattcttggtacgccaacgagagaggaaatacggtgtatgaatccaaattacacagagttcaagtttcctcaaataaaagctcacccttggcacaagattttccacaagcgaatgccacctgaagcagtagacctcgtctcaagacttctccagtattcaccaaaccttcgttgcactgcattggaagcttgtgcacaccccttcttcgatgacttacgggccccaaatgtatcactgccaaatggaagagcactgcctccattgtttaacttcactgcccaagaacttgcgggagcatcaacagagctgcggcagcgtctaattccagcgcattgccagggaaccggaaatagctcttag

SEQ ID NO: 142293 - protein, 468 aa, Brassica napus
MNVMRRLKSIASGRTSISSDPGVDSSLKRPKLDQDNDNLSSRGDDPMQVDQSTDMVVVSQDTVAGTSNVPPPPDQLPEVMNDMRLREDEPHANRGEEDKDMEPPIVNGCGTETGQVITTTVGGRDGKPKQTISYMAQRVVGTGSFGVVFQAKCLETGEQVAIKKVLQDKRYKNRELQIMRLQDHPNVVRLRHSFFSTTDKDELYLNLVLEFVPETVYRALKHYTKMNQHMPIILVQLYTYQICRALNYLHRVVGVCHRDIKPQNLLVNTHTHQLKICDFGSAKMLVPGEPNISYICSRYYRAPELIFGATEYTNAIDMWSGGCVMAELLLGQPLFPGESGIDQLVEIIKILGTPTREEIRCMNPNYTEFKFPQIKAHPWHKIFHKRMPPEAVDLVSRLLQYSPNLRCTALEACAHPFFDDLRAPNVSLPNGRALPPLFNFTAQELAGASTELRQRLIPAHCQGTGNSS

SEQ ID NO: 142294 - DNA, 1107 bp, Saccharomyces cerevisiae
  CDS (1)..(1107)
atggctagaaccataacttttgatatcccttcccaatataaactcgtagatttaataggtgagggagcgtacggaacagtatgttcagcaattcataagccttccggcataaaggtagctatcaagaaaatacaaccgtttagcaaaaaattgtttgttacaagaactatacgtgagatcaagcttttacggtatttccatgaacacgaaaacataataagtatattggataaagtaaggccagtatccatagacaaactaaacgctgtttatttagtcgaagagttgatggaaaccgatttacaaaaagtaattaataatcagaatagcgggttttccactttaagtgatgaccatgttcaatactttacataccaaatcctcagagccttaaagtctattcacagtgcacaagttatccatagagacataaagccatcaaacctgttactaaattccaattgtgatctcaaagtctgcgattttggactagcgaggtgtttagctagcagtagcgattcaagagaaacattggtaggattcatgacggagtacgtcgcaacgcgatggtacagggcacccgagataatgctaacttttcaagagtacacaactgcgatggatatatggtcatgcggatgcattttggctgaaatggtctccgggaagcctttgttcccaggcagagactatcatcatcaattatggctaattctagaagtcttgggaactccatctttcgaagactttaatcagatcaaatccaagagggctaaagagtatatagcaaacttacctatgaggccacccttgccatgggagaccgtctggtcaaagaccgatctgaatccagatatgatagatttactagacaaaatgcttcaattcaatcctgacaaaagaataagcgcagcagaagctttaagacacccttacctggcaatgtaccatgacccaagtgatgagccggaatatcctccacttaatttggatgatgaattttggaaactggataacaagataatgcgtccggaagaggaggaagaagtgcccatagaaatgctcaaagacatgctttacgatgaactaatgaagaccatggaatag

SEQ ID NO: 142295 - protein, 368 aa, Saccharomyces cerevisiae
MARTITFDIPSQYKLVDLIGEGAYGTVCSAIHKPSGIKVAIKKIQPFSKKLFVTRTIREIKLLRYFHEHENIISILDKVRPVSIDKLNAVYLVEELMETDLQKVINNQNSGFSTLSDDHVQYFTYQILRALKSIHSAQVIHRDIKPSNLLLNSNCDLKVCDFGLARCLASSSDSRETLVGFMTEYVATRWYRAPEIMLTFQEYTTAMDIWSCGCILAEMVSGKPLFPGRDYHHQLWLILEVLGTPSFEDFNQIKSKRAKEYIANLPMRPPLPWETVWSKTDLNPDMIDLLDKMLQFNPDKRISAAEALRHPYLAMYHDPSDEPEYPPLNLDDEFWKLDNKIMRPEEEEEVPIEMLKDMLYDELMKTME

SEQ ID NO: 142296 - DNA, 1185 bp, Pisum sativum
  CDS (1)..(1185)
atggaaggaggaggaggagctccggcagctgacgcggtgatggaagatgcagcgccgcaacagcaagagccacagcagcaggcggcgatggggatcgagaatattccggcgacacttagccacggtggcaggttcattcaatacaatatattcggtaatatatttgaagttactgcaaaatacagacctcctatcatgccaatcggtaaaggcgcttacggtattgtttgctctgctcataattcggagacgaatgaacatgttgctgtcaagaagattgcaaatgcatttgataacaagattgatgcaaagaggacccttcgtgaaatcaagctcgttcgccacatggatcatgaaaacgtggtcgcaatccgggatatagtgccaccacctcagcgggaggtattcaatgatgtttacattgcatatgagctaatggacactgatcttcaccaaatcattcgatcaaatcaagcattgtccgaggagcactgtcaatattttctgtaccaaattcttcgtgggttgaagtacattcattccgcgaatgttttgcatagggacttaaaacccagcaaccttctcctgaacgccaactgtgacttgaagatttgtgattttggactggctcgtgtaacctctgaaaccgactttatgactgaatatgttgttacaagatggtaccgtgcaccagagcttctgctaaactcttctgattacacagcagcaattgatgtctggtctgttggttgtattttcatggagctgatggatcgaaagccgttgtttcctggcagagatcatgtgcatcagttgcgtctactcatggagctgattggtaccccatcagaagctgatttgggttttctgaatgaaaatgccaagagatacattaggcaactgcctctttaccgccgccaatctttccaagaaaagtttccgcatgtccatcctgaagctatagatcttgttgaaaagatgttaacttttgatcctagacaaagaattactgttgaaaatgcactggcacacccttacttgacatcgctgcatgacatcagcgatgaacctgtatgcacgactcccttcagctttgattttgaacagcatgctttgaccgaggaacagatgaaagaactgatatacagagaagctctagcatttaaccccgagtaccagcagtag

SEQ ID NO: 142297 - protein, 394 aa, Pisum sativum; identical to SEQ ID NO: 140287

SEQ ID NO: 142298 - DNA, 1155 bp, Petunia hybrida
  CDS (1)..(1155)
atggcaactccagttgaacctccaaatgggattaggaccccagggaagcattactattctatgtggcagtccctttttgaaattgatacaaaatatgtacctattaagcctattggtcgaggggcatacggaattgtttgttcttccgttaacagggaaaccaatgagaaggtcgcaatcaagaaaataaacaatgcctttgagaatcgtattgatgctctgagaaccttgcgtgaactaaagctccttcgccaccttagacatgaaaatgtgattgctctgaaagatgtcatgatgccaatccagaggagaagtttcaaagatgtttatttggtttacgaattaatggatacagatttacatcagataatcaaatcctctcaaacactctcaaatgatcattgccagtatttcctattccagttgcttcgaggtctgaagtatctccattctgcaaatattcttcatcgtgacttgaagcctggaaacctgcttatcaatgctaactgcgatctgaaaatatgtgacttcgggcttgcccgtactagcagtggcaaggatcagtttatgactgaatatgttgttacacgctggtatagagctccggaactcctcctttgctgtgacaactatggaacgtccattgatgtatggtctgttggttgcatttttgcggacgtcttagggaggaaacccgtctttccaggtaccgaatgccttaaccaactgaaattgattatcaacatccttggcagccagagggaagaagatattgaatttatcgataatccaaaggcaaggaagtacatcaaatcacttccatactctcccggaacacccttttcccgcctctatcccaatgcgcatccattggccatcgatctcctccaaaggatgctcgtgtttgacccttcgaaaagaattagtgttatggaagcgcttcaacacccttacatgtctccgttgtatgatccaaacactgaccctccagcacaagttcctatcaatcttgacatagacgaggatttagtcgaagagacgataagggaaatgatgtgggaggaaatacttcattaccatccagaagcagctgtggctctgctatggaagttgttctatgaactgcttcttgtcccttcaagacataggccttga

SEQ ID NO: 142299 - protein, 384 aa, Petunia hybrida
MATPVEPPNGIRTPGKHYYSMWQSLFEIDTKYVPIKPIGRGAYGIVCSSVNRETNEKVAIKKINNAFENRIDALRTLRELKLLRHLRHENVIALKDVMMPIQRRSFKDVYLVYELMDTDLHQIIKSSQTLSNDHCQYFLFQLLRGLKYLHSANILHRDLKPGNLLINANCDLKICDFGLARTSSGKDQFMTEYVVTRWYRAPELLLCCDNYGTSIDVWSVGCIFADVLGRKPVFPGTECLNQLKLIINILGSQREEDIEFIDNPKARKYIKSLPYSPGTPFSRLYPNAHPLAIDLLQRMLVFDPSKRISVMEALQHPYMSPLYDPNTDPPAQVPINLDIDEDLVEETIREMMWEEILHYHPEAAVALLWKLFYELLLVPSRHRP

SEQ ID NO: 142300 - DNA, 1101 bp, Drosophila melanogaster; identical to SEQ ID NO: 140288
  CDS (1)..(1101)

SEQ ID NO: 142301 - protein, 366 aa, Drosophila melanogaster; identical to SEQ ID NO: 140289

SEQ ID NO: 142302 - DNA, 1098 bp, Drosophila melanogaster; identical to SEQ ID NO: 140290
  CDS (1)..(1098)

SEQ ID NO: 142303 - protein, 365 aa, Drosophila melanogaster; identical to SEQ ID NO: 140291

SEQ ID NO: 142304 - DNA, 1071 bp, Drosophila melanogaster
  CDS (1)..(1071)
atgccggagttcgtgagagtggcaattaacgaaagcctttgggagttcccggatatatacgagttcgttcgttttctgggtggcggttcctttggccaggtggctaaggtgagactacgaggcactgaaaattacttcgctatgaaaaggcttatgcgcccattcgagagggaggaggatgctaagggtacctatcgcgagatccgtctgctgaagcacatgaatcatcgaaatgttatcagcctgctgaacgtcttccatccaccagcgcacaacatgatggaatttcagcaggtttatttggtgactcacctgatggacgcggatttgcacaggtactcgcgttcgaaaaggatgagcgatcaagagattaggataatcctttaccaaatactgcggggactgaagtacatacatagtgccggggttgttcatcgagacttaaagccctgcaatatcgcagttaatggaaatagcgaggtgcgcatacttgacttcggtttatcccgtatgtgcgcagacaaaatgacggaccatgttggaactatgtggtatctagctccggaaattatctttttaaggggtcaatacacaaaggcaattgacgtgtggtcggttggttgcattctggcggaacttatcacggatcgtgtcctgtttcgcggtgaaaactatgtaagccaaatacgatgtctgattaacataatgggtactccgacgagggagtttatcaccgggataagcatggaacgttcgcgtaattacctggaggggtacccgttacgacaaaggtgcgattttcatcacctgtttatgggttacgatgtccaggccatcgatttgatggaaaaaatgctcgaaatggtacccgaaaaacgtatcacagctgcggaagcaatgctccatccataccttcgggatcttattgagccacaccatcatgccgaagacaccgcaccagtctatgatcagaacttcgaaaacatggtactgcctgtaaaatgctggaaagaacttgtttcccacgagattcggaacttcagacctgaccaacttgatttgcatttttaa

SEQ ID NO: 142305 - protein, 356 aa, Drosophila melanogaster
MPEFVRVAINESLWEFPDIYEFVRFLGGGSFGQVAKVRLRGTENYFAMKRLMRPFEREEDAKGTYREIRLLKHMNHRNVISLLNVFHPPAHNMMEFQQVYLVTHLMDADLHRYSRSKRMSDQEIRIILYQILRGLKYIHSAGVVHRDLKPCNIAVNGNSEVRILDFGLSRMCADKMTDHVGTMWYLAPEIIFLRGQYTKAIDVWSVGCILAELITDRVLFRGENYVSQIRCLINIMGTPTREFITGISMERSRNYLEGYPLRQRCDFHHLFMGYDVQAIDLMEKMLEMVPEKRITAAEAMLHPYLRDLIEPHHHAEDTAPVYDQNFENMVLPVKCWKELVSHEIRNFRPDQLDLHF

SEQ ID NO: 142306 - DNA, 1164 bp, Medicago sativa
  CDS (1)..(1164)
atggaaggaggaggagctccaccagctgacaccgtgatgtcagatgctgcaccggcgccgccgcagatggggatcgagaatattccggcagtccttagccacggtggtaggttcattcaatacaacattttcggcaacatttttgaagttactgcaaaatacaaaccacccatcatgccaatcggtaaaggcgcttatggtattgtttgctctgctcataattcggagacgaatgaacatgtcgcggttaagaagattgcaaatgcatttgacaacaagattgatgccaagaggactctccgtgaaatcaagctgcttcgccatatggatcatgaaaacgtggttgcaatcagggatatagtgccaccacctcagagggaggtattcaatgatgtttacattgcatatgagctaatggacaccgaccttcaccaaatcattcgatcaaatcaagcactatcggaggagcactgtcagtactttctgtaccaaatccttcgtggtttgaagtacatacattctgcaaatgttctgcatagggacttaaaacccagcaaccttctcctgaacgccaactgtgacttaaagatttgtgattttggactggcccgtgtaacctctgaaaccgattttatgactgaatatgttgttactagatggtaccgtgcaccagagcttctgttaaactcttctgattatacagcagcaattgatgtatggtctgttggttgtattttcatggaactgatggatcgaaagcctttgtttcctggcagagatcatgtgcatcagctgcgtctactcatggagttgatcggtaccccatcagaagatgatttggggtttctgaatgaaaatgctaagagatacattaggcaactacctccttaccgccgtcaatctttccaagaaaagtttccacatgtccatcctgaagctatagatcttgttgaaaagatgttaacttttgatccgagaaaaagaattactgttgaagatgcactggcacacccctacttgacatctctgcatgacatcagtgatgaacctgtgtgcatgactcccttcagctttgactttgaacagcatgcattgaccgaggaacagatgaaagaactgatatacagagaggctctagcatttaaccctgagtaccagcagtag

SEQ ID NO: 142307 - protein, 387 aa, Medicago sativa; identical to SEQ ID NO: 140293

SEQ ID NO: 142308 - DNA, 1116 bp, Medicago sativa
  CDS (1)..(1116)
atgtctgttgaatcagctgagaataacatcagaggagtaccaactcatggtggaaggtatttgcagtacaatatctatggtaacctctttgaggtttctagaaagtatgttcctcctattcgatctgtcggtagaggtgcttatggtattgtttgtgctgctgtaaatgctgagacacgtgaggaagtcgccattaagaagattggcaatgcatttgacaacagaatagatgctaaaaggaccttacgggaaatcaaacttcttcgccatatggatcatgaaaatgtgatgtccattaaagatattataagacctccacagaaggagaacttcaatcatgtgtacattgtttctgagttaatggacacagatctgcatcaaataatacgttccaatcaaccaatgacagatgatcattgtcggtattttgtgtatcagctgttacgaggactcaaatacgtacattcagcaaatgttttgcaccgtgacctcaagcctagcaatttgctactgaatgccaattgtgatcttaagattggtgactttggtcttgccagaactacatcagaaacagatttcatgactgagtacgtggttactaggtggtacagagctcccgaactgcttcttaattgttcagactatacagcagccattgatatatggtctgttggttgcatacttggtgaaatcgtaacaagacaacccctctttcctggaagagattatgttcatcagctgagactggtcacagagctgataggctcacctgatgatgccagccttggatttctacgcagtgagaatgctcgtagatacgtaagacaacttccacaatatccaaaacaaaatttttccgctaggtttcccaacatgtctccaggtgctgttgatttgctagagaagatgctcatctttgatccaagcaagcgcattaaagttgatgaagcattgtgccatccatacatggcacctctgcatgatatcaatgaggaacctgtatgtgccagacctttcagttttgactttgaggaaccaatgttcactgaagaagatatcaaggaactcatatggaaagagtctgtgaggttcaatcctgatccaccaattaattga

SEQ ID NO: 142309 - protein, 371 aa, Medicago sativa
MSVESAENNIRGVPTHGGRYLQYNIYGNLFEVSRKYVPPIRSVGRGAYGIVCAAVNAETREEVAIKKIGNAFDNRIDAKRTLREIKLLRHMDHENVMSIKDIIRPPQKENFNHVYIVSELMDTDLHQIIRSNQPMTDDHCRYFVYQLLRGLKYVHSANVLHRDLKPSNLLLNANCDLKIGDFGLARTTSETDFMTEYVVTRWYRAPELLLNCSDYTAAIDIWSVGCILGEIVTRQPLFPGRDYVHQLRLVTELIGSPDDASLGFLRSENARRYVRQLPQYPKQNFSARFPNMSPGAVDLLEKMLIFDPSKRIKVDEALCHPYMAPLHDINEEPVCARPFSFDFEEPMFTEEDIKELIWKESVRFNPDPPIN

SEQ ID NO: 142310 - DNA, 1110 bp, Arabidopsis thaliana
  CDS (1)..(1110)
atgtcaatagagaaaccattcttcggtgatgacagcaacagaggagtaagtatcaatggtggtcgttatgtgcagtataatgtctatggaaatctctttgaagtttctaaaaagtatgttcctcctcttcgtcctatcggcagaggcgcttctggcatcgtctgtgctgcatggaattcggagacgggtgaggaagtagcgatcaagaagattggtaatgcatttggcaacattatcgacgctaagagaactttgagagagattaagcttcttaagcatatggatcatgacaatgtcattgccattatagacataataagaccacctcagccagacaacttcaatgatgttcacattgtctatgagttaatggacactgatcttcaccacattatccgctctaaccaaccgttaactgatgatcattcacggttcttcctgtatcagttgttgcgaggcctcaagtatgtgcattcagccaatgtactgcatcgtgatttaaaaccgagtaacttgctcctgaatgcaaactgtgacctcaagattggggattttgggcttgcgaggactaaatcagagacagacttcatgacagaatatgttgttacacgttggtaccgagctccagagttgctccttaattgctcagaatacactgcagctatcgacatttggtctgtcggttgtatactcggtgaaataatgacgcgggagccgttatttccgggcagagattatgttcagcagcttagactcatcactgagcttataggctcaccagatgattcaagcctaggattcttaagaagcgacaacgctagaagatacgtaagacagcttccacagtatccaagacaaaactttgccgctagattcccaaacatgtcggtcaatgctgttgatttgctgcagaaaatgctcgtctttgacccaaacagacgcattacagtcgatgaagccttgtgccacccttacttagcaccgctacacgaatataacgaggaacctgtgtgtgtgagaccgttccattttgatttcgagcaaccttcattgacggaagagaacatcaaggagcttatatatcgtgaatcagtcaagtttaacccttaa

SEQ ID NO: 142311 - protein, 369 aa, Arabidopsis thaliana
MSIEKPFFGDDSNRGVSINGGRYVQYNVYGNLFEVSKKYVPPLRPIGRGASGIVCAAWNSETGEEVAIKKIGNAFGNIIDAKRTLREIKLLKHMDHDNVIAIIDIIRPPQPDNFNDVHIVYELMDTDLHHIIRSNQPLTDDHSRFFLYQLLRGLKYVHSANVLHRDLKPSNLLLNANCDLKIGDFGLARTKSETDFMTEYVVTRWYRAPELLLNCSEYTAAIDIWSVGCILGEIMTREPLFPGRDYVQQLRLITELIGSPDDSSLGFLRSDNARRYVRQLPQYPRQNFAARFPNMSVNAVDLLQKMLVFDPNRRITVDEALCHPYLAPLHEYNEEPVCVRPFHFDFEQPSLTEENIKELIYRESVKFNP

SEQ ID NO: 142312 - DNA, 1119 bp, Arabidopsis thaliana
  CDS (1)..(1119)
atgtctggagaatcaagctctggttctaccgaacattgcatcaaagttgtaccgacacacggtggccgctatgttcagtacaacgtttatggacaactctttgaagtttccagaaagtatgtccctcctattcgtcccattggtagaggcgcttgcggtattgtctgtgctgcggtgaactcagtgactggagagaaagtggctattaagaagatcggtaatgcttttgataacatcatcgatgctaagagaacgctacgtgaaattaaacttctcaggcatatggatcatgagaacgttataaccatcaaagatattgtaagacctccgcaacgagatatcttcaatgatgtctacattgtctatgagttaatggacactgatcttcagcgaatcctccgttctaaccaaacactgaccagtgatcaatgccgtttcctagtataccagctcttaagagggctcaaatacgtgcactcggccaacatattacatcgtgatctaaggccaagcaacgtgctacttaactcgaaaaacgagctaaagattggtgattttgggcttgcaagaacaacttccgacacagacttcatgactgaatatgtcgttacccgttggtacagggctcctgagttgcttcttaactgctcagagtacaccgcagctattgatatttggtctgttggctgcatactcggcgaaatcatgacgggacaaccgttgtttccaggcaaagattatgttcatcagcttaggcttataacagagcttgtaggctctccagacaattccagcctcggcttccttcgcagtgacaacgcaagaagatacgtcaggcaacttccgcgatacccgaaacaacagtttgctgctagattcccgaaaatgcccactacggctatcgatttgcttgagagaatgctcgtctttgatcctaaccggcgcatctcagtcgatgaagcccttggccatgcttacctatcaccgcaccatgatgtggccaaagaaccggtctgttcgactcctttcagctttgatttcgaacatccttcttgcacagaagaacacataaaggagcttatctacaaggagtctgtcaaattcaatcctgaccactga

SEQ ID NO: 142313 - protein, 372 aa, Arabidopsis thaliana
MSGESSSGSTEHCIKVVPTHGGRYVQYNVYGQLFEVSRKYVPPIRPIGRGACGIVCAAVNSVTGEKVAIKKIGNAFDNIIDAKRTLREIKLLRHMDHENVITIKDIVRPPQRDIFNDVYIVYELMDTDLQRILRSNQTLTSDQCRFLVYQLLRGLKYVHSANILHRDLRPSNVLLNSKNELKIGDFGLARTTSDTDFMTEYVVTRWYRAPELLLNCSEYTAAIDIWSVGCILGEIMTGQPLFPGKDYVHQLRLITELVGSPDNSSLGFLRSDNARRYVRQLPRYPKQQFAARFPKMPTTAIDLLERMLVFDPNRRISVDEALGHAYLSPHHDVAKEPVCSTPFSFDFEHPSCTEEHIKELIYKESVKFNPDH

SEQ ID NO: 142314 - DNA, 1092 bp, Arabidopsis thaliana
  CDS (1)..(1092)
atggagaaaagggaagatggagggatcttgacatatgatggtagatatgttatgtacaatgtactcggtaacattttcgagctatcttcaaaatacatccctcctattgaacccatcggccgaggtgcttatggtattgtctgctgtgctacaaactcagagacaaatgaagaggttgctataaagaagatagcaaacgcgtttgacaacagagttgatgctaaaagaactctccgagagatcaagctcctttcccacatggatcatgacaatgttatcaaaattaaagatataattgagctaccagagaaagaaaggttcgaagatgtatatattgtttatgagttgatggatacagatttgcaccagatcattagatccactcaaactctaactgatgaccattgtcagtacttcctttaccaaattttgagaggccttaagtacatacactctgcaaatgttcttcaccgcgatctgaaaccgagcaacttggttctgaatacgaactgtgacctgaaaatctgtgattttgggctagcaagaacgtcgaatgagacagagataatgactgagtatgttgtgacgagatggtaccgtgcacctgaattgcttctcaacagctctgaatacacaggagctattgacatttggtctgttggttgcattttcatggagatacttagaagagagacgcttttccctggtaaagattacgttcagcagctgaaacttattactgagctcttagggtcaccagatgactcggatctcgacttcttgagaagcgataatgcgcggaagtacgtaaaacaactcccacatgttcaaaaacaatcattcagagaaaagtttccaaacatttccccaatggctctagatcttgctgaaaagatgctagttttcgatccttcaaagcgcatcacagtggatgaagcattgaagcagccgtacttggcaagtctccatgagatcaacgaagaaccaacatgtcctactcctttcagctttgactttgaggagacagccttagatgaacaagacatcaaggagcttgtctggagagagtctttacacttcaagaatatgtaa

SEQ ID NO: 142315 - protein, 363 aa, Arabidopsis thaliana
MEKREDGGILTYDGRYVMYNVLGNIFELSSKYIPPIEPIGRGAYGIVCCATNSETNEEVAIKKIANAFDNRVDAKRTLREIKLLSHMDHDNVIKIKDIIELPEKERFEDVYIVYELMDTDLHQIIRSTQTLTDDHCQYFLYQILRGLKYIHSANVLHRDLKPSNLVLNTNCDLKICDFGLARTSNETEIMTEYVVTRWYRAPELLLNSSEYTGAIDIWSVGCIFMEILRRETLFPGKDYVQQLKLITELLGSPDDSDLDFLRSDNARKYVKQLPHVQKQSFREKFPNISPMALDLAEKMLVFDPSKRITVDEALKQPYLASLHEINEEPTCPTPFSFDFEETALDEQDIKELVWRESLHFKNM

SEQ ID NO: 142316 - DNA, 1086 bp, Arabidopsis thaliana
  CDS (1)..(1086)
atggcgatgctagttgatcctccaaatgggataagacaagaagggaaacattactacacgatgtggcaaacattattcgaaatcgacactaagtatgttccgattaagccgattggaagaggagcttatggtgtggtttgttcttcaatcaacagcgaaaccaatgagagagttgctattaagaagatccacaatgtgtttgagaatcgcatcgatgctttgagaacattgagagagcttaagcttttaaggcatgtgagacacgaaaacgttatctcccttaaggatgttatgctgcctactcacaggtacagcttcagagatgtttatttggtctatgagcttatggattctgatttgaatcagatcatcaaatcctctcagtctctctccgatgatcactgcaagtacttcttgtttcagttgctaagaggattgaagtatcttcactcagcaaacatccttcatcgcgatttaaagccagggaatctcttagtgaatgctaattgtgatctaaagatttgtgatttcgggcttgcgagaacttatgaacagtttatgacagagtatgtggtcactcgttggtaccgagcacctgagcttcttctctgttgtgataactacggaacctccattgatgtttggtcggtaggatgcatattcgcagagattcttggaagaaaaccgatattcccgggaacagaatgtctcaaccaactaaagctaatcataaatgttgttggtagccaacaagactgggatctccagttcatagataaccagaaagctaggagatttataaagtctcttcctttctcaaagggtactcacttttctcatatttacccgcacgcaaatccgctggcgatagatttgttacagaggatgcttgtgtttgatccaaccaagagaatatcggtcagcgatgcgcttttacacccctacatggagggactgttggaaccggaatgtaacccgtcggaaaatgttccggtcagtagtttggagatagatgagaacatggaaggagatatgatcagggagatgatgtgggaagagatgcttcattacctcccccgagcttaa

SEQ ID NO: 142317 - protein, 361 aa, Arabidopsis thaliana
MAMLVDPPNGIRQEGKHYYTMWQTLFEIDTKYVPIKPIGRGAYGVVCSSINSETNERVAIKKIHNVFENRIDALRTLRELKLLRHVRHENVISLKDVMLPTHRYSFRDVYLVYELMDSDLNQIIKSSQSLSDDHCKYFLFQLLRGLKYLHSANILHRDLKPGNLLVNANCDLKICDFGLARTYEQFMTEYVVTRWYRAPELLLCCDNYGTSIDVWSVGCIFAEILGRKPIFPGTECLNQLKLIINVVGSQQDWDLQFIDNQKARRFIKSLPFSKGTHFSHIYPHANPLAIDLLQRMLVFDPTKRISVSDALLHPYMEGLLEPECNPSENVPVSSLEIDENMEGDMIREMMWEEMLHYLPRA

SEQ ID NO: 142318 - DNA, 1731 bp, Arabidopsis thaliana
  CDS (1)..(1731)
atgggtggtggtggcaatctcgtcgacggtgttcgtcgttggcttttctttcaacgtcgtccttcttcttcttcttcttccaataatcacgatcagattcaaaatccccccaccgtttctaatcccaacgacgacgaagatttgaagaagcttaccgatccgtctaagctaagacagattaaggttcagcaacgaaatcacttacctatggagaagaagggaatacctaatgctgaattcttcacggagtatggagaagcaaatagatatcagattcaagaagtagttggcaaaggaagctatggagttgttggttctgctatagatactcacactggagaaagagttgctatcaaaaagattaacgatgtgtttgatcatatctctgatgcaaccaggattcttagggagattaagttgttacgcttgcttcttcatccagatgttgttgagattaaacatattatgcttcctccttctcgaagagagtttcgtgatgtttatgttgtctttgagttgatggaatctgatcttcatcaggttattaaagctaatgatgatttaactcctgagcatcatcagtttttcttgtatcagcttcttcgtggtttgaagtatgttcatgctgcgaatgtgtttcatcgggatttgaaaccaaagaacattcttgctaatgctgattgcaagttgaagatttgtgactttggtctagctcgtgtatcttttaatgatgcccctaccgctattttttggactgattatgttgctactcggtggtaccgtgcccctgaactctgtggatcatttttctcaaaatatacccctgcgattgatatttggagcgttggttgcatatttgctgaaatgctattagggaagccgctatttcctggcaaaaatgtggttcaccaattggatattatgaccgattttcttggcactccaccacctgaagccatatcaaagatcagaaatgataaggcgaggagatatcttggcaacatgaggaaaaaacagccagtcccattctctaaaaaattccctaaagcagatccttcggcccttcgcctgttggaacgcctgattgcctttgatccaaaagatcgtccatctgccgaagaagcattagctgatccatactttaatggtctgtcaagtaaagtgcgggaaccatcgacacagccgatttcaaagcttgaatttgagtttgagagaaagaaattgacaaaagatgatatcagagagttaatttaccgagagatattagaatatcatcctcagatgctggaggaataccttcgtggtggcaatcagctcagcttcatgtaccccagtggggtagatcgatttaggaggcagtttgctcatcttgaagaaaatcaaggtccaggaggaagaagtaacgcacttcagagacagcatgcttccttaccaagagagcgagttccagcatccaagaatgaaacagtcgaagaaagaagcaacgatatcgagagaagaacaacagctgctgtagcttcaaccttagacagtcccaaagcttcacaacaagctgaaggtacagaaaatggaggaggaggagggtatagtgcgcgtaacctgatgaaaagctctagcattagtggttctaaatgcataggtgtacaatctaaaaccaacattgaggattccatagtagaggaacaagatgagactgttgctgtgaaagttgcatctctacacaattcttag

SEQ ID NO: 142319 - protein, 576 aa, Arabidopsis thaliana
MGGGGNLVDGVRRWLFFQRRPSSSSSSNNHDQIQNPPTVSNPNDDEDLKKLTDPSKLRQIKVQQRNHLPMEKKGIPNAEFFTEYGEANRYQIQEVVGKGSYGVVGSAIDTHTGERVAIKKINDVFDHISDATRILREIKLLRLLLHPDVVEIKHIMLPPSRREFRDVYVVFELMESDLHQVIKANDDLTPEHHQFFLYQLLRGLKYVHAANVFHRDLKPKNILANADCKLKICDFGLARVSFNDAPTAIFWTDYVATRWYRAPELCGSFFSKYTPAIDIWSVGCIFAEMLLGKPLFPGKNVVHQLDIMTDFLGTPPPEAISKIRNDKARRYLGNMRKKQPVPFSKKFPKADPSALRLLERLIAFDPKDRPSAEEALADPYFNGLSSKVREPSTQPISKLEFEFERKKLTKDDIRELIYREILEYHPQMLEEYLRGGNQLSFMYPSGVDRFRRQFAHLEENQGPGGRSNALQRQHASLPRERVPASKNETVEERSNDIERRTTAAVASTLDSPKASQQAEGTENGGGGGYSARNLMKSSSISGSKCIGVQSKTNIEDSIVEEQDETVAVKVASLHNS

SEQ ID NO: 142320 - DNA, 2547 bp, Arabidopsis thaliana
  CDS (537)..(2240)
ctacaaaagtgagcaaataaacttgcctcttcgtctgcttcgtgagatttcagatcctgtaaagaaattttattagctcaaaagaatcatttttgggtttctgaaccataaaagcttctctcgactttcaaaaactctctcctttttccttttagccatttcaagcagagagattgatcgaagaagataaaaacctcgtctttcttcaatctcagtgattctcaaattacccatcgcttccttcttttgatctctttgatttcacttcaaaaagcaaagaaatctcgattaggttattccttgtttcaccccataaatttgcctccttttttttggtctcgggaactactctgatttgtttcaatcgattctggatttcgggatttggatatagagctctctgtttttgacattgcctttggaactaaaattctcagtctttgcatttttttgattcaaaagctcactaagtttgggtttcagaagctattacatttggtcttcgtaagcgtcctttgaatgccctgtagctgaagatgcagcctgatcaccgcaaaaagtcatcagttgaggtagatttcttcacggaatatggtgaaggaagcagatacagaatagaggaagtgattggtaaaggaagttatggagttgtctgttctgcttacgatacacataccggagagaaagttgcgattaagaaaatcaatgatatctttgagcatgtttcggatgcaactcgcattcttcgtgagatcaaacttcttagactcttacgccatcctgacattgttgagatcaaacacatcttgttgccgccttcaagaagagagtttcgagacatttacgtggttttcgagcttatggaatctgatttgcatcaggttattaaggcaaatgatgatttgactcctgagcattatcagtttttcctctatcagcttcttcgtggcctcaagtatatacacacagctaatgtctttcatcgggatcttaaacccaaaaacatattggcaaatgctgattgcaaactcaagatctgtgattttggacttgcaagagtcgcattcaatgatacaccgactgcgatattctggactgattatgtagctactcgatggtacagggctccagaactatgtggatcttttttctcaaagtatacaccggcaatagatatatggagcatcgggtgcatttttgcagaactcttaacagggaaacctcttttccccgggaaaaatgtggtccatcaattggatctgatgacggatatgctgggaactccatctgctgaagccattggaagggttaggaacgagaaagctcgaagatacttgagcagcatgaggaagaagaagcctattcctttttcacataagttcccacatactgatcctcttgctcttcgtcttctagaaaagatgttgtcttttgaacccaaggaccggcctacagctgaagaggcgcttgcagatgtgtacttcaagggtttagctaaggttgaaagagagccttctgctcaacctgtcacaaagttggaatttgagtttgaaaggcggaggatcacaaaagaagacgtccgagagctcatatacagagagtctctggagtaccacccaaagatgctgaaagaatacttggatggatcagagccaactaactttatgtacccgagtgcggtggaacatttcaagaaacaatttgcttacctcgaggaacactacaagaatggtacttctcataatccccctgagaggcaacagcatgcatcattaccaagggcttgcgtattgtactctgataacaatcatccggtggcacaacagagttcagctgaagtcactgatggactctccaagtgtagcattagagacgagagacctcggggtgcagacaggaatgcccagatgccaatgtcgagaattcctatcaacgtccctcaaacaatccaaggtgctgcagtagctaggcctggtaaagtagttggatcagtgttacgctataacaactgcggcgcagccacaggcgttgaagctcttgaacaacaacagagaaggatggtcagaaatccagctgctgcgtctcaatacccaaagaggactcaaccttgcaaaagcaacagaggagatgaagattgcgccaccgctgctgaaggtccaagtagattgaagccaaacactcagtatataccacaaaaagtgtctgcagcacaagatactgcaatgagtcgctggtattaaacatgatgttatggttctagttttagctttaccacctcacgtctcagggagagctaaaaagagtatccctttgagtcatccattgtgttatcaagagccgaaacgtgaagacatgcttaagagcgaaatgagagaaggaagcgtgagaagataaaagaagttcttacagatcctgtcatgtaatttgtcttcatagttttgtattcttaaaacaacctttgtttatctacgttgtaacacttacactgtctacgattcttatatcccatgaactcaatctgtttcacctaataatctgatatgcacc

SEQ ID NO: 142321 - protein, 567 aa, Arabidopsis thaliana
MQPDHRKKSSVEVDFFTEYGEGSRYRIEEVIGKGSYGVVCSAYDTHTGEKVAIKKINDIFEHVSDATRILREIKLLRLLRHPDIVEIKHILLPPSRREFRDIYVVFELMESDLHQVIKANDDLTPEHYQFFLYQLLRGLKYIHTANVFHRDLKPKNILANADCKLKICDFGLARVAFNDTPTAIFWTDYVATRWYRAPELCGSFFSKYTPAIDIWSIGCIFAELLTGKPLFPGKNVVHQLDLMTDMLGTPSAEAIGRVRNEKARRYLSSMRKKKPIPFSHKFPHTDPLALRLLEKMLSFEPKDRPTAEEALADVYFKGLAKVEREPSAQPVTKLEFEFERRRITKEDVRELIYRESLEYHPKMLKEYLDGSEPTNFMYPSAVEHFKKQFAYLEEHYKNGTSHNPPERQQHASLPRACVLYSDNNHPVAQQSSAEVTDGLSKCSIRDERPRGADRNAQMPMSRIPINVPQTIQGAAVARPGKVVGSVLRYNNCGAATGVEALEQQQRRMVRNPAAASQYPKRTQPCKSNRGDEDCATAAEGPSRLKPNTQYIPQKVSAAQDTAMSRWY

SEQ ID NO: 142322 - DNA, 1461 bp, Arabidopsis thaliana
  CDS (1)..(1461)
atgttggagaaagagtttttcacggagtatggtgaagcaagtcaatatcagatccaagaagttgttggcaaaggaagctacggagttgttgcttctgcggaatgtccacacacgggaggcaaagtagccatcaagaagatgacaaatgtgtttgaacatgtctcagatgctattcgtatcctcagagagatcaagcttctcaggcttcttcgacatcctgatatcgtggagatcaagcatatcatgcttcctccttgtcgcaaggaattcaaagatatatatgttgtttttgagttgatggagtctgatcttcaccacgttcttaaggtaaatgacgacctcactcctcagcatcatcaattcttcttgtaccaacttcttcgtggcttaaaattcatgcactcagctcatgtgttccatagagatctgaagcctaagaacatcctcgctaatgctgattgcaaaatcaagatctgtgatttaggacttgctcgtgtctcctttactgattccccttctgctgtgttttggactgactacgttgctacaagatggtaccgtgcgccagagctctgtggttccttctattctaactacacgccggcgattgacatgtggagtgttgggtgcatatttgcagagatgctaactggaaaacctttgtttcctggcaaaaacgttgtgcaccagctagaactcgtgactgatctgcttggaactccgtcgccgataactctatccaggattcggaatgagaaggctagaaagtatttgggaaacatgaggcgaaaggatcctgtacctttcacccataaattccccaatatcgatcctgtggcgctgaagttacttcagcgtttgatcgcttttgacccaaaggaccgtccctctgcagaagaggcattggctgatccgtattttcaaggattggcaaatgtggactatgaaccatcgaggcaacctatctcgaaacttgagtttgagtttgagaggaggaaattgactcgcgatgacgtgagggaactcatgtacagagagattttggagtatcatccacagatgttgcaagagtatctacaaggagaagagaacataaactctcattttctatacccaagcggagttgatcagttcaaacaagagtttgcccgactcgaagaacacaacgacgatgaagaggaacacaactccccaccacatcagagaaagtacacttcactccctagagaacgggtgtgctcatcagaagacgaaggttctgattcagttcatgctcaatcgtcttcagcttcagtggtgtttacacctccacagactccaaacacagcaactggcttatcatcacagaaggcgtcacaagtagacaaagcagcaactccggtaaaacggtctgcatgtctaatgaggagtgatagtatctgtgcttcaagatgtgttggtgtctcctctgcagtgtcatag

SEQ ID NO: 142323 - protein, 486 aa, Arabidopsis thaliana
MLEKEFFTEYGEASQYQIQEVVGKGSYGVVASAECPHTGGKVAIKKMTNVFEHVSDAIRILREIKLLRLLRHPDIVEIKHIMLPPCRKEFKDIYVVFELMESDLHHVLKVNDDLTPQHHQFFLYQLLRGLKFMHSAHVFHRDLKPKNILANADCKIKICDLGLARVSFTDSPSAVFWTDYVATRWYRAPELCGSFYSNYTPAIDMWSVGCIFAEMLTGKPLFPGKNVVHQLELVTDLLGTPSPITLSRIRNEKARKYLGNMRRKDPVPFTHKFPNIDPVALKLLQRLIAFDPKDRPSAEEALADPYFQGLANVDYEPSRQPISKLEFEFERRKLTRDDVRELMYREILEYHPQMLQEYLQGEENINSHFLYPSGVDQFKQEFARLEEHNDDEEEHNSPPHQRKYTSLPRERVCSSEDEGSDSVHAQSSSASVVFTPPQTPNTATGLSSQKASQVDKAATPVKRSACLMRSDSICASRCVGVSSAVS

SEQ ID NO: 142324 - DNA, 1812 bp, Arabidopsis thaliana
  CDS (1)..(1812)
atggagtttttcacagagtatggtgatgcaaacagatataggattctggaagttattggtaaaggaagctatggagttgtgtgtgcagctattgatacacatactggagagaaagttgctattaagaagattaatgatgtctttgaacatatttctgatgcgcttcgtattctccgtgaagtgaagcttcttcggcttttacggcatcctgatattgtggagatcaaaagcattatgctgcctccttctaagagagagtttaaagatatctatgttgtgtttgagctcatggaatcagatcttcatcaagttattaaagctaatgatgatttgactcgtgaacaccaccagtttttcctttatcagatgcttcgtgctttaaagttcatgcatacagctaatgtttatcaccgtgatcttaagccaaagaatatacttgcaaacgcaaattgcaagttgaaagtttgtgactttggattggctagagtagcgtttaatgatactcctacgacagtcttttggacggactatgttgccacaagatggtatagagcacctgagctctgtggatcattcttttcgaagtacactccagctatcgacgtttggagcattggctgcatctttgcagaggtactaacagggaagccattgtttccgggaaaaagtgttgtccatcagttggagttgattactgatcttcttggcacaccaaaatcagaaacaatttctggagttcgtaatgataaagctagaaaatacttgactgaaatgaggaagaaaaatcctgtcaccttctcgcaaaaattttccaaagcagatccattagcactccgtcttttgcagaggctgttggctttcgatccaaaggatcgaccgactcctgcagaggcattagctgatccttacttcaagggtctttctaagattgaaagagaaccttcaagtcagcaaatctcgaaaatggagtttgaatttgagaggcgaaggttgacaaaggacgacattagagaactaatatacagagaaatactggagtaccatcctcagttgctcaaggactatatgagcggatctgaggggtctaattttgtatatcctagcgccattggacatcttagacagcagttcacttacttagaggaaaatagcagtagaaatgggccggtcatacctctcgagaggaaacacgcatcactaccgcggtctacggttcactcaactgtagtccattccacctcgcaacccaacttgggtgcaacagatagtagacgtgtttctttcgagccttcaaaaaatggagcttcttctgcaggacatccatcaacttccgcgtatcctactaaatccatcggacctccaccaagagttccaccatcaggtagaccaggtcgtgttgtggaatcatctgtatcttatgagaatggcaggaacctcaaagaagcttatttcagaagcgcggtttcatctcctcattgctacttccgaccaaacaccatgacaaacccggagaaccgcaacatagaagcttcgtcttttccaccaaagccacaaaatcctgtccaccaattcagtcccactgagccaccagctgctacaactaaccaagcagacgttgagactatgaaccacccaaacccttactttcaaccacagctcccgaagacagatcaattaaacaacaacacacatatggccattgatgctaagctgttgcaggcacaatcacagtttggtccagcaggagctgcagcggttgcagtagcagcacaccggaacataggcacaattagttacagcgcagcatcatag

SEQ ID NO: 142325 - protein, 603 aa, Arabidopsis thaliana
MEFFTEYGDANRYRILEVIGKGSYGVVCAAIDTHTGEKVAIKKINDVFEHISDALRILREVKLLRLLRHPDIVEIKSIMLPPSKREFKDIYVVFELMESDLHQVIKANDDLTREHHQFFLYQMLRALKFMHTANVYHRDLKPKNILANANCKLKVCDFGLARVAFNDTPTTVFWTDYVATRWYRAPELCGSFFSKYTPAIDVWSIGCIFAEVLTGKPLFPGKSVVHQLELITDLLGTPKSETISGVRNDKARKYLTEMRKKNPVTFSQKFSKADPLALRLLQRLLAFDPKDRPTPAEALADPYFKGLSKIEREPSSQQISKMEFEFERRRLTKDDIRELIYREILEYHPQLLKDYMSGSEGSNFVYPSAIGHLRQQFTYLEENSSRNGPVIPLERKHASLPRSTVHSTVVHSTSQPNLGATDSRRVSFEPSKNGASSAGHPSTSAYPTKSIGPPPRVPPSGRPGRVVESSVSYENGRNLKEAYFRSAVSSPHCYFRPNTMTNPENRNIEASSFPPKPQNPVHQFSPTEPPAATTNQADVETMNHPNPYFQPQLPKTDQLNNNTHMAIDAKLLQAQSQFGPAGAAAVAVAAHRNIGTISYSAAS

SEQ ID NO: 142326 - DNA, 1782 bp, Arabidopsis thaliana
  CDS (1)..(1782)
atgtttcagaacatgaaagagatggagtttttcactgagtatggtgatgctaatcgttatcggattcttgaagttattgggaaaggaagctatggagttgtatgtgcagctattgatacacaaacaggagagaaagttgctattaagaagattaatgatgtttttgagcatgtctctgatgctcttcgtattctccgtgaggttaagcttctacggcttcttaggcaccctgatatagttgaaatcaaaagtatcatgcttccgccttctaagagggagtttaaagatatatatgttgtttttgagctcatggaatcagatcttcatcaagtcatcaaagctaatgatgatttgactcgtgagcatcaccagttttttctttatcagatgcttcgtgctttgaagtatatgcatacagctaatgtttaccatcgtgatcttaaacccaagaacatactggcaaatgcaaactgcaagttgaaagtctgtgactttggacttgcaagagtgtcgtttaatgatacacctacgacagtcttttggacggattatgttgccacaagatggtacagggcacctgagctctgtggatcattctgttctaagtatactccagcaattgacatttggagcattggctgcatcttcgctgaggtattaacagggaagcctttgtttccaggaaaaagtgttgtccatcagttagacttgattaccgatcttcttggcacaccaaaatcagagaccattgctggggtgcgaaatgaaaaggctagaaaatatttgaacgaaatgaggaagaaaaatcttgtccccttttcgcaaaagtttcctaacgcagatcctttagcattgcgtcttctgcaaagactgttggcttttgatccaaaggataggccgactgctgcagaggcgctggctgatccttattttaagtgccttgctaaggttgaaagagaaccctcttgtcagccgatttcgaagatggaatttgagtttgaaagaagaaggttgacaaaggatgacattagagaactaatatacagggagatactggaataccatccacagctgctcaaggattatatgaactctgaaggctcaagttttctatatcctagtgccatcggtcatttgaggaaacaatttgcgtacctagaggaaaatagtggcaaaagtgggccagtcatacctccagacaggaagcatgcttcacttccacgatctgcagttcattccagtgcagtaaactccaacgctcaacccagtttaaacgcatcagacagtcgacgtgtttctatcgaaccttcaagaaatggagtggttccatcaacttcagcatattcaactaaacctttagggcctccaccaagagtaccatcaggtaaaccaggccgtgttgtggaatcatctgtaacttatgaaaatgacagaaacctcaaagagtcgtcctatgatgcaaggacatcatattacagaagcacagtactccctccacagaccgtatctcctaactgttacttccttccaaacaccatgaatcaagagaagcgcagtggtacagaagctgcatctcagccaaaaccgcagtttgtccccacccaatgcaactctgccaaaccagctgagctgaacccaaacccttatgtccaatcacaacacaaggtgggtattgatgctaagctgttgcatgcacaatcccaatatggtcctgctggagccgccgcggttgcagtagcagcacaccggaacattggagctgttgggtatggcatgtcttag

SEQ ID NO: 142327 - protein, 593 aa, Arabidopsis thaliana
MFQNMKEMEFFTEYGDANRYRILEVIGKGSYGVVCAAIDTQTGEKVAIKKINDVFEHVSDALRILREVKLLRLLRHPDIVEIKSIMLPPSKREFKDIYVVFELMESDLHQVIKANDDLTREHHQFFLYQMLRALKYMHTANVYHRDLKPKNILANANCKLKVCDFGLARVSFNDTPTTVFWTDYVATRWYRAPELCGSFCSKYTPAIDIWSIGCIFAEVLTGKPLFPGKSVVHQLDLITDLLGTPKSETIAGVRNEKARKYLNEMRKKNLVPFSQKFPNADPLALRLLQRLLAFDPKDRPTAAEALADPYFKCLAKVEREPSCQPISKMEFEFERRRLTKDDIRELIYREILEYHPQLLKDYMNSEGSSFLYPSAIGHLRKQFAYLEENSGKSGPVIPPDRKHASLPRSAVHSSAVNSNAQPSLNASDSRRVSIEPSRNGVVPSTSAYSTKPLGPPPRVPSGKPGRVVESSVTYENDRNLKESSYDARTSYYRSTVLPPQTVSPNCYFLPNTMNQEKRSGTEAASQPKPQFVPTQCNSAKPAELNPNPYVQSQHKVGIDAKLLHAQSQYGPAGAAAVAVAAHRNIGAVGYGMS

SEQ ID NO: 142328 - DNA, 1113 bp, Arabidopsis thaliana
  CDS (1)..(1113)
atggcgactttggttgatcctcctaatgggataaggaatgaagggaagcattacttctcaatgtggcaaactctgttcgagatcgacactaagtacatgcctatcaagcctattggtcgtggagcttacggtgttgtctgctcctctgttaacagtgacaccaacgagaaagttgctatcaagaagattcacaatgtttatgagaataggatcgatgcgttgaggactcttcgggagctcaagcttctacgccatcttcgacatgagaatgtcattgctttgaaagatgtcatgatgccaattcataagatgagcttcaaggatgtttatcttgtttatgagctcatggacactgatctccaccagattatcaagtcttctcaagttcttagtaacgatcattgccaatacttcttgttccagttgcttcgagggctcaagtatattcattcagccaatatcctgcaccgagatttgaaacctggtaaccttcttgtcaacgcaaactgcgatttaaagatatgcgattttggactagcgcgtgcgagcaacaccaagggtcagttcatgactgaatatgttgtgactcgttggtaccgagccccagagcttctcctctgttgtgacaactatggaacatccattgatgtttggtctgttggttgcattttcgccgagcttcttggtaggaaaccgatattccaaggaacggaatgtcttaaccagctgaagctcattgtcaacattctcggaagccaaagagaagaagatcttgagttcatagataacccgaaagctaaaagatacattagatcacttccgtactcacctgggatgtctttatccagactttacccgggcgctcatgttttggccatcgaccttctgcagaaaatgcttgtttttgatccgtcaaagaggattagtgtctctgaagcactccagcatccatacatggcgcctctatatgacccgaatgcaaaccctcctgctcaagttcctatcgatctcgatgtagatgaggatttgagagaggagatgataagagaaatgatgtggaatgagatgcttcactaccatccacaagcttcaaccttaaacactgagctctga

SEQ ID NO: 142329 - protein, 370 aa, Arabidopsis thaliana
MATLVDPPNGIRNEGKHYFSMWQTLFEIDTKYMPIKPIGRGAYGVVCSSVNSDTNEKVAIKKIHNVYENRIDALRTLRELKLLRHLRHENVIALKDVMMPIHKMSFKDVYLVYELMDTDLHQIIKSSQVLSNDHCQYFLFQLLRGLKYIHSANILHRDLKPGNLLVNANCDLKICDFGLARASNTKGQFMTEYVVTRWYRAPELLLCCDNYGTSIDVWSVGCIFAELLGRKPIFQGTECLNQLKLIVNILGSQREEDLEFIDNPKAKRYIRSLPYSPGMSLSRLYPGAHVLAIDLLQKMLVFDPSKRISVSEALQHPYMAPLYDPNANPPAQVPIDLDVDEDLREEMIREMMWNEMLHYHPQASTLNTEL

SEQ ID NO: 142330 - DNA, 1821 bp, Arabidopsis thaliana
  CDS (1)..(1821)
atgcagcaagataatcgcaaaaagaataatctggagatggagttcttttctgactatggcgatgccaatagatttaaagttcaagaagttattggaaaaggcagttatggagttgtttgctcagctatagacactcttacgggtgagaaagtcgcgataaagaaaattcatgatatttttgagcatatttctgatgctgcgaggattctacgtgagattaaacttcttagactcctaaggcatccagatatagttgaaattaagcacattatgcttcctccttcacgaagagaattcaaagatatttatgttgtctttgagctcatggaatcggatcttcatcaagttattaaagccaatgatgatttgactagagagcattaccagtttttcctgtatcagttattgcgtgcactgaagtacattcacacagctaatgtctaccaccgagacctgaaaccaaagaacatattggcaaatgcaaactgtaaacttaagatttgtgattttggattggcaagggttgcattcaatgatacccccacaacaatcttctggactgactatgttgctaccagatggtatagagctccagagctttgtggatctttttactctaagtatacacccgcaattgacatctggagtataggctgcatttttgcggaggtgttgatgggtaaaccacttttccctggaaagaatgtggttcaccagctggatcttatgactgatctgctagggacaccttccctggacaccatctcacgggtgaggaatgagaaggcaaggaggtacttaacaagcatgaggaaaaagccacccattccgtttgcacagaaattcccaaatgcagatcctttgtctctgaagttgttggagaggcttcttgcttttgatccaaaagaccggccaactgctgaagaggcacttgctgatccatattttaagggattggcaaaagtggaaagggagccttcatgtcaacccatcacgaagatggaatttgagttcgagagaagaaaggtcactaaagaggatataagagagctaatttctagggagatacttgagtaccaccctcagctgcttaaagatcatatgaacggggctgataaagccagttttctctacccaagtgctgttgatcaatttagaagacaatttgcgcatcttgaagaaaacagtggtaaaaccggccctgtggcacctctagaaaggaaacatgcctctcttcccagatcaacggtcatacactcaaccgcagtagcacgaggaggacaaccaaaacttatgaataacacaaacacattgaaccctgaaactactcaaaacattccttttaatcatgcaacaatacaagcacaacaaagaaacctctcagcagccaaaccaagcacattcatgggcccggttgcacctttcgacaatggcagaatcagcagagatgcatatgacccgagatcattcatccggagcactaatctccccttttcacaacaatctgctgcaacagtcgccatgggaaagcagcaagagagaagaacaactatggagcctgagaagcaggcaagacaaatatctcagtataatagatatgcaccagatgtagccatcaacatagacaacaacccgtttatcatggctagaacgggaatgaacaaagccgaaaacatcagtgaccggatcataatcgacacaaatctgttacaggcaactgccggaataggagtcgcagcggcagctgcagcagctgctcctggtggttctgctcaccggaaagttggagctgttcggtacggtatgtcaaagatgtactag

SEQ ID NO: 142331 - protein, 606 aa, Arabidopsis thaliana
MQQDNRKKNNLEMEFFSDYGDANRFKVQEVIGKGSYGVVCSAIDTLTGEKVAIKKIHDIFEHISDAARILREIKLLRLLRHPDIVEIKHIMLPPSRREFKDIYVVFELMESDLHQVIKANDDLTREHYQFFLYQLLRALKYIHTANVYHRDLKPKNILANANCKLKICDFGLARVAFNDTPTTIFWTDYVATRWYRAPELCGSFYSKYTPAIDIWSIGCIFAEVLMGKPLFPGKNVVHQLDLMTDLLGTPSLDTISRVRNEKARRYLTSMRKKPPIPFAQKFPNADPLSLKLLERLLAFDPKDRPTAEEALADPYFKGLAKVEREPSCQPITKMEFEFERRKVTKEDIRELISREILEYHPQLLKDHMNGADKASFLYPSAVDQFRRQFAHLEENSGKTGPVAPLERKHASLPRSTVIHSTAVARGGQPKLMNNTNTLNPETTQNIPFNHATIQAQQRNLSAAKPSTFMGPVAPFDNGRISRDAYDPRSFIRSTNLPFSQQSAATVAMGKQQERRTTMEPEKQARQISQYNRYAPDVAINIDNNPFIMARTGMNKAENISDRIIIDTNLLQATAGIGVAAAAAAAAPGGSAHRKVGAVRYGMSKMY

SEQ ID NO: 142332 - DNA, 1131 bp, Arabidopsis thaliana
  CDS (1)..(1131)
atggcgactcctgttgatccacctaatggaattaggaatcaagggaagcattacttctcaatgtggcaaacacttttcgagatcgataccaaatacgtgcctatcaaaccgataggccgaggcgcgtacggtgtggtttgctcttcggttaacagagagagtaatgagagagtggcgatcaagaagatccacaatgtgtttgagaataggattgatgcgttgaggactcttagggagctcaagcttctacgtcatcttcgacatgagaatgtggttgctcttaaagatgtaatgatggctaatcataagagaagctttaaggatgtttatcttgtttatgagcttatggatactgatcttcatcagattattaagtcttctcaagttctaagtaatgaccattgccaatacttcttgttccagttgcttcgagggctcaagtatattcattcagcaaacattctccatcgggatctgaaacccggtaacctccttgtgaatgcaaactgcgacttaaagatatgtgactttgggctagcgaggacgagcaacaccaaaggtcagttcatgactgaatatgttgtgactagatggtaccgagcaccagagctactcctctgttgtgacaactatggaacctccattgatgtctggtcagtcggttgcatattcgccgagcttcttggaagaaaaccagtattcccgggaacagaatgtctaaaccagattaaactcatcattaacattttgggtagccagagagaggaagatctcgagtttatagataacccaaaagccaaaagatacatagaatcactcccttactcaccagggatatcattctctcgtctttacccgggtgcaaatgttttagccattgatctgcttcagaaaatgctcgttcttgacccttcgaaaaggattagtgtcacggaagcgcttcaacatccttacatggcgcctttatatgacccgagtgcaaatcctcctgctcaagttcctattgatctcgatgtagatgaagacgaggatttgggagcagagatgataagagaattaatgtggaaggaaatgattcattatcatccagaagctgctaccataaacaacaatgaggtctctgagttttga

SEQ ID NO: 142333 - protein, 376 aa, Arabidopsis thaliana
MATPVDPPNGIRNQGKHYFSMWQTLFEIDTKYVPIKPIGRGAYGVVCSSVNRESNERVAIKKIHNVFENRIDALRTLRELKLLRHLRHENVVALKDVMMANHKRSFKDVYLVYELMDTDLHQIIKSSQVLSNDHCQYFLFQLLRGLKYIHSANILHRDLKPGNLLVNANCDLKICDFGLARTSNTKGQFMTEYVVTRWYRAPELLLCCDNYGTSIDVWSVGCIFAELLGRKPVFPGTECLNQIKLIINILGSQREEDLEFIDNPKAKRYIESLPYSPGISFSRLYPGANVLAIDLLQKMLVLDPSKRISVTEALQHPYMAPLYDPSANPPAQVPIDLDVDEDEDLGAEMIRELMWKEMIHYHPEAATINNNEVSEF

SEQ ID NO: 142334 - DNA, 1113 bp, Arabidopsis thaliana
  CDS (1)..(1113)
atgaacaccggcggtggccaatacacggattttccggcggtggaaactcacggaggacagttcataagttacgatatcttcggtagtttattcgagatcacatctaagtatcgtcctccgattataccaattggtcgtggagcttatggaatcgtttgctctgtgttggatacggagacgaacgagctagtagcgatgaagaagatagctaatgcttttgataatcatatggatgctaagcgtacgcttcgtgagatcaagcttcttcgtcatcttgatcatgaaaacattatagctataagagatgttgttccaccaccactaagaagacagttcagtgatgtttatatctctactgaattaatggatactgatcttcatcaaatcatcagatctaaccagagtttatcagaagaacactgtcagtacttcttgtaccagctacttcgaggactgaagtatatccactcagctaacattattcatagggatttaaagccgagcaatcttctgttgaacgcgaattgcgatttaaagatttgtgatttcggtcttgctagacctacttcagagaatgattttatgactgagtatgttgttacgagatggtatagagcacctgagcttctgttgaactcttcagattacacagctgctattgatgtttggtctgttggttgtatctttatggagcttatgaatagaaagcctttgttccctggtaaagaccatgttcatcaaatgcgcttattgacagagttgcttggcacaccgacagaatctgatctcggttttactcacaatgaggatgcgaaaagatacatccggcaacttcccaacttcccacgtcagcccttagctaaacttttctctcatgttaacccaatggccattgatcttgttgacagaatgttgacgtttgaccccaacagaagaatcactgttgaacaagctctgaatcaccagtaccttgctaaattgcacgacccgaatgatgagccaatctgtcaaaagccattctcttttgagttcgaacaacagcctctggatgaggaacagataaaagagatgatctaccaagaagccatagcactcaatccaacatacggttag

SEQ ID NO: 142335 - protein, 370 aa, Arabidopsis thaliana
MNTGGGQYTDFPAVETHGGQFISYDIFGSLFEITSKYRPPIIPIGRGAYGIVCSVLDTETNELVAMKKIANAFDNHMDAKRTLREIKLLRHLDHENIIAIRDVVPPPLRRQFSDVYISTELMDTDLHQIIRSNQSLSEEHCQYFLYQLLRGLKYIHSANIIHRDLKPSNLLLNANCDLKICDFGLARPTSENDFMTEYVVTRWYRAPELLLNSSDYTAAIDVWSVGCIFMELMNRKPLFPGKDHVHQMRLLTELLGTPTESDLGFTHNEDAKRYIRQLPNFPRQPLAKLFSHVNPMAIDLVDRMLTFDPNRRITVEQALNHQYLAKLHDPNDEPICQKPFSFEFEQQPLDEEQIKEMIYQEAIALNPTYG

SEQ ID NO: 142336 - DNA, 1131 bp, Arabidopsis thaliana
  CDS (1)..(1131)
atgtcggcggagagttgtttcggaagctcgggtgatcaaagcagcagcaaaggagtggctactcatggtggtagctatgttcagtataatgtctatggcaatctcttcgaagtttctagaaagtatgttcctcctcttcgtcctatcggtagaggcgcttatggaattgtctgtgctgctacaaactcagagactggagaggaggtagctatcaagaagattggtaatgcttttgacaatattatcgatgctaaaaggactttgagagagattaagcttctcaagcatatggatcatgaaaatgtgattgctgtaaaggatataataaaaccaccgcagagagagaacttcaatgatgtttacattgtttatgagcttatggacactgatctccaccaaattattcgctctaaccaacccttaactgatgatcattgtcggttttttctgtatcagttgttgcgtgggctcaaatatgttcattcagctaatgtattgcatcgagatttgaaacctagcaatttgctcctgaatgcaaattgtgatctaaagcttggggatttcgggcttgcgaggaccaaatccgagactgactttatgactgaatatgttgttacacgttggtatcgagctccagagctgctacttaattgctctgaatacacagcagcaattgatatttggtctgtcggttgtatactcggtgaaacaatgacacgagagcccttgtttcccggtaaagattatgttcatcagcttagactcatcactgagcttataggatctcctgatgactcaagcttgggattcttaagaagtgacaatgcaagaagatacgttagacagcttccacagtaccctagacagaactttgctgctagattcccaaacatgtcggctggtgcagtcgatttgctggagaaaatgcttgtttttgatccaagcagacgcatcacagttgatgaggcgttgtgccacccatatttggcgccgctgcatgatatcaacgaagaaccggtatgtgtgaggccgttcaattttgatttcgagcaacctactttgacagaagagaacattaaggagcttatataccgtgaaacagtcaagttcaatcctcaagactcagtgtga

SEQ ID NO: 142337 - protein, 376 aa, Arabidopsis thaliana
MSAESCFGSSGDQSSSKGVATHGGSYVQYNVYGNLFEVSRKYVPPLRPIGRGAYGIVCAATNSETGEEVAIKKIGNAFDNIIDAKRTLREIKLLKHMDHENVIAVKDIIKPPQRENFNDVYIVYELMDTDLHQIIRSNQPLTDDHCRFFLYQLLRGLKYVHSANVLHRDLKPSNLLLNANCDLKLGDFGLARTKSETDFMTEYVVTRWYRAPELLLNCSEYTAAIDIWSVGCILGETMTREPLFPGKDYVHQLRLITELIGSPDDSSLGFLRSDNARRYVRQLPQYPRQNFAARFPNMSAGAVDLLEKMLVFDPSRRITVDEALCHPYLAPLHDINEEPVCVRPFNFDFEQPTLTEENIKELIYRETVKFNPQDSV

SEQ ID NO: 142338 - DNA, 1131 bp, Arabidopsis thaliana
  CDS (1)..(1131)
atggcgaaggaaattgaatcagcgacagatttaggtgatactaacatcaaaggagttcttgttcatggaggaagatattttcaatacaatgtttatggaaacttgtttgaagtttctaataagtatgttcctcctattcgacctattggtagaggagcttacggttttgtctgtgctgcagtagattcggagacacacgaagagattgcgataaagaagataggtaaagcctttgataataaagtagatgcaaagagaacattgagagagattaagctacttcgtcatttagaacacgagaacgttgttgttataaaagatatcattagaccaccaaagaaggaagatttcgttgatgtttatatagtttttgagttaatggatactgatcttcatcagattattcgatcaaaccaatctttgaatgatgatcattgtcagtacttcttgtatcagattctacgaggactcaaatatattcattcagcaaatgttttacatcgtgaccttaagccgagtaatttgcttttgaattcgaattgcgatcttaagattactgactttggtttggcaaggactacatcagaaacagagtatatgacagagtatgttgtaacacgatggtacagagcaccagagctgcttcttaatagttctgagtatacatctgctattgatgtatggtctgttggttgcatatttgctgagattatgacaagggaaccgcttttcccggggaaggattacgttcatcagcttaaacttatcactgagttgataggatcacctgatggagcgagtctagagtttctcagaagcgcgaacgcgagaaaatatgttaaggagctacctaagttcccaagacaaaacttttcagctaggtttcctagtatgaattctacagctatcgatctactagagaaaatgctcgtgtttgatccagtaaaacgtatcacggttgaggaagcactgtgttatccttacttgtcagctcttcacgaccttaacgacgagcctgtttgttccaaccatttcagtttccattttgaggatccgtcttccactgaagaagagataaaggagcttgtgtggctcgaatctgtgaagttcaatcctctgccgagcatttaa

SEQ ID NO: 142339 - protein, 376 aa, Arabidopsis thaliana
MAKEIESATDLGDTNIKGVLVHGGRYFQYNVYGNLFEVSNKYVPPIRPIGRGAYGFVCAAVDSETHEEIAIKKIGKAFDNKVDAKRTLREIKLLRHLEHENVVVIKDIIRPPKKEDFVDVYIVFELMDTDLHQIIRSNQSLNDDHCQYFLYQILRGLKYIHSANVLHRDLKPSNLLLNSNCDLKITDFGLARTTSETEYMTEYVVTRWYRAPELLLNSSEYTSAIDVWSVGCIFAEIMTREPLFPGKDYVHQLKLITELIGSPDGASLEFLRSANARKYVKELPKFPRQNFSARFPSMNSTAIDLLEKMLVFDPVKRITVEEALCYPYLSALHDLNDEPVCSNHFSFHFEDPSSTEEEIKELVWLESVKFNPLPSI

SEQ ID NO: 142340 - DNA, 1188 bp, Arabidopsis thaliana; identical to SEQ ID NO: 140298
  CDS (1)..(1188)

SEQ ID NO: 142341 - protein, 395 aa, Arabidopsis thaliana; identical to SEQ ID NO: 140299

SEQ ID NO: 142342 - DNA, 1107 bp, Arabidopsis thaliana
  CDS (1)..(1107)
atggcgatgttagttgagccaccaaatgggattaagcaacaagggaaacattactactccatgtggcaaacattgttcgaaatcgatacaaagtatgttccgattaaacccattggaagaggagcttatggtgtggtttgttcttctatcaatcgtgagactaatgagagagttgctattaaaaagattcacaatgtgtttgagaatcgtgttgatgctttgagaacgttgagggaacttaaacttcttaggcatgtgaggcatgagaatgtgatcgcgcttaaagatgttatgttgcctgctaatagatccagtttcaaggatgtttatttggtttatgagctaatggatactgatcttcatcagattattaaatcctctcagtctctttctgatgatcactgcaagtacttcttgtttcagttgcttagagggttgaagtatcttcattctgcaaacatacttcaccgggatttgaagcccgggaacctcttagttaatgcgaactgcgatctcaagatttgtgatttcgggttggcgagaacgagccaaggtaatgaacagttcatgactgagtatgtggttacacgttggtacagagcacctgagcttcttctttgttgtgataactatggaacctccattgatgtatggtcggttggttgcatattcgcggagattcttggtaggaaaccgatttttccaggaacagaatgcttgaatcagcttaagctaatcatcaacgttgttggtagccaacaagaatctgatattcggttcatagacaacccgaaagctcgaaggtttataaagtctcttccgtactcaagaggaactcatctctccaatctttatccacaagccaatcctctagctatagatttgttacagaggatgcttgtgtttgatccaaccaagagaatctctgtaaccgatgcgctcttacacccgtatatggcggggttgtttgatcctggatccaatccgcctgcacatgtcccaatctctctggacatagatgaaaacatggaggaaccagtgataagagagatgatgtggaatgagatgctttattaccaccctgaagctgaaatctcaaatgcctaa

SEQ ID NO: 142343 - protein, 368 aa, Arabidopsis thaliana
MAMLVEPPNGIKQQGKHYYSMWQTLFEIDTKYVPIKPIGRGAYGVVCSSINRETNERVAIKKIHNVFENRVDALRTLRELKLLRHVRHENVIALKDVMLPANRSSFKDVYLVYELMDTDLHQIIKSSQSLSDDHCKYFLFQLLRGLKYLHSANILHRDLKPGNLLVNANCDLKICDFGLARTSQGNEQFMTEYVVTRWYRAPELLLCCDNYGTSIDVWSVGCIFAEILGRKPIFPGTECLNQLKLIINVVGSQQESDIRFIDNPKARRFIKSLPYSRGTHLSNLYPQANPLAIDLLQRMLVFDPTKRISVTDALLHPYMAGLFDPGSNPPAHVPISLDIDENMEEPVIREMMWNEMLYYHPEAEISNA

SEQ ID NO: 142344 - DNA, 1710 bp, Oryza sativa subsp
  CDS (1)..(1710)
atggatttcttcagcgaatatggtgatgctaacagatacaaaatacaggaagtcattggcaaaggaagctatggtgtagtttgttcagctattgaccaacatactggcgacaaggttgcaatcaagaaaatacacaatatctttgagcacttatctgatgctgcccgaatcctccgtgagatcaaattgctccggctattacggcatcctgatatagttgagatcaagcatataatgctacctccatcaaggagggacttcaaggacatatatgttgtctttgagctgatggataccgatctccaccaagtcatcaaggcaaatgatgacttaaccaaagaacatcatcagttctttctttatcagatgcttcgtgctttgaaatatattcatactgctaatgtctatcatcgtgatttgaagccaaagaacatattggcaaacgctaactgtaaactcaaaatatgcgatttcggtctagcacgagtggcatttaatgacactcctacaacggtattctggacggattatgttgctactagatggtatagggctcctgagttgtgtggttctttctttactaagtattcaccagctattgacatatggagtattggctgcatttttgctgagattttaactgggaagcctttgtttcctggtaaaaatgtggttcaccagttggatctgatgactgatctcttgggtactccatcaatggatactgttacaaggattcggaatgagaaagcaaggaggtacttgagcagtatgaggaaaaagcagccagtacctttttctgagagattcccaaaagcagatcctgctgcactcaaacttctgcagaggcttttagcattcgacccgaaggatagaccaactgccgaagaggcgttggctgatccatattttaaaggccttgcgaaagcagagagagaaccatcatgccagccaataacaaagatggagtttgagtttgagcggagaaaggtgactaaagaggatgtgaaggaacttatattccgtgaaatactggagtatcatcctcaacttcttaaggattacatgaatggaaccgaaaaaacaaacttcctatatcctagtgcccttgacaactttcggagacaatttgctaacctggaagaaaatggagggaagaatggagatgctgttccatcagacaggaaacatgtttcgctcccaaggactactacagttcattctgctccaattcctcccaaagatcatcaaaatataacttcccaagtaccccaaaggattccaggtagaacaggacgaggggcttgccctgtaataccatttgagaatttgagtgcaatgggcccatacaatcaacgaagggtggtaaggaatccagtgcttcctccagccaccaccaacctatcagcatatgcctaccaccgtaaatcggatagctcagaaagagagctccagcaggagcttgagaaagatcgcatgcggtaccagccatcagagcatttcatggatgctaaggtggtgtcacacatgtcccatgatttgagagcttcctcttactacgtttcaaaggcgaaatctgatgtagcagacagagctgccttacaatccaacatgatgcagggaattggcccttttaatggcattgctgcagttggaggtaactacaataaagtcagtactgttcagtatggggtctcgaggatgtattag

SEQ ID NO: 142345 - protein, 569 aa, Oryza sativa subsp
MDFFSEYGDANRYKIQEVIGKGSYGVVCSAIDQHTGDKVAIKKIHNIFEHLSDAARILREIKLLRLLRHPDIVEIKHIMLPPSRRDFKDIYVVFELMDTDLHQVIKANDDLTKEHHQFFLYQMLRALKYIHTANVYHRDLKPKNILANANCKLKICDFGLARVAFNDTPTTVFWTDYVATRWYRAPELCGSFFTKYSPAIDIWSIGCIFAEILTGKPLFPGKNVVHQLDLMTDLLGTPSMDTVTRIRNEKARRYLSSMRKKQPVPFSERFPKADPAALKLLQRLLAFDPKDRPTAEEALADPYFKGLAKAEREPSCQPITKMEFEFERRKVTKEDVKELIFREILEYHPQLLKDYMNGTEKTNFLYPSALDNFRRQFANLEENGGKNGDAVPSDRKHVSLPRTTTVHSAPIPPKDHQNITSQVPQRIPGRTGRGACPVIPFENLSAMGPYNQRRVVRNPVLPPATTNLSAYAYHRKSDSSERELQQELEKDRMRYQPSEHFMDAKVVSHMSHDLRASSYYVSKAKSDVADRAALQSNMMQGIGPFNGIAAVGGNYNKVSTVQYGVSRMY

SEQ ID NO: 142346 - DNA, 1860 bp, Arabidopsis thaliana
  CDS (328)..(1860)
atgggtgctagtcacagcaccaacgttaataatcatcctcattctcggaatgcttctaatcatcctctgaccaacagtaacagcaccagctctcgtcactctgcttcatcaagtgatcgcttatctgttagtaatttacggtctcagctcacaactatttacagaaatcaggaagaagaggaagaagaagaagaagaagaagaagaggaagaagaaggaggaaaagagaaaagagcagaagaagaagcgaaaagtttctcccttgttagagattttgatttgtctggtttgaactgcattagggtttctagaaggaattatattctcatggatcctcataaaaaggttgcactggagactgagttctttacagaatacggtgaagctagccgataccaaatccaagaagttatagggaaaggaagttacggtgttgtggcatctgcaatcgacacacattcaggcgaaaaggttgccattaagaaaatcaatgatgtgtttgagcacgtctctgatgcaacgcggattctaagagagatcaagcttctcaggttgctccgccatcctgatatagtggagataaagcatgtaatgcttcctccttcacgccgtgagttcagagacatttatgttgttttcgagttgatggaatcagatcttcaccaagttatcaaggcgaacgatgatcttacacctgagcactaccagtttttcctctaccagcttcttcgtggtctgaagttcatacacacagctaatgtgtttcatcgtgatttgaagcctaaaaatattctagccaactctgattgcaagttgaagatttgcgactttgggcttgctcgagtgtcctttaatgatgcaccttcggctatattctggactgactatgttgctacaagatggtaccgtgcgccagaactttgtggctctttcttctccaaatatactcctgccattgatatatggagcataggatgcatatttgcagaaatgctcactgggaagccattgtttcctgggaagaatgtggtgcaccaattggatattatgactgatttgcttggtactcctcctcccgaagctattgcaaggattcgtaatgaaaaggcgaggagatatctcggcaatatgaggagaaaaccgccagttccattcactcacaaatttcctcatgtagacccattggcccttcgcttactgcaccgtcttcttgcatttgatcccaaagaccgtccctcagctgaagaggcactggcagatccttacttctatggtctggcaaacgttgatcgggaaccatctactcaaccgattccgaaactcgagtttgagtttgaaagaaggaagataacaaaagaagatgtgagagaattgatctacagagagatattagagtatcatcctcagatgctgcaagaatatcttcgaggtggagaacagactagcttcatgtacccaagtggtgttgatcgctttaagagacaatttgctcatcttgaggaaaattacggtaagggtgagaaaggctcacctcttcaacgccaacacgcttccttgcctagagagcgagtccctgctcctaagaaagagaatggatcacataatcacgatatcgagaacagatccatagcgtctttagtcacgaccctcgaaagccctccaacgtcacaacacgaggggtcagactacaggaatgggacgagccagacgggttacagcgctcgcagcttgctgaaaagtgccagcatcagtgcatctaaatgcattggcatgaaaccaagaaacaagtccgagtacggggaatcaaacaatgatacggttgatgctctgtctcaaaaggtcgcggctctccacacttga

SEQ ID NO: 142347 - protein, 510 aa, Arabidopsis thaliana
MDPHKKVALETEFFTEYGEASRYQIQEVIGKGSYGVVASAIDTHSGEKVAIKKINDVFEHVSDATRILREIKLLRLLRHPDIVEIKHVMLPPSRREFRDIYVVFELMESDLHQVIKANDDLTPEHYQFFLYQLLRGLKFIHTANVFHRDLKPKNILANSDCKLKICDFGLARVSFNDAPSAIFWTDYVATRWYRAPELCGSFFSKYTPAIDIWSIGCIFAEMLTGKPLFPGKNVVHQLDIMTDLLGTPPPEAIARIRNEKARRYLGNMRRKPPVPFTHKFPHVDPLALRLLHRLLAFDPKDRPSAEEALADPYFYGLANVDREPSTQPIPKLEFEFERRKITKEDVRELIYREILEYHPQMLQEYLRGGEQTSFMYPSGVDRFKRQFAHLEENYGKGEKGSPLQRQHASLPRERVPAPKKENGSHNHDIENRSIASLVTTLESPPTSQHEGSDYRNGTSQTGYSARSLLKSASISASKCIGMKPRNKSEYGESNNDTVDALSQKVAALHT

SEQ ID NO: 142348 - DNA, 1143 bp, Aspergillus clavatus
  CDS (1)..(1143)
atggctgagtttgtccgtgctgagatcctgggtactaaattcgaatacaccaccagatatgtgaacttacagcccattggtatgggatcttttggtctcgtctgctcggcgttcgatcagatcacccaacagctagttgctctcaaaaaggtcatgaaaccatttgacggctcgtctttggccaaacgtacttatcgtgagatcaagttgctcaagtacctccgccatgagaatcttatttgtttgcgcgatatctttatttctcccctcgaagacatctacattgcaaccgagctcctcgggactgatctcagtcgtctgttgagcgtgaaacccctcgacagccaattcgcgcaatactttatctaccaaatcttaagaggcttgaaatacattcactcggcgaatgtgatccaccgtgacctcaaaccaaccaacatcctcatcaacgaaaactgtgacttgaagatctgtgactttggtctcgcccgactgcaggaacctcagatgaccggctatgtttcgaccagatactaccgcgccccggaaatcatgctaacctggcagcgatacggcgtgcaggtggatatctggagcgcaggctgcatccttgccgagatgctccggggcaaaccactcttcccagggaaagatcatgttcatcagttccatttgatcacgaatattcttgggaatccccctaagtcggtgcttgagaagattactagcaagaatactatgaaattcgtccaatcattgccatcacgagagcctcgagatctgtccactatcgtcccgaaagataccgactttgatgctattgaccttctcaagaaaatgctcgtcattgaccccgacatcagagtctccgcccaagatgccctgagacatccctacctagctccataccatgaccctaccgatgaacctgtcgcggcagggccctttgactggtctttcaacaacatggaccttccgaaggagacctggaaggttatgatatactccgaggttctagactatctcagtgttgatagccctgatagcggaagcatggcgctagggggttcttctcccttcgaccaccgtgctctcgaccgggagttttccgaattcttcgacgaccgggaagggcccatgtga

SEQ ID NO: 142349 - protein, 380 aa, Aspergillus clavatus
MAEFVRAEILGTKFEYTTRYVNLQPIGMGSFGLVCSAFDQITQQLVALKKVMKPFDGSSLAKRTYREIKLLKYLRHENLICLRDIFISPLEDIYIATELLGTDLSRLLSVKPLDSQFAQYFIYQILRGLKYIHSANVIHRDLKPTNILINENCDLKICDFGLARLQEPQMTGYVSTRYYRAPEIMLTWQRYGVQVDIWSAGCILAEMLRGKPLFPGKDHVHQFHLITNILGNPPKSVLEKITSKNTMKFVQSLPSREPRDLSTIVPKDTDFDAIDLLKKMLVIDPDIRVSAQDALRHPYLAPYHDPTDEPVAAGPFDWSFNNMDLPKETWKVMIYSEVLDYLSVDSPDSGSMALGGSSPFDHRALDREFSEFFDDREGPM

SEQ ID NO: 142350 - DNA, 1137 bp, Aspergillus fumigatus
  CDS (1)..(1137)
atggctgagtttgtccgtgcggaggtcttgggtacgaagttcgaatacactacgagatatgtgaacccgcagcccattggtatggggtcttttggcctcgtctgctcggctttcgatcagataacacagcaaccagttgcattgaagaagatcatgaagcctttcgacagttcgtctctggcgaagcgtacatatcgggaaatcaggttgctgaagtatcttcgacatgagaatctcatttgcatgcgcgatatttttatatctcctttggaggacatctacatagctacagaacttctagggactgaccttgggcgccttttaagcatcaaacctcttgacagcaaattctcacaatacttcatctaccagattctacgaggcctcaaatacattcattccgctaatgtgatccaccgtgacctgaaaccaaccaatattctcatcaacgaaaactgcgatttgaagatatgcgatttcggtctcgcccggctgcaggagccccagatgaccggctacgttgcaactagatactaccgcgcccaggaaatcatgctaacatggcagagatacggtgttcaagtggacgtgtggagtgcgggctgtatccttgctgagatgctacggaggaagccgctttttcctgggaaggaccacgttcaccagttccacctcatcacaaacatccttggaaatcctcctgatgcggtgattgagaagatcaccagtaagaacactgtgaactttgtgaaatctttgccgtcacgagagcctcgagacttatcgactgtcgtccccaaagatactgatttcgatgccattgaccttctcaagaagatgctggttattgatcccgacacgagaatctccgctcaagacgctctgagatatccctacctagctccgtatcatgatcctaccgatgagcctgtagcttcagggcctttcgattggtcgttcgacagcgcagacttcccaaaggagacctggaagataatgatatattccgaggtccttgactatctcaacgtcgacaatccagccgacccagcgccgtttgatccatctactccctttgatccgagtgctcttgaacgagagttttcagagtttctcagtgattcgggccaaatctag

SEQ ID NO: 142351 - protein, 378 aa, Aspergillus fumigatus
MAEFVRAEVLGTKFEYTTRYVNPQPIGMGSFGLVCSAFDQITQQPVALKKIMKPFDSSSLAKRTYREIRLLKYLRHENLICMRDIFISPLEDIYIATELLGTDLGRLLSIKPLDSKFSQYFIYQILRGLKYIHSANVIHRDLKPTNILINENCDLKICDFGLARLQEPQMTGYVATRYYRAQEIMLTWQRYGVQVDVWSAGCILAEMLRRKPLFPGKDHVHQFHLITNILGNPPDAVIEKITSKNTVNFVKSLPSREPRDLSTVVPKDTDFDAIDLLKKMLVIDPDTRISAQDALRYPYLAPYHDPTDEPVASGPFDWSFDSADFPKETWKIMIYSEVLDYLNVDNPADPAPFDPSTPFDPSALEREFSEFLSDSGQI

SEQ ID NO: 142352 - DNA, 1191 bp, Aspergillus niger
  CDS (1)..(1191)
atggcggagttcttgcgatctcaaatcttggggactacgttcgagactaccaacagatattctgacctccagcctgttggacttggtgcattcgggcttgtctgctcggcttatgacatgattacgcgccagccagtagctatcaagaaaatgatgaagccgttctccaacgccaccctcgccaaacgcacctaccgcgaagtgaagctcctgaaacacctgcgtcatgaaaatctgattggcctgagcgacatttttatttcaccattagaggacgtttacctggtgacggatcttttggggactgacctgaaccgccttcttacctcaaagcctctggatggcaaatttgttcaatatttcacctatcagcttttgcgaggcctcaaatacatccactccgcaggcgtgatacaccgagatctcaaaccgagcaacatactgatcaacgaaaactgtgacttgaagatctgtgactttggtctagcgcgactgcaggagcctcagatgactggatatgtttcaaccagatattacagggcaccagaaatcatgttgacatggcaaaaatacggaatgcaggtggatatctggagtgctggctgcattgtcgcagagatgcttcgcggcaagccattgtttcctgggaaggatcatatcaaccaattcttcctgatcacagatgctctggggaacccacccgacgaggtcattgagaggatctgtacaaaaacaacccttgaccttgtgaaatcactgccaaagcgccagccagctccttgggcgacattgtttccagactctgatgaaaatgctattgatctccttggagagatgctcatatttgatcccgacaagcggatctctgctgcgaaagccttggaacatccttacttgagcgtatatcacgatcccactgatgagccggtcgctgaacaaatgttcgactggtctttcagtgaagtggcgcattcaatcgatgagtggaaaatcatgatatacactgaagttgtagacttccatgatattgggcctaccgaagaaccagtcatcacagagcccttcttgtctcccgatccgagtctcagccctgaggtccttgacccgcttggccagatacaaacccaaagcatggtcactaaatcagcggagaccttagaccaagatattctccagtacctccaaatttag

SEQ ID NO: 142353 - protein, 396 aa, Aspergillus niger
MAEFLRSQILGTTFETTNRYSDLQPVGLGAFGLVCSAYDMITRQPVAIKKMMKPFSNATLAKRTYREVKLLKHLRHENLIGLSDIFISPLEDVYLVTDLLGTDLNRLLTSKPLDGKFVQYFTYQLLRGLKYIHSAGVIHRDLKPSNILINENCDLKICDFGLARLQEPQMTGYVSTRYYRAPEIMLTWQKYGMQVDIWSAGCIVAEMLRGKPLFPGKDHINQFFLITDALGNPPDEVIERICTKTTLDLVKSLPKRQPAPWATLFPDSDENAIDLLGEMLIFDPDKRISAAKALEHPYLSVYHDPTDEPVAEQMFDWSFSEVAHSIDEWKIMIYTEVVDFHDIGPTEEPVITEPFLSPDPSLSPEVLDPLGQIQTQSMVTKSAETLDQDILQYLQI

SEQ ID NO: 142354 - DNA, 1248 bp, Emericella nidulans
  CDS (1)..(1248)
atggccgagttcattcgctctgatatcttgggaaccacctttgagaccaccagcagatatgcgaacttgcagcccgttggcctcggcactgcaggagttgtatgttccgcttacgacttgatctcggaacaagtggttgcgatcaagaagatgatgaagccatttcacagcacttcggttgcgaagcggacatatcgagaagtgaaacttctgaggcatcttcgacatgataatctgatcaatatgagcgatatcttcatctcgccactagaagatgtgtatcttgtcaccgaactcttagggacagatctgcacagactgctcaacggaaagccactcgaaagcaaatttgcccagtacttcacctatcaaatcctgcgcggactgaaatacatacactcagcaggcgtaatccaccgagacctcaaaccgggaaatctcctcatcaatgagaactgtgatcttaagatctgcgattttgggctggcccgtgtccaggagccgcagatgactggttatgtttcaacaagatactaccgcgcgccggagatcatgctgacatggcaacggtatgggagcaaggttgatctgtggagtgtgggctgtattcttgcggagatgttgctgggccggccgctgtttccgggcactgaccacattaaccagttctggctgattacagacctgctaggaaatccgccggacgaggtgattgaccggataacaacgaataatactcgtcgggtggtgaagtccatggccaaaaggaatccacggccgttgaaggaaatccttcccgccgctgaggacgctgcactaaaccttctcgacaacctcctcgtctttgaccctgaccgacgtatctccgccgagcaggggctcatgcacccttggatggccccctatcacgatcccacagatgaacccgtcgcaactgagcaattcgactggtcttttaatgacgctgatctacctttggatacgtggaaaattatgatctactctgaggttctcgatttcttccagctcaccacaaacgccgaacctagtggtgaacagagccagaaccagagccagagccagagccaggctttcaccagctcacaggacctacagctggcaagcatgttgaatttaggcgaaggggagcttcttccggatttcgctgcgactatcgaccccaacaaattcggctcagtggactatctcatggatggacagtcgctggaccccaattccttttcgtaa

SEQ ID NO: 142355 - protein, 415 aa, Emericella nidulans
MAEFIRSDILGTTFETTSRYANLQPVGLGTAGVVCSAYDLISEQVVAIKKMMKPFHSTSVAKRTYREVKLLRHLRHDNLINMSDIFISPLEDVYLVTELLGTDLHRLLNGKPLESKFAQYFTYQILRGLKYIHSAGVIHRDLKPGNLLINENCDLKICDFGLARVQEPQMTGYVSTRYYRAPEIMLTWQRYGSKVDLWSVGCILAEMLLGRPLFPGTDHINQFWLITDLLGNPPDEVIDRITTNNTRRVVKSMAKRNPRPLKEILPAAEDAALNLLDNLLVFDPDRRISAEQGLMHPWMAPYHDPTDEPVATEQFDWSFNDADLPLDTWKIMIYSEVLDFFQLTTNAEPSGEQSQNQSQSQSQAFTSSQDLQLASMLNLGEGELLPDFAATIDPNKFGSVDYLMDGQSLDPNSFS

SEQ ID NO: 142356 - DNA, 1239 bp, Medicago sativa
  CDS (4)..(1239)
atgatggcatcaggtggtgttgcacctgcttctggatttatagataagaatgcaagttcagttggtgttgaaaagttgcctgaggagatgaatgacatgaaaattagggatgataaggaaatggaagccgctaccattgtagatggaaatgggaccgaaaccggacatataattgtcacaaccattggtggtaaaaatggccagccaaagcagacaataagttacatggccgagcgtgttgttggacatggatcttttggtgtagtttttcaggcaaagtgtttggagactggagaaactgtggctataaagaaggttcttcaagataagaggtacaagaaccgggaattgcaaactatgcgccttctggaccaccctaatgttgtatctttgaagcactgcttcttctcaacgactgaaaaggacgagctttatcttaacctggtgcttgaatatgttcctgagactgtcagccgtgtgattagacactacaacaaaatgaatcaaagaatgcctatgatatatgtcaaactttattcttaccagatttgcagggcacttgcttatattcacaacagtattggagtatgtcacagggatattaaacctcaaaatttactggtcaatcctcacacccaccaactgaagatatgcgactttggaagtgctaaagtcttggtaaaaggtgaaccaaacatatcttacatctgttctaggtactatagagctcctgagcttatattcggtgcaactgagtacaccacagccattgacatctggtcagctggttgcgtacttggtgaacttttgcttggccagccactgtttcctggtgagagtggagtagaccaacttgtggaaattatcaaggttttaggcaccccaacaagggaagaaatcaagtgcatgaatcctaattatacagagtttaaatttcctcaaatcaaagctcatccatggcataagatttttcacaagagaatgcctcctgaagctgtggatcttgtctcaagactattgcaatactctccaaatcttcgaagcacagctttggaggctttggttcatccattctatgatgacgtgcgcgatccaaacactcggttgccaaatgggcgtttccttccaccattatttaacttcaaagtcaatgagctcaagggagtacctgcagagatgctggtgaaactggttccacctcatgcaagaaagcaatgtgccttgttcgggtcatcatga

SEQ ID NO: 142357 - protein, 411 aa, Medicago sativa
MASGGVAPASGFIDKNASSVGVEKLPEEMNDMKIRDDKEMEAATIVDGNGTETGHIIVTTIGGKNGQPKQTISYMAERVVGHGSFGVVFQAKCLETGETVAIKKVLQDKRYKNRELQTMRLLDHPNVVSLKHCFFSTTEKDELYLNLVLEYVPETVSRVIRHYNKMNQRMPMIYVKLYSYQICRALAYIHNSIGVCHRDIKPQNLLVNPHTHQLKICDFGSAKVLVKGEPNISYICSRYYRAPELIFGATEYTTAIDIWSAGCVLGELLLGQPLFPGESGVDQLVEIIKVLGTPTREEIKCMNPNYTEFKFPQIKAHPWHKIFHKRMPPEAVDLVSRLLQYSPNLRSTALEALVHPFYDDVRDPNTRLPNGRFLPPLFNFKVNELKGVPAEMLVKLVPPHARKQCALFGSS

SEQ ID NO: 142358 - DNA, 1119 bp, Nicotiana tabacum
  CDS (1)..(1119)
atggcaactccagttgagcctcctaatgggattaggaccccagggaagcattactactctatgtggcaatccctttttgaaattgatacgaaatatgtacctattaagcctattggtcgaggggcctatggaattgtttgttcttccgttaacagggaaaccaatgagaaggttgcaatcaagaaaataaacaatgcttttgagaaccgtattgatgcactgagaactttgcgtgaactaaagctccttcgccaccttagacacgaaaatgtgattgctctgaaagatgtgatgatgccaatccacagacgaagtttcaaagatgtttatttggtttacgaactaatggatactgatttacaccagataatcaaatcctctcaaacactttcaaatgatcattgccagtatttcctattccagttgcttcgaggtctgaaatatctccattctgcaaatattcttcatcgtgatttgaaacctgggaacttgcttatcaatgctaactgcgatctgaagatatgcgactttgggctggcacgcacgagcagtggcaaggaccaatttatgactgaatacgttgttacacgctggtatagggctccggaacttctcctttgctgtgacaactatggaacatctattgatgtatggtctgttggttgcattttcgcggagctcttagggaggaaacctgtctttccaggtactgaatgccttaaccaacttaaactgattatcaacatccttggcagtcagcgagaagaagatattgaatttatcgataacccaaaggcgaggaagtacatcaaatcacttccatactctcccggaacacccttttcccgtctctatccccatgctcatcctttggccatcgatctcctgcagaggatgctcgtgtttgacccttcgaaaagaattagtgttatcgaagcacttcagcatccatacatgtctcccttgtatgatccaaacactgaccccccagcacaggttcctatcaatcttgacatagatgaggacttaggggaagagacaataagggaaatgatgtggagcgaaatactcgaataccatcctgaagcggctacagctgctatggaagttgttctatga

SEQ ID NO: 142359 - protein, 372 aa, Nicotiana tabacum
MATPVEPPNGIRTPGKHYYSMWQSLFEIDTKYVPIKPIGRGAYGIVCSSVNRETNEKVAIKKINNAFENRIDALRTLRELKLLRHLRHENVIALKDVMMPIHRRSFKDVYLVYELMDTDLHQIIKSSQTLSNDHCQYFLFQLLRGLKYLHSANILHRDLKPGNLLINANCDLKICDFGLARTSSGKDQFMTEYVVTRWYRAPELLLCCDNYGTSIDVWSVGCIFAELLGRKPVFPGTECLNQLKLIINILGSQREEDIEFIDNPKARKYIKSLPYSPGTPFSRLYPHAHPLAIDLLQRMLVFDPSKRISVIEALQHPYMSPLYDPNTDPPAQVPINLDIDEDLGEETIREMMWSEILEYHPEAATAAMEVVL

SEQ ID NO: 142360 - DNA, 1182 bp, Nicotiana tabacum
  CDS (1)..(1182)
atggatggtccagctcatcaaacggacaccgtgatgtcggacgcggcgggccagcaaccagctcctccgtcgcagccggtagccggaatcgataacattccggcgacgttaagccatggcggccggtttattcaatacaatatttttggtaatatatttgaagttactgcaaagtataagccacctattatgcccatcggtaaaggagcttatggcattgtttgttctgctttgaattcggagacgaatgagcatgttgccataaagaaaatcgcgaatgcctttgataacaaaattgatgccaagagaactttgcgtgagattaagcttcttcgacatatggatcatgaaaatattgttgcgatcagagatataattccaccgcctcaaagagaagcattcaatgatgtttatattgcatatgagctcatggacactgatctccatcaaattattcgctctaatcagggattatcagaagaacattgtcagtatttcttgtatcagatcctccgtgggttgaaatacatacattctgcaaatgttttgcatagggacttgaagcctagcaatctcctcttgaatgccaattgtgatttaaagatatgtgattttgggctagctcgtgtcacttctgaaaccgactttatgaccgaatatgttgtgacaaggtggtaccgggcacctgagctgttgttaaattcatctgactatactgcagctattgatgtatggtcagtgggttgcattttcatggaattgatggacagaaagcctctgtttcctggtagagatcatgtacaccagctacgtctgcttatggagttgattggcaccccatctgaggctgaaatggagtttttgaatgagaatgcaaaacggtacatcagacaacttcctctttaccgtcgacaatcttttgtcgaaaaatttccacatgtaaaccctgctgctattgatcttgttgagaaaatgttgacatttgatcccagaagaagaattaccgttgaagatgcgcttgcacatccttacctaacatcgcttcatgatattagcgacgagcccgtttgcatgactccttttaacttcgattttgaacagcatgcccttactgaggaacaaatgaaagagctgatttacagggagggtcttgcatttaatcctgaataccagcacatgtga

SEQ ID NO: 142361 - protein, 393 aa, Nicotiana tabacum
MDGPAHQTDTVMSDAAGQQPAPPSQPVAGIDNIPATLSHGGRFIQYNIFGNIFEVTAKYKPPIMPIGKGAYGIVCSALNSETNEHVAIKKIANAFDNKIDAKRTLREIKLLRHMDHENIVAIRDIIPPPQREAFNDVYIAYELMDTDLHQIIRSNQGLSEEHCQYFLYQILRGLKYIHSANVLHRDLKPSNLLLNANCDLKICDFGLARVTSETDFMTEYVVTRWYRAPELLLNSSDYTAAIDVWSVGCIFMELMDRKPLFPGRDHVHQLRLLMELIGTPSEAEMEFLNENAKRYIRQLPLYRRQSFVEKFPHVNPAAIDLVEKMLTFDPRRRITVEDALAHPYLTSLHDISDEPVCMTPFNFDFEQHALTEEQMKELIYREGLAFNPEYQHM

SEQ ID NO: 142362 - DNA, 1116 bp, Nicotiana tabacum
  CDS (1)..(1116)
atggaaaacgaaaccaatgaaaaactggaaataaaaggaattccaacacatgaggggaaatatgtagagtacaatgtactaggtaacttctttgaggttacatcaaagtacatccctcctattcaacctgtcggccgtggcgcttacggcatggtctgctgtgctacgaattcggagacaaaggaggaggtagcaatcaaaaaaattgggaatgcatttgaaaatagaattgatgcgaaaaggacacttcgcgagatcaagcttctttcacacatggatcatgaaaatatcatcaaaataaaagatatagttagaccaccagacagagaggaattcaatgatgtgtacattgtgtatgagttaatggatactgatctgcatcagataatacgctcttcgcaggcattgacagatgatcactgccaatactttctctatcaattattacgtgggctcaagtatgtacattcagctaatgtcctccaccgggatctgaaacctagcaacttactactcaacgcaaactgtgacctcaagatttgtgattttgggctcgctagaaccacttcagaggcggattttatgacagagtatgttgtcacccgatggtatagggcaccggagttactactcaattgtactgaatatactgcagcaattgatatatggtcagttggttgcattctgatggaactcataaagagagaacctctttttccaggcagagactatgctcagcaattggggcttatcattgcgctattaggttcgccagaggattctgatcttggattcctaaggagtgacaatgctaggaagtatgtaaagcatctccctcgggttccaagacatcccttttcccagaagttcccggatgtgtcccctttagctcttgatcttgctgaaaggatgctggtttttgatccagctaaacgcataactgttgaggatgcattgaatcatccattcttgataagtctccatgagataaacgaggaacctgtttgcgattctcctttcaactttgactttgaacaagcatctctaagcgaggatgacataaaggagctcatatggaacgaggctctaaagtttgatcctaatacaatgaagtga

SEQ ID NO: 142363 - protein, 371 aa, Nicotiana tabacum; identical to SEQ ID NO: 140301

SEQ ID NO: 142364 - DNA, 1197 bp, Schizosaccharomyces pombe; identical to SEQ ID NO: 63053
  CDS (1)..(1197)

SEQ ID NO: 142365 - protein, 398 aa, Schizosaccharomyces pombe; identical to SEQ ID NO: 63054

SEQ ID NO: 142366 - DNA, 1119 bp, Schizosaccharomyces pombe
  CDS (1)..(1119)
atggcgagcgctacttccacgcctactattgcggatgggaattccaacaaggagtcagtagctacaagtcgaagcccacacacgcatgatctaaactttgagctaccagaggaatacgaaatgatcaatctcatcggtcaaggtgcttatggagttgtatgtgccgcgcttcacaaacccagcggcctaaaggtggctgttaaaaaaatacatcctttcaatcatcctgtgttttgtctaagaactttaagggaaatcaagttactcagacattttcgtcatgaaaatataatttcaattctagacatccttccaccaccgagctaccaggaattggaagatgtttatattgtacaagagcttatggaaacggatttgtaccgtgttatacgttcgcagcccttaagcgatgatcattgtcaatactttacgtatcaaattttgcgcgctctgaaagccatgcatagtgctggagttgttcatagagacctgaagccatcaaacttactactaaatgccaattgtgatctcaaagttgccgatttcggtttggcacgttccaccacagctcaaggcggaaatcctggctttatgactgagtatgtcgcaactcgttggtatcgagcaccggaaattatgctgagtttccgagaatacagcaaagctattgatttatggagtactggttgtatacttgctgagatgctttctgctcgaccattgttcccagggaaggactatcatagtcaaattactttaatccttaacattctaggaacgcctactatggacgatttttcaagaattaaatctgcacgtgcgaggaaatatattaaaagtcttccatttactcctaaagtatcattcaaagcactctttcctcaggcatcaccagatgctattgaccttttagaaaaattactgacatttaatcctgataagcgtataactgcagaagaggctctaaagcacccgtatgtagctgcttatcatgatgccagtgatgagcctacagcatcccccatgcctcccaacctcgtcgatttatactgtaacaaagaagatctcgaaataccggtattgaaggccttaatatttcgtgaagtaaatttcagataa

SEQ ID NO: 142367 - protein, 372 aa, Schizosaccharomyces pombe
MASATSTPTIADGNSNKESVATSRSPHTHDLNFELPEEYEMINLIGQGAYGVVCAALHKPSGLKVAVKKIHPFNHPVFCLRTLREIKLLRHFRHENIISILDILPPPSYQELEDVYIVQELMETDLYRVIRSQPLSDDHCQYFTYQILRALKAMHSAGVVHRDLKPSNLLLNANCDLKVADFGLARSTTAQGGNPGFMTEYVATRWYRAPEIMLSFREYSKAIDLWSTGCILAEMLSARPLFPGKDYHSQITLILNILGTPTMDDFSRIKSARARKYIKSLPFTPKVSFKALFPQASPDAIDLLEKLLTFNPDKRITAEEALKHPYVAAYHDASDEPTASPMPPNLVDLYCNKEDLEIPVLKALIFREVNFR

SEQ ID NO: 142368 - DNA, 1269 bp, Schizosaccharomyces pombe; identical to SEQ ID NO: 140304
  CDS (1)..(1269)

SEQ ID NO: 142369 - protein, 422 aa, Schizosaccharomyces pombe; identical to SEQ ID NO: 140305

SEQ ID NO: 142370 - DNA, 1215 bp, Oryza sativa
  CDS (1)..(1215)
atggaggcgccgccggggccggagcccatggagctggacgcgccaccgccccccgccgccgtggcggcggcggcggcgaccgccggcatcagcgagaagaagaaggaggagggcgggggcgacgccgtgacgggtcacatcatctccaccaccatcggcggcaagaacggcgagccgaagcggacaattagttatatggcggagcgagttgtaggaactggttctttcgggattgtgttccaggctaagtgcttggagacgggggaaacggtggccatcaagaaggtgttgcaggaccggcgttacaagaaccgtgaactgcagcttatgcgcgcaatggaacaccccaatgtcatctgcctgaagcactgcttcttctcaaccacaagcagggatgagctgttcctgaatcttgttatggagtacgtccctgagacactctaccgtgtgctcaagcactacagcaatgctaaccagcggatgccattgatctatgtgaagctttacatctatcagcttttcagagggttagcttatattcatactgttccaggagtctgccacagggatgtgaaaccacaaaatgttttggttgatcctctcactcatcaagtcaagctatgtgactttggaagtgcaaaggttctggttcctggtgaaccgaacatatcatacatttgctctcgctattatcgtgctcctgagctcatatttggtgcaaccgagtatacaacttcaattgacatatggtcagctggatgcgttcttgcagagttacttcttggtcagccactgtttcctggagagagtgctgttgaccagctagtagagataatcaaggttcttggtactccaacccgtgaggaaatacgatgcatgaaccccaactatactgagttcaaatttcctcagattaaggctcatccttggcacaagattttccacaagagaatgcctccagaagccatagaccttgcttcccgtcttctccaatattcaccaagtctacgctgcactgctcttgacgcatgtgcacattccttctttgatgagctacgagagcccaatgcacgcctgccaaatggtcgtccattccctcctctgttcaacttcaagcatgaactagccagcgcctctccagaactcatccacaggctcataccggatcatatcagacggcaacatggcctcaactttgcgcatgctgggagctaa

SEQ ID NO: 142371 - protein, 404 aa, Oryza sativa
MEAPPGPEPMELDAPPPPAAVAAAAATAGISEKKKEEGGGDAVTGHIISTTIGGKNGEPKRTISYMAERVVGTGSFGIVFQAKCLETGETVAIKKVLQDRRYKNRELQLMRAMEHPNVICLKHCFFSTTSRDELFLNLVMEYVPETLYRVLKHYSNANQRMPLIYVKLYIYQLFRGLAYIHTVPGVCHRDVKPQNVLVDPLTHQVKLCDFGSAKVLVPGEPNISYICSRYYRAPELIFGATEYTTSIDIWSAGCVLAELLLGQPLFPGESAVDQLVEIIKVLGTPTREEIRCMNPNYTEFKFPQIKAHPWHKIFHKRMPPEAIDLASRLLQYSPSLRCTALDACAHSFFDELREPNARLPNGRPFPPLFNFKHELASASPELIHRLIPDHIRRQHGLNFAHAGS

SEQ ID NO: 142372 - DNA, 1227 bp, Oryza sativa
  CDS (1)..(1227)
atgggttcagtaggggttgcgccgtctgggttaaagaacagcagtagcaccagcatgggtgctgagaagttgcctgatcagatgcatgatctgaagataagggacgataaggaagttgaagcgactattattaacggcaagggaacagaaaccggccacataattgtcacaactactggtggcagaaatggtcagccgaaacagacagttagctacatggctgagcgtattgtagggcaaggttcatttgggattgtcttccaggcaaaatgtctggagacaggtgagacagttgctatcaagaaggttcttcaggataagcgctacaagaaccgtgagcttcagaccatgcgccttcttgaccacccaaatgttgtagctctgaagcactgtttcttctctacaactgagaaggatgaactgtatctaaacttggttcttgagtatgtgcctgaaactgttcatcgtgttgtgaagcattacaacaagatgaaccagcgtatgccacttatctatgtgaagctgtatatgtaccagatttgtagggcattagcttacatccataatagcatcggagtttgccacagagatatcaagccacagaatcttctggtaaacccacatacccatcaactcaagctatgtgactttgggagtgcaaaagttctggtcaagggagaaccgaacatatcgtacatttgctcccgatactatagggctccggagctcatatttggtgccaccgaatacactacagctattgacatctggtctgctggatgtgttcttgctgaacttatgttagggcagcctctgtttcctggtgaaagtggtgtagaccaacttgtggaaatcatcaaggtccttggaacacctacaagggaggaaattaaatgcatgaatccaaactataccgagttcaagtttccacagattaaagcacacccatggcacaaggtattccataaaaggttgcctccagaagctgttgatcttgtctctaggctgctccagtactcacccaacctaagatgcactgctgtggaagcacttgttcacccattctttgatgagcttcgagaccctaatgctcgccttccgaatggccgctttttgcctcctctcttcaacttcaagcctcatgaactgaaaggaatcccatcagatattatggcgaaattgatcccagaacatgtgaagaagcaatgctcctatgcaggagtatga

SEQ ID NO: 142373 - protein, 408 aa, Oryza sativa
MGSVGVAPSGLKNSSSTSMGAEKLPDQMHDLKIRDDKEVEATIINGKGTETGHIIVTTTGGRNGQPKQTVSYMAERIVGQGSFGIVFQAKCLETGETVAIKKVLQDKRYKNRELQTMRLLDHPNVVALKHCFFSTTEKDELYLNLVLEYVPETVHRVVKHYNKMNQRMPLIYVKLYMYQICRALAYIHNSIGVCHRDIKPQNLLVNPHTHQLKLCDFGSAKVLVKGEPNISYICSRYYRAPELIFGATEYTTAIDIWSAGCVLAELMLGQPLFPGESGVDQLVEIIKVLGTPTREEIKCMNPNYTEFKFPQIKAHPWHKVFHKRLPPEAVDLVSRLLQYSPNLRCTAVEALVHPFFDELRDPNARLPNGRFLPPLFNFKPHELKGIPSDIMAKLIPEHVKKQCSYAGV

SEQ ID NO: 142374 - DNA, 1836 bp, Oryza sativa
  CDS (1)..(1836)
atgcagcaggatcagcgcaagaagagttctacagaggcggattttttcacggagtatggcgatgcaagtcgatacaagattcaggaagttattggtaagggaagctatggggtggtgtgctcagcgatagatgtccacactggagagaaagtggcaatcaagaagatacacgatatctttgaacacatatctgatgctgcacggattctccgtgagatcaagcttctgaggctgctaagacatcctgacatagttgagatcaagcacattatgttgcctccatcgaggagggatttcaaagatatttatgtagtttttgagcttatggagtctgatcttcaccaagttataaaggctaatgatgacttgacgaaggagcattatcagttctttctttaccaactactccgggctctgaaatacattcacactgctaatgtttatcaccgggacctgaagccgaagaatatattagctaattccaactgcaaactgaaaatttgtgattttggactggcgcgagttgcattcaatgatactccgacaacaatcttttggacggattatgttgcaacaagatggtacagggctccagagctctgtggatccttcttttcaaagtatacaccagccattgacatttggagcattggatgcatctttgctgaggtgctgacaggaaagcctttatttcctggtaaaaatgttgtccatcaattagatttgatgactgatcttctgggcacgccatccatggatacaatttctcgggtccggaatgacaaagcaaggaggtatctgagtagcatgagaaagaaggagccaatcctattttcgcagaagtttcctagtgcagatcctttggcgttggatcttctacaaaaactattagcattcgatccaaaggaccgtccaactgccgaagaggcattggctcatccatacttcaaagggctcgcaaaagttgagagagaaccatcctgtcaacctatcacaaaaatggagtttgagtttgagcgtagaagagtgacaaaggaagatataagagagttgatattccgtgaaatactggaataccatccacaattgctcaaagactatatcaatggcaccgagagaacaacctttctatacccaagtgctgttgatcaatttagaaagcaatttgcccatcttgaagaaaatggtggaaatggcccggtaattccaatggatagaaagcacacttctcttcccaggtctactattgttcactcaactccaattcctgccaaggaacagccccgcattggcccatcaagggataaaccatctgatgaaccctatagcaatccccgggaatttgacagattttctggcaatgccccgaggacctcacaagctccacaaagagtgccaacagcaagaccaggaagagttgttggtccagtattgccttatgaaaatggtgccacaaaggattcctatgacgcacggagattggcaatgaactcagggtatcctccccagcaacaaatccctcaagcttatggttattatcagatacccggtaagtcagcttgttctgagctgtcgcaggccgaaaggtatacgctgcaccagcaggcctacacttgcgcaaacagtgccactgtgactgatgttgctctggacatgagagcacccccgttccatctatcaggagggccgaaaagcgattcgtccgaaaggttagcagcagagacaaacctatacacgagatctctcaatggcctcgctgctactgctgcgggagtggcagcaagtgcgcacagaaaggtcggtgttgttccctacggcatgtcgaggatgtattag

SEQ ID NO: 142375 - protein, 611 aa, Oryza sativa
MQQDQRKKSSTEADFFTEYGDASRYKIQEVIGKGSYGVVCSAIDVHTGEKVAIKKIHDIFEHISDAARILREIKLLRLLRHPDIVEIKHIMLPPSRRDFKDIYVVFELMESDLHQVIKANDDLTKEHYQFFLYQLLRALKYIHTANVYHRDLKPKNILANSNCKLKICDFGLARVAFNDTPTTIFWTDYVATRWYRAPELCGSFFSKYTPAIDIWSIGCIFAEVLTGKPLFPGKNVVHQLDLMTDLLGTPSMDTISRVRNDKARRYLSSMRKKEPILFSQKFPSADPLALDLLQKLLAFDPKDRPTAEEALAHPYFKGLAKVEREPSCQPITKMEFEFERRRVTKEDIRELIFREILEYHPQLLKDYINGTERTTFLYPSAVDQFRKQFAHLEENGGNGPVIPMDRKHTSLPRSTIVHSTPIPAKEQPRIGPSRDKPSDEPYSNPREFDRFSGNAPRTSQAPQRVPTARPGRVVGPVLPYENGATKDSYDARRLAMNSGYPPQQQIPQAYGYYQIPGKSACSELSQAERYTLHQQAYTCANSATVTDVALDMRAPPFHLSGGPKSDSSERLAAETNLYTRSLNGLAATAAGVAASAHRKVGVVPYGMSRMY

SEQ ID NO: 142376 - DNA, 1506 bp, Oryza sativa
  CDS (1)..(1506)
atggatgctaagaagggctcgggggagccggagttcttcagcgagtacggcgatgcgagccggtacgaggtcaccgaggtggtcggcaagggcagctacggcgtggtggccgccgccgtcgacactcacaccggcgggcgcgtcgccatcaagaagatcaacgacgtcttcgagcacatctccgacgccacccgcatcctccgcgagatcaagctactccgcctcctgcgccacccggacatcgtcgagatcaagcacatcatgctcccaccctcccgccgcgagtttcgcgacatttacattatcttcgaactcatggagtccgatctccaccaggtcatcaaggccaacgacgacctcacccccgagcaccaccagttcttcctctaccagctgcttcgtgggatgaagtacattcatgccgccagcgtcttccaccgggacctcaagcccaagaacattcttgccaatgctgattgcaaggtcaagatttgtgacttcggccttgctcgagtgtccttcgacgacactccgtccgcgatattctggacggattacgtggcaacaagatggtatcgcgctccagagttgtgcggctctttcttttcaaagtacactcctgcaattgatatttggagcgtcggttgtatatttgctgaaatgcttatgggaaagccactttttcctggaaagaatgtggtacatcaattggatctcatgaccgacttacttggctctccttcaggagaaactatttccaggattcggaatgagaaagctcgacgatatttgggcaacatgagaaaaaagcctcgagtgcctttttctcagaaatttcctggtgcagacccaatggctctccatttgcttgaacggttacttgcttttgatcccaaggatcggccaactgctgcagaggccttaacagatccatactttactggattggcaaattcggaacgtgaacccatagcacaacccatctcaaaactcgagtttgagtttgagagaaggaagctagcaaaagatgatgtccgggaattaatttacagagagatattagagtaccatcctcagatgatgcagaaatatcttcgtggtggggatcagtcaaactttttgtaccccagtggggtggatcgttttaagaggcaatttgctcatctagaagaaggtgttgctcagggtgacaagactagcccgcagctaaggcagcatgtttctttaccaagggaaagagttgttaggaatggtgatgaacctgatccaactgcagattactgcataaagttgcatgtaggtgagcaaccggggcactcatcagtgacagatggactgaacaagccactcttaagtgctcgtaacttcctgaagagcgaaagcatcggtgcttcccagtgtgttgtcataaaagaaaagcgagaaaaagatgaagaatctatgtcagaatatatgaatgaagcagctgatggggtgccgcataagattgctcaattgaaaacataa

SEQ ID NO: 142377 - protein, 501 aa, Oryza sativa
MDAKKGSGEPEFFSEYGDASRYEVTEVVGKGSYGVVAAAVDTHTGGRVAIKKINDVFEHISDATRILREIKLLRLLRHPDIVEIKHIMLPPSRREFRDIYIIFELMESDLHQVIKANDDLTPEHHQFFLYQLLRGMKYIHAASVFHRDLKPKNILANADCKVKICDFGLARVSFDDTPSAIFWTDYVATRWYRAPELCGSFFSKYTPAIDIWSVGCIFAEMLMGKPLFPGKNVVHQLDLMTDLLGSPSGETISRIRNEKARRYLGNMRKKPRVPFSQKFPGADPMALHLLERLLAFDPKDRPTAAEALTDPYFTGLANSEREPIAQPISKLEFEFERRKLAKDDVRELIYREILEYHPQMMQKYLRGGDQSNFLYPSGVDRFKRQFAHLEEGVAQGDKTSPQLRQHVSLPRERVVRNGDEPDPTADYCIKLHVGEQPGHSSVTDGLNKPLLSARNFLKSESIGASQCVVIKEKREKDEESMSEYMNEAADGVPHKIAQLKT

SEQ ID NO: 142378 - DNA, 1239 bp, Oryza sativa
  CDS (1)..(1239)
atggatgctaagaagggctcgggggagccggagttcttcagcgagtacggcgatgcgagccggtacgaggtcaccgaggtggtcggcaagggcagctacggcgtggtggccgccgccgtcgacactcacaccggcgggcgcgtcgccatcaagaagatcaacgacgtcttcgagcacatctccgacgccacccgcatcctccgcgagatcaagctactccgcctcctgcgccacccggacatcgtcgagatcaagcacatcatgctcccaccctcccgccgcgagtttcgcgacatttacattatcttcgaactcatggagtccgatctccaccaggtcatcaaggccaacgacgacctcacccccgagcaccaccagttcttcctctaccagctgcttcgtgggatgaagtacattcatgccgccagcgtcttccaccgggacctcaagcccaagaacattcttgccaatgctgattgcaaggtcaagatttgtgacttcggccttgctcgagtgtccttcgacgacactccgtccgcgatattctggacggattacgtggcaacaagatggtatcgcgctccagagttgtgcggctctttcttttcaaagtacactcctgcaattgatatttggagcgtcggttgtatatttgctgaaatgcttatgggaaagccactttttcctggaaagaatgtggtacatcaattggatctcatgaccgacttacttggctctccttcaggagaaactatttccaggattcggaatgagaaagctcgacgatatttgggcaacatgagaaaaaagcctcgagtgcctttttctcagaaatttcctggtgcagacccaatggctctccatttgcttgaacggttacttgcttttgatcccaaggatcggccaactgctgcagaggccttaacagatccatactttactggattggcaaattcggaacgtgaacccatagcacaacccatctcaaaactcgagtttgagtttgagagaaggaagctagcaaaagatgatgtccgggaattaatttacagagagatattagagtaccatcctcagatgatgcagaaatatcttcgtggtggggatcagtcaaactttttgtaccccagtggggtggatcgttttaagaggcaatttgctcatctagaagaaggtgttgctcagggtgacaagactagcccgcagctaaggcagcatgtttctttaccaaggcaataa

SEQ ID NO: 142379 - protein, 412 aa, Oryza sativa
MDAKKGSGEPEFFSEYGDASRYEVTEVVGKGSYGVVAAAVDTHTGGRVAIKKINDVFEHISDATRILREIKLLRLLRHPDIVEIKHIMLPPSRREFRDIYIIFELMESDLHQVIKANDDLTPEHHQFFLYQLLRGMKYIHAASVFHRDLKPKNILANADCKVKICDFGLARVSFDDTPSAIFWTDYVATRWYRAPELCGSFFSKYTPAIDIWSVGCIFAEMLMGKPLFPGKNVVHQLDLMTDLLGSPSGETISRIRNEKARRYLGNMRKKPRVPFSQKFPGADPMALHLLERLLAFDPKDRPTAAEALTDPYFTGLANSEREPIAQPISKLEFEFERRKLAKDDVRELIYREILEYHPQMMQKYLRGGDQSNFLYPSGVDRFKRQFAHLEEGVAQGDKTSPQLRQHVSLPRQ

SEQ ID NO: 142380 - DNA, 1773 bp, Oryza sativa
  CDS (1)..(1773)
atggcgatgcagacgatgcagacggagcagcagcagcagcagcggaggaagggttcgccagagatggatttcttcagcgaatatggtgatgctaacagatacaaaatacaggaagtcattggcaaaggaagctatggtgtagtttgttcagctattgaccaacatactggcgacaaggttgcaatcaagaaaatacacaatatctttgagcacttatctgatgctgcccgaatcctccgtgagatcaaattgctccggctattacggcatcctgatatagttgagatcaagcatataatgctacctccatcaaggagggacttcaaggacatatatgttgtctttgagctgatggataccgatctccaccaagtcatcaaggcaaatgatgacttaaccaaagaacatcatcagttctttctttatcagatgcttcgtgctttgaaatatattcatactgctaatgtctatcatcgtgatttgaagccaaagaacatattggcaaacgctaactgtaaactcaaaatatgcgatttcggtctagcacgagtggcatttaatgacactcctacaacggtattctggacggattatgttgctactagatggtatagggctcctgagttgtgtggttctttctttactaagtattcaccagctattgacatatggagtattggctgcatttttgctgagattttaactgggaagcctttgtttcctggtaaaaatgtggttcaccagttggatctgatgactgatctcttgggtactccatcaatggatactgttacaaggattcggaatgagaaagcaaggaggtacttgagcagtatgaggaaaaagcagccagtacctttttctgagagattcccaaaagcagatcctgctgcactcaaacttctgcagaggcttttagcattcgacccgaaggatagaccaactgccgaagaggcgttggctgatccatattttaaaggccttgcgaaagcagagagagaaccatcatgccagccaataacaaagatggagtttgagtttgagcggagaaaggtgactaaagaggatgtgaaggaacttatattccgtgaaatactggagtatcatcctcaacttcttaaggattacatgaatggaaccgaaaaaacaaacttcctatatcctagtgcccttgacaactttcggagacaatttgctaacctggaagaaaatggagggaagaatggagatgctgttccatcagacaggaaacatgtttcgctcccaaggactactacagttcattctgctccaattcctcccaaagatcatcaaaatataacttcccaagtaccccaaaggattccaggtagaacaggacgaggggcttgccctgtaataccatttgagaatttgagtgcaatgggcccatacaatcaacgaagggtggtaaggaatccagtgcttcctccagccaccaccaacctatcagcatatgcctaccaccgtaaatcggatagctcagaaagagagctccagcaggagcttgagaaagatcgcatgcggtaccagccatcagagcatttcatggatgctaaggtggtgtcacatatgtcccatgatttgagagcttcctcttactacgtttcaaaggcgaaatctgatgtagcagacagagctgccttacaatccaacatgatgcagggaattggcccttttaatggcattgctgcagttggaggtaactacaataaagtcagtactgttcagtatggggtctcgaggatgtattag

SEQ ID NO: 142381 - protein, 590 aa, Oryza sativa
MAMQTMQTEQQQQQRRKGSPEMDFFSEYGDANRYKIQEVIGKGSYGVVCSAIDQHTGDKVAIKKIHNIFEHLSDAARILREIKLLRLLRHPDIVEIKHIMLPPSRRDFKDIYVVFELMDTDLHQVIKANDDLTKEHHQFFLYQMLRALKYIHTANVYHRDLKPKNILANANCKLKICDFGLARVAFNDTPTTVFWTDYVATRWYRAPELCGSFFTKYSPAIDIWSIGCIFAEILTGKPLFPGKNVVHQLDLMTDLLGTPSMDTVTRIRNEKARRYLSSMRKKQPVPFSERFPKADPAALKLLQRLLAFDPKDRPTAEEALADPYFKGLAKAEREPSCQPITKMEFEFERRKVTKEDVKELIFREILEYHPQLLKDYMNGTEKTNFLYPSALDNFRRQFANLEENGGKNGDAVPSDRKHVSLPRTTTVHSAPIPPKDHQNITSQVPQRIPGRTGRGACPVIPFENLSAMGPYNQRRVVRNPVLPPATTNLSAYAYHRKSDSSERELQQELEKDRMRYQPSEHFMDAKVVSHMSHDLRASSYYVSKAKSDVADRAALQSNMMQGIGPFNGIAAVGGNYNKVSTVQYGVSRMY

SEQ ID NO: 142382 - DNA, 1131 bp, Oryza sativa; identical to SEQ ID NO: 63055
  CDS (1)..(1131)

SEQ ID NO: 142383 - protein, 376 aa, Oryza sativa; identical to SEQ ID NO: 63056

SEQ ID NO: 142384 - DNA, 1521 bp, Oryza sativa
  CDS (1)..(1521)
atggagttctttacggaatacggggaggcaagccaatatcagattcaagaggtcgttggcaagggaagctatggagtagttgctgctgcagtagatactcacactggggagagagttgcaatcaagaagatcaatgatgtttttgagcatgtttcagatgccatccgcattctgcgggaaatcaaagttcttcggcttctccgccacccagacattgttgtgatcaagcacatcatgctccctcctacccgaagggagttcagggatatttatgttgtttttgaactcatggagtcagatctacatcaagttatcgaagcaaatcatgaccttagcccagagcatcaccgttttttcttgtaccaacttctttgtgctctcaagtacatacattcagctaatgtatttcatcgtgacttaaagccaaagaacatactggccaattcagactgcaaactgaagatttgtgattttggacttgcacgtgtagcatttaatgattcaccttcaacaattttttggaccgattatgtggcaacaaggtggtaccgagctcctgaattatgtggttcttttttctccaaatacacccctgcaattgatatttggagtatagggtgcatttttgctgaaattctcaccggaagaccattatttcctgggaggaatgttgtgcaccagttagatctaataacagatctacttggaactccatcatctgaaactttatcacggattcgtaatgagaatgccaggggatatttaactggcatgcagaggaaacatcctatccccttttctcataagtttcataatgctgatcctctcgctttgcgcctgctagagcgtttacttgcatttgatcctaaagatcgacctactgctgaagaggctttagctgatccatattttagaggaatttctaagttgagccgggagccttcaagactgccagtttcaaaatttgagtttgaatttgagcgaaggaaactgacaaaggatgatgtaagagaaatgatatatcgagagatattagagtaccatccccaaatgcttcaggagtacatcagaggtggagaacaaattagcttcctctatccaagtggggttgatcgtttcaaacggcagtttgctcatcttgaggagaactacagcagaggagaaagaagtacccccttgcggagacagcatgcgtctttgccaagggaaagagtatgctcatcagtagatagcaataatcaagactctgacaatgaagagaggagagcgatatcttctattgcccgaactatgataagtcccccaagatcacaagaaaagggcaagaatcgtgcatctgcttatccaaatggcataatcaatctaaactccaatcctaagatctatttaaagagtgctagtatcagtgcttcaacgtgcatcattagagggaataaaggcccgaaggagaatggtatctctgaggacatggaagaggttgtctatgagttgtcagataatgtgaccaggatgctctcctag

SEQ ID NO: 142385 - protein, 506 aa, Oryza sativa
MEFFTEYGEASQYQIQEVVGKGSYGVVAAAVDTHTGERVAIKKINDVFEHVSDAIRILREIKVLRLLRHPDIVVIKHIMLPPTRREFRDIYVVFELMESDLHQVIEANHDLSPEHHRFFLYQLLCALKYIHSANVFHRDLKPKNILANSDCKLKICDFGLARVAFNDSPSTIFWTDYVATRWYRAPELCGSFFSKYTPAIDIWSIGCIFAEILTGRPLFPGRNVVHQLDLITDLLGTPSSETLSRIRNENARGYLTGMQRKHPIPFSHKFHNADPLALRLLERLLAFDPKDRPTAEEALADPYFRGISKLSREPSRLPVSKFEFEFERRKLTKDDVREMIYREILEYHPQMLQEYIRGGEQISFLYPSGVDRFKRQFAHLEENYSRGERSTPLRRQHASLPRERVCSSVDSNNQDSDNEERRAISSIARTMISPPRSQEKGKNRASAYPNGIINLNSNPKIYLKSASISASTCIIRGNKGPKENGISEDMEEVVYELSDNVTRMLS

SEQ ID NO: 142386 - DNA, 1113 bp, Oryza sativa; identical to SEQ ID NO: 63059
  CDS (1)..(1113)

SEQ ID NO: 142387 - protein, 370 aa, Oryza sativa; identical to SEQ ID NO: 63060

SEQ ID NO: 142388 - DNA, 1206 bp, Oryza sativa
  CDS (1)..(1206)
atggccacgctgccgggcgggccccaccccaccggaggcggcgccgcggcggacccgatgcaggtcgaccagccgcgctccgccgcggccgccgcagcggtcgcccccgccggtgaaaagcacggtgcttctcttatggaagggagtgatcctgtcaccggccacataatctccacaacgattggagggaagaatggagaacctaaaaggacgattagctacatggcagaacgagttgtgggaactggatcatttggaatcgtctttcaggcaaaatgtttggagactggtgagactgtcgccattaagaaggttttacaggacaagcgttacaagaacagggagttgcagattatgcgatcaatggatcattgcaatgttgtttctttgaagcattgcttcttctctacaacaagcagagatgaacttttccttaacctggtcatggaatttgttcctgagtcactgtatcgtgtgttgaagcattatagcaacatgaaccaaaggatgccacttatatatgtcaaattgtatgtttaccagatattccgtggtttggcttacattcatactgtacctggagtttgccacagggatgtgaagcctcagaatcttttggtcgatcctcttactcaccaagtcaaaatatgtgattttgggagcgcaaaaatgttggttaaaggtgaagcaaacatatcgtatatatgttcacgttattaccgtgctccagaactgatatttggggcaaccgaatacacgacatcaattgatatatggtcagctgggtgtgttcttgctgagttgctccttggccagcctctctttcctggtgaaagtgcagtggatcagcttgtcgagattataaaggttcttggtactccaacacgtgaggaaatccgctgcatgaatcccaactacacagaattcagatttcctcagattaaagctcacccatggcacaagattttccacaagcggatgcctccagaagcaattgaccttgcatcacgtcttctccagtatgcaccaaatctacgatgcactgccctcgaagcatgtgcacattcattctttgatgaattgcgagaaccccacgcaaggttgccaaatggacgtccattccccccactgttcaactttaagcaagaactagcgaatttatcgccagagctcatcaacaggttgataccagagcatgctcggtga

SEQ ID NO: 142389 - protein, 401 aa, Oryza sativa
MATLPGGPHPTGGGAAADPMQVDQPRSAAAAAAVAPAGEKHGASLMEGSDPVTGHIISTTIGGKNGEPKRTISYMAERVVGTGSFGIVFQAKCLETGETVAIKKVLQDKRYKNRELQIMRSMDHCNVVSLKHCFFSTTSRDELFLNLVMEFVPESLYRVLKHYSNMNQRMPLIYVKLYVYQIFRGLAYIHTVPGVCHRDVKPQNLLVDPLTHQVKICDFGSAKMLVKGEANISYICSRYYRAPELIFGATEYTTSIDIWSAGCVLAELLLGQPLFPGESAVDQLVEIIKVLGTPTREEIRCMNPNYTEFRFPQIKAHPWHKIFHKRMPPEAIDLASRLLQYAPNLRCTALEACAHSFFDELREPHARLPNGRPFPPLFNFKQELANLSPELINRLIPEHAR

SEQ ID NO: 142390 - DNA, 1110 bp, Oryza sativa; identical to SEQ ID NO: 63057
  CDS (1)..(1110)

SEQ ID NO: 142391 - protein, 369 aa, Oryza sativa; identical to SEQ ID NO: 63058

SEQ ID NO: 142392 - DNA, 1305 bp, Oryza sativa
  CDS (1)..(1305)
atggaaaggtacaaagtgataagggagataggcgatggcacctgtgggaatgtttttagggcttataacactgaaacaaatgaaattgttgcagttaaaaaaatgaagaggaagtttttccaatgggaagagtgcattagtctgcgagaggtgaaggcacttcaaaaactgaatcatcccaacattgtgaagttaaaggaggtgactatggaaaatcacgagttgttcttcatttttgaaaacatggaatgcaatttgtatgatgtcataagagaaaggcaagctgctttctcagaagaggagatacggaactttatggtgcagatactgcaaggtcttgcatatatgcataacaacggttatttccatcgtgacctgaaacctgaaaatctgttggtgacagatggcactgttaaaattgctgactttgggttggcaagagaagtatcttccagtcctccttatactgactatgtttccaccagatggtatcgagctccagaggtgctgctacaatcgtcagcttacacacctgctattgatatgtgggctgttggtgcaattttggctgagcttttcacactgtctccacttttccctggtggaagcgagactgatcagctatacaaaatatgtgctgtgcttgggacaccggatcatactgtctggccagagggaatgaacctgcctcgttcaagcagctttaattttttccagatcccaccaagaaatctatgggagcttattcctaatgctactttggaagctatcgacttgattcagcaactttgttcctgggatccacgaagaaggccaactgctgagcaatcactacagcatccgttctttaatgtgggcaactgggtaccaaggccactccatgcctctcacacaaagacaattgaaactagaccgaatccaaggttggaactgaacctgtgggattttggtacagaacctgaggacaactaccttgatttaactctgagtctaaagccaagttttcctggaacagatttttctaacaatgttccagagcatacaaaagaggaaattctgctgtacccaggatttgaaaatcctcctgtgcagtcagcagggttttggcctctcgttgcatcagaccggccaatgggcgatgttccagccatgtcatcctggccacaggcatatgtggttgacggccaagccacacttccagctgttggattctctggttctccattcggtttgtcccccttacaaccaaatctgtttgagaaccgttcgttcgcaacacccatccggcaggtcaatttcttctga

SEQ ID NO: 142393 - protein, 434 aa, Oryza sativa
MERYKVIREIGDGTCGNVFRAYNTETNEIVAVKKMKRKFFQWEECISLREVKALQKLNHPNIVKLKEVTMENHELFFIFENMECNLYDVIRERQAAFSEEEIRNFMVQILQGLAYMHNNGYFHRDLKPENLLVTDGTVKIADFGLAREVSSSPPYTDYVSTRWYRAPEVLLQSSAYTPAIDMWAVGAILAELFTLSPLFPGGSETDQLYKICAVLGTPDHTVWPEGMNLPRSSSFNFFQIPPRNLWELIPNATLEAIDLIQQLCSWDPRRRPTAEQSLQHPFFNVGNWVPRPLHASHTKTIETRPNPRLELNLWDFGTEPEDNYLDLTLSLKPSFPGTDFSNNVPEHTKEEILLYPGFENPPVQSAGFWPLVASDRPMGDVPAMSSWPQAYVVDGQATLPAVGFSGSPFGLSPLQPNLFENRSFATPIRQVNFF

SEQ ID NO: 142394 - DNA, 1629 bp, Oryza sativa
  CDS (1)..(1629)
atggattttttcaccgagtacggtgagggaaacaggtacaagatagaagaggttataggaaaagggagttatggtgtggtttgctctgctttggacactcacaccggtgataaagttgctatcaagaaaatcaatgacatctttgagcatgtgtccgatgcaacacggatacttcgcgagatcaagttgcttagactcctgcgacatccggatatcgtggaaattaagcatattctacttcctccatcaaggagagaattcaaggatatctacgttgtttttgaactcatggagtctgatttgcaccaagttataaaggccaacgatgacttgactcctgaacactaccagtttttcttgtatcagttgctccgaggactgaaatatatacacacagcaaatgtatttcatcgagatctcaaaccaaaaaatatcttggcgaatgctgattgtaagctcaaaatatgtgatttcggccttgcaagggtagcttttagtgatactccaaccgccatcttctggacggattatattgcaacaaggtggtaccgagcaccagagctgtgtggatcttttttctccaagtatacaccagcaatagatatatggagtattggctgcatatttgccgagcttttaaccggaaaacctcttttccctgggaagaatgtggttcatcaacttgatataattacagatctactaggaacaccttctccagaaacaatatctaggattagaaatgagaaggcaagacgttacttgaacagtatgaggcggaaaaaacctataccatttacacagaagttcccaaatgcagatccacttgcaatgcggttgttagagagaatgttagcttttgatccaaaagatcggccaagtgctgaggaggcgcttgctgatccttatttcaagaacatagccaatgttgatagagagccttctgctcaacctatcacaaagctagagtttgagttcgagaggcggagaattactaaggaagatataagggaactcatatatagagaaattctggagtatcatccaaagatgctgagggagttccttgagggaactgagtccactggtttcatgtacccaagtgcagtagaccattttaaaaaacagtttgcataccttgaagaacattatgccaagggatcaacagcagctccacctgagagacaacataactcattaccaaggccttgtgttgtctattcagataaccggccacaaagcacagccagtgtcactgaggatctttccaggtgtttaatcagagacaacaatctaaaatcacaggattctgcttcagtcggtgcaagcagaatccctcaaggtgctgctgcaagacctggtaaagcagttggttcggtgctgcgttacggtaactgttcgacatccgctgctgagcaacaatatgagcagcgaagggttgttcggaacccagcaattgctccaaacagcagtgttcctctggggagctcataccccagaagaaaccagacctgcaagagtgaaacaggtgatgttgaaaggatcgattccagccaaaccggtccaccgaagccatatgtggcgaacaaactgcctgctaccgtcgatggtcggagtggccactggtaa

SEQ ID NO: 142395 - protein, 542 aa, Oryza sativa
MDFFTEYGEGNRYKIEEVIGKGSYGVVCSALDTHTGDKVAIKKINDIFEHVSDATRILREIKLLRLLRHPDIVEIKHILLPPSRREFKDIYVVFELMESDLHQVIKANDDLTPEHYQFFLYQLLRGLKYIHTANVFHRDLKPKNILANADCKLKICDFGLARVAFSDTPTAIFWTDYIATRWYRAPELCGSFFSKYTPAIDIWSIGCIFAELLTGKPLFPGKNVVHQLDIITDLLGTPSPETISRIRNEKARRYLNSMRRKKPIPFTQKFPNADPLAMRLLERMLAFDPKDRPSAEEALADPYFKNIANVDREPSAQPITKLEFEFERRRITKEDIRELIYREILEYHPKMLREFLEGTESTGFMYPSAVDHFKKQFAYLEEHYAKGSTAAPPERQHNSLPRPCVVYSDNRPQSTASVTEDLSRCLIRDNNLKSQDSASVGASRIPQGAAARPGKAVGSVLRYGNCSTSAAEQQYEQRRVVRNPAIAPNSSVPLGSSYPRRNQTCKSETGDVERIDSSQTGPPKPYVANKLPATVDGRSGHW

SEQ ID NO: 142396 - DNA, 1779 bp, Oryza sativa
  CDS (1)..(1779)
atgcctgaggcaaatgcgggtgggcgggcggcgccggcggcggagcagcggagcaagaacacaacagagatggatttcttcagtgaatatggtgactccagccgatacaaaattcaagaaatcgttggtaaaggaagttatggagttgtttgttcagctattgaccaacataccggtgacaaagtagcaatcaagaaaatacacaatatctttgagcatctatctgatgctgctaggatcctccgtgagatcaaacttctccggcttttacggcatcctgatattgtcgagatcaaacatataatgttacctccatctagaagggacttcaaagatatttatgttgtcttcgaactgatggatacagacctccaccaggttattaaggctaatgatgacttaacgaaggaacatcatcagttctttctgtatcaaatgcttcgagcattgaaatatatccatactgctaatgtttatcatcgtgatttaaagcccaaaaatatattagcaaatgctaactgtaagctcaagatatgtgattttggactagcaagagttgcatttaatgacactcctacaacagttttctggacggactacgttgcaactagatggtacagggctcctgagctgtgtgggtctttcttttctaagtattcaccagctatagatacatggagtattggttgcatttttgcggagattttgactggaaaacctttgttccctggtaaaaatgtggttcatcaattggacttgatgactgatctcttgggtacaccatcaatggatgctatttcaaggattcggaatgacaaggcaaggaggtatctgagcagcatgaggaggaagcagccagtacctttttcagaaaagttcccaaatgtagatcctttggcactcaagctcttacaaaggcttctagcatttgatccgaaggatcgacctactgcagaagaggcgttggctgatccatattttaaaggccttgcaaaagtggagagagaaccatcatgccaaccaatttcaaaaatggagtttgagtttgagcgaagaaaggttaccaaagatgatatcaaggaacttatattccgtgagatattagagtatcatcctcagcttctgaaggattacatgaatggctccgaaaacacgagctttctatatccaagtgctgttgataatttccggaggcaatttgccatcttagaggaaaacggaggaaagagtggtgcactagataggaagcatgtttctcttccaagggctacaacagttcactctacatcaattcctccaaatgaaggcctagatgcaacatcccaagttactcaaaggatcccaacagctagaccaggaagaacggttggtccggtattaccattcgagaatccaggcgccgcagatccgcacagcgcacggagggtggtgaggaatccgatggttcctccagcagctgccaacaagtcaggatacagctacaacctaaagtcagactactctgataggcaacatcaggaagagcttgagaaagatcgtgtgcagtacaggcctgcacaacacttgatggatgctaaagttgctccagatacagccccggacatacggtcttcacaatactactttacgaggagtgctcccagaactgatctaacagacagggctgcactccaggggagcatgctatacggcattgctccgttcaacggcatcgcagcagttgctggtggatacagcaaggttggtgccgttcaatatggtgtttcaaggatgtactag

SEQ ID NO: 142397 - protein, 592 aa, Oryza sativa
MPEANAGGRAAPAAEQRSKNTTEMDFFSEYGDSSRYKIQEIVGKGSYGVVCSAIDQHTGDKVAIKKIHNIFEHLSDAARILREIKLLRLLRHPDIVEIKHIMLPPSRRDFKDIYVVFELMDTDLHQVIKANDDLTKEHHQFFLYQMLRALKYIHTANVYHRDLKPKNILANANCKLKICDFGLARVAFNDTPTTVFWTDYVATRWYRAPELCGSFFSKYSPAIDTWSIGCIFAEILTGKPLFPGKNVVHQLDLMTDLLGTPSMDAISRIRNDKARRYLSSMRRKQPVPFSEKFPNVDPLALKLLQRLLAFDPKDRPTAEEALADPYFKGLAKVEREPSCQPISKMEFEFERRKVTKDDIKELIFREILEYHPQLLKDYMNGSENTSFLYPSAVDNFRRQFAILEENGGKSGALDRKHVSLPRATTVHSTSIPPNEGLDATSQVTQRIPTARPGRTVGPVLPFENPGAADPHSARRVVRNPMVPPAAANKSGYSYNLKSDYSDRQHQEELEKDRVQYRPAQHLMDAKVAPDTAPDIRSSQYYFTRSAPRTDLTDRAALQGSMLYGIAPFNGIAAVAGGYSKVGAVQYGVSRMY

SEQ ID NO: 142398 - DNA, 1710 bp, Oryza sativa
  CDS (1)..(1710)
atggatttcttcagtgaatatggtgactccagccgatacaaaattcaagaaatcgttggtaaaggaagttatggagttgtttgttcagctattgaccaacataccggtgacaaagtagcaatcaagaaaatacacaatatctttgagcatctatctgatgctgctaggatcctccgtgagatcaaacttctccggcttttacggcatcctgatattgtcgagatcaaacatataatgttacctccatctagaagggacttcaaagatatttatgttgtcttcgaactgatggatacagacctccaccaggttattaaggctaatgatgacttaacgaaggaacatcatcagttctttctgtatcaaatgcttcgagcattgaaatatatccatactgctaatgtttatcatcgtgatttaaagcccaaaaatatattagcaaatgctaactgtaagctcaagatatgtgattttggactagcaagagttgcatttaatgacactcctacaacagttttctggacggactacgttgcaactagatggtacagggctcctgagctgtgtgggtctttcttttctaagtattcaccagctatagatacatggagtattggttgcatttttgcggagattttgactggaaaacctttgttccctggtaaaaatgtggttcatcaattggacttgatgactgatctcttgggtacaccatcaatggatgctatttcaaggattcggaatgacaaggcaaggaggtatctgagcagcatgaggaggaagcagccagtacctttttcagaaaagttcccaaatgtagatcctttggcactcaagctcttacaaaggcttctagcatttgatccgaaggatcgacctactgcagaagaggcgttggctgatccatattttaaaggccttgcaaaagtggagagagaaccatcatgccaaccaatttcaaaaatggagtttgagtttgagcgaagaaaggttaccaaagatgatatcaaggaacttatattccgtgagatattagagtatcatcctcagcttctgaaggattacatgaatggctccgaaaacacgagctttctatatccaagtgctgttgataatttccggaggcaatttgccatcttagaggaaaacggaggaaagagtggtgcactagataggaagcatgtttctcttccaagggctacaacagttcactctacatcaattcctccaaatgaaggcctagatgcaacatcccaagttactcaaaggatcccaacagctagaccaggaagaacggttggtccggtattaccattcgagaatccaggcgccgcagatccgcacagcgcacggagggtggtgaggaatccgatggttcctccagcagctgccaacaagtcaggatacagctacaacctaaagtcagactactctgataggcaacatcaggaagagcttgagaaagatcgtgtgcagtacaggcctgcacaacacttgatggatgctaaagttgctccagatacagccccggacatacggtcttcacaatactactttacgaggagtgctcccagaactgatctaacagacagggctgcactccaggggagcatgctatacggcattgctccgttcaacggcatcgcagcagttgctggtggatacagcaaggttggtgccgttcaatatggtgtttcaaggatgtactag

SEQ ID NO: 142399 - protein, 569 aa, Oryza sativa
MDFFSEYGDSSRYKIQEIVGKGSYGVVCSAIDQHTGDKVAIKKIHNIFEHLSDAARILREIKLLRLLRHPDIVEIKHIMLPPSRRDFKDIYVVFELMDTDLHQVIKANDDLTKEHHQFFLYQMLRALKYIHTANVYHRDLKPKNILANANCKLKICDFGLARVAFNDTPTTVFWTDYVATRWYRAPELCGSFFSKYSPAIDTWSIGCIFAEILTGKPLFPGKNVVHQLDLMTDLLGTPSMDAISRIRNDKARRYLSSMRRKQPVPFSEKFPNVDPLALKLLQRLLAFDPKDRPTAEEALADPYFKGLAKVEREPSCQPISKMEFEFERRKVTKDDIKELIFREILEYHPQLLKDYMNGSENTSFLYPSAVDNFRRQFAILEENGGKSGALDRKHVSLPRATTVHSTSIPPNEGLDATSQVTQRIPTARPGRTVGPVLPFENPGAADPHSARRVVRNPMVPPAAANKSGYSYNLKSDYSDRQHQEELEKDRVQYRPAQHLMDAKVAPDTAPDIRSSQYYFTRSAPRTDLTDRAALQGSMLYGIAPFNGIAAVAGGYSKVGAVQYGVSRMY

SEQ ID NO: 142400 - DNA, 1380 bp, Oryza sativa
  CDS (1)..(1380)
atgcctgaggcaaatgcgggtgggcgggcggcgccggcggcggagcagcggagcaagaacacaacagagatggatttcttcagtgaatatggtgactccagccgatacaaaattcaagaaatcgttggtaaaggaagttatggagttgtttgttcagctattgaccaacataccggtgacaaagtagcaatcaagaaaatacacaatatctttgagcatctatctgatgctgctaggatcctccgtgagatcaaacttctccggcttttacggcatcctgatattgtcgagatcaaacatataatgttacctccatctagaagggacttcaaagatatttatgttgtcttcgaactgatggatacagacctccaccaggttattaaggctaatgatgacttaacgaaggaacatcatcagttctttctgtatcaaatgcttcgagcattgaaatatatccatactgctaatgtttatcatcgtgatttaaagcccaaaaatatattagcaaatgctaactgtaagctcaagatatgtgattttggactagcaagagttgcatttaatgacactcctacaacagttttctggacggactacgttgcaactagatggtacagggctcctgagctgtgtgggtctttcttttctaagtattcaccagctatagatacatggagtattggttgcatttttgcggagattttgactggaaaacctttgttccctggtaaaaatgtggttcatcaattggacttgatgactgatctcttgggtacaccatcaatggatgctatttcaaggattcggaatgacaaggcaaggaggtatctgagcagcatgaggaggaagcagccagtacctttttcagaaaagttcccaaatgtagatcctttggcactcaagctcttacaaaggcttctagcatttgatccgaaggatcgacctactgcagaagaggcgttggctgatccatattttaaaggccttgcaaaagtggagagagaaccatcatgccaaccaatttcaaaaatggagtttgagtttgagcgaagaaaggttaccaaagatgatatcaaggaacttatattccgtgagatattagagtatcatcctcagcttctgaaggattacatgaatggctccgaaaacacgagctttctatatccaagtgctgttgataatttccggaggcaatttgccatcttagaggaaaacggaggaaagagtggtgcactagataggaagcatgtttctcttccaagggctacaacagttcactctacatcaattcctccaaatgaaggcctagatgcaacatcccaagttactcaaaggatcccaacaggtatctgtttatctttaccatttgtgacttaa

SEQ ID NO: 142401 - protein, 459 aa, Oryza sativa
MPEANAGGRAAPAAEQRSKNTTEMDFFSEYGDSSRYKIQEIVGKGSYGVVCSAIDQHTGDKVAIKKIHNIFEHLSDAARILREIKLLRLLRHPDIVEIKHIMLPPSRRDFKDIYVVFELMDTDLHQVIKANDDLTKEHHQFFLYQMLRALKYIHTANVYHRDLKPKNILANANCKLKICDFGLARVAFNDTPTTVFWTDYVATRWYRAPELCGSFFSKYSPAIDTWSIGCIFAEILTGKPLFPGKNVVHQLDLMTDLLGTPSMDAISRIRNDKARRYLSSMRRKQPVPFSEKFPNVDPLALKLLQRLLAFDPKDRPTAEEALADPYFKGLAKVEREPSCQPISKMEFEFERRKVTKDDIKELIFREILEYHPQLLKDYMNGSENTSFLYPSAVDNFRRQFAILEENGGKSGALDRKHVSLPRATTVHSTSIPPNEGLDATSQVTQRIPTGICLSLPFVT

SEQ ID NO: 142402 - DNA, 1749 bp, Oryza sativa
  CDS (1)..(1749)
atgggcggccgcgcccgctccatcctacgctggctccgtcaccaccgctcccgccgcgtctcctcctcttccttccatctgaccaccaccggtgacgacaccgtcaaggatctccacgacccgcggcgagaggacgcggagggcgacgggtgggaggaggtccacgagggccccgagtccgaccccgaggagtacattgcgttggtgtcggaggacgcgggcacgcacctgccggtgcgcacggagccgcgacgcatggatccgagcaagaaggaacctgacttcttcactgaatatggtgaagcaaaccggtataaagtcagtgaagtcattggcaaagggagttatggtgttgtggctgccgctgtcgacacccagaccggcgagcgagtggcgatcaagaagatcaatgatgttttcgatcatgtctctgatgccacccgcatccttagggagattaagttgctccggttgctgcgtcacccagacatagttgagatcaagcacataatgcttcctccttcaaggagggaattcagggacatttatgtaatctttgagctaatggagtcagatctccatcaggtaataaaagcaaatgatgatctcacaccagagcatcaccagtttttcttgtatcagctgctccggggaatgaagtacattcatgcagcaagtgttttccatcgggatcttaagcccaagaatattctagccaatgctgattgcaagctgaaggtttgcgatttcggccttgcccgagtgtcatttaacgataccccatcagccatattctggacggattatgtggcaactagatggtatcgtgccccagagttgtgtggctcctttttttcaaagtacacccctgcaattgatatttggagtgtaggatgtatatttgcagagctgcttacaggaaagccactctttccagggaaaaatgttgtgcatcaattggatctcatgactgatctacttggcactccttcagcagaatcccttgctaagatacggaatgagaaagctcgacgatacctgagcaacatgaggaaaaagcctcgggttccttttactaaaaaatttccaggtgtggatcctatggctctccatttgcttgaacgccttcttgcttttgatcccaaagatcgtccaagtgcagaagaggccctgacagacccctactttaatgggctagcaaactctgaacgcgaaccaatagcacagcctatctcaaagcttgagtttgagttcgagaagaggaaattggccaaagatgatgtccgggaattaatttaccgagagattttagagtatcatccccatatgctgcaagaatatttgcgcgggggagaccagatgagtttcatgtatcctagtggggtggatcgcttcaagcgtcaattcgctcatttggaggaaggagtttcaaagggtgaaaaatccagtccacagcttcggcagaatgcttccttaccaagggaaagagcaattggtaacaagcatggagatgacgagtaccacgcaaagctgaatgtaggcgagaagccatgccatgcatcagtgacagacggcattagcaaaccgctcatgagtgctcggagcttgttgaagagtgaaagcataagcgcttccaagtgtattggtgaaaaaccaaagcaagacagagatcaggaggattcccttacagagagcatggacgaaacagctgatgaggtctcagaaaaggttgctcaactgaaaacctga

SEQ ID NO: 142403 - protein, 582 aa, Oryza sativa
MGGRARSILRWLRHHRSRRVSSSSFHLTTTGDDTVKDLHDPRREDAEGDGWEEVHEGPESDPEEYIALVSEDAGTHLPVRTEPRRMDPSKKEPDFFTEYGEANRYKVSEVIGKGSYGVVAAAVDTQTGERVAIKKINDVFDHVSDATRILREIKLLRLLRHPDIVEIKHIMLPPSRREFRDIYVIFELMESDLHQVIKANDDLTPEHHQFFLYQLLRGMKYIHAASVFHRDLKPKNILANADCKLKVCDFGLARVSFNDTPSAIFWTDYVATRWYRAPELCGSFFSKYTPAIDIWSVGCIFAELLTGKPLFPGKNVVHQLDLMTDLLGTPSAESLAKIRNEKARRYLSNMRKKPRVPFTKKFPGVDPMALHLLERLLAFDPKDRPSAEEALTDPYFNGLANSEREPIAQPISKLEFEFEKRKLAKDDVRELIYREILEYHPHMLQEYLRGGDQMSFMYPSGVDRFKRQFAHLEEGVSKGEKSSPQLRQNASLPRERAIGNKHGDDEYHAKLNVGEKPCHASVTDGISKPLMSARSLLKSESISASKCIGEKPKQDRDQEDSLTESMDETADEVSEKVAQLKT

SEQ ID NO: 142404 - DNA, 2103 bp, Oryza sativa
  CDS (1)..(2103)
atggccgtcaagatgcggatcggacggcgaagagcaatccagcagggtattgctgaggggggattcgagtggcggcgcgtttggggttgtcgcgaggcggattcgaggggggcgctgtgggagttggtctggggggagagatctgtaagggagcggaatgcagcaggagcagcggaagaagttattgcgttgttcatcatggacgaaatgtgcgatccagctagcaatctggagtatgtggttgaaaaggccaaatgcgatgtgcaccgaacgagctctgcggaggagttttttacagagtatggtgatgcgaaccggtacaggatccaagaagtcattggtaagggaagctatggggttgtgtgctctgccattgatttgcacactagacagaaggtggcgatcaagaaggtgcacaatatttttgagcatgtctcggatgctgcgcgtattctccgtgagatcaagcttctgagactcctaaggcatccggacattgttgagatcaagcacattatgctacctccgtcaagaagggacttcaaagatatttatgttgtttttgagcttatggaatctgatctccaccaagttataaaggctaatgatgacttaacaaaagagcactaccaatttttcctttatcaattactccgggccctcaaatacattcatactgctagtgtttatcaccgtgatctgaagcccaagaacattttagcaaattctaactgcaaactgaaaatatgtgatttcggactagcacgagttgcattcaatgataccccaacaactgtcttctggacggattatgtagcaacaagatggtacagggctccagagctctgtggatccttcttctcaaagtatacaccagctattgacatttggagcattgggtgcatctttgctgaggtgttgacagggaagcctttgtttcctggtaaaaatgttgtccatcagttagacttgatgactgatcttctaggaacaccttccatggatacaatttcccgggttcggaatgagaaagcaagacggtacttgagcagcatgagaaagaaagatccagtccccttctctcaaaagtttcctaatgcagatcctttggcactaaaactcttgcaacggttattagcctttgatccaaaggaccgtccaactgctgaagaggcattgactgatccatactttaaaggcctttccaagattgatagagaaccatcatgccagccaatcagaaaactggagtttgaatttgagcagaaaaaattgtctaaggaagatataagggagctgatattccaggagatattggaatatcatccacaattgcagaagaactacagaaatggaagagagagagcaacctttctctacccaagtgcggttgatcagtttaagaagcagttctctaatcttgaagaaagcaatggaagtggctcagcaattccaatggaaagaaaacatgcatcgcttcctaggtctactactgttcactctactccaattcctcccaaggaacaacctcttgcggcctcattgaagagcagcaggcctgtctctgatgaaccttgtaaaaacccctgggtcatgggaggattttctggaaatattcccacttcttctcaggtttcacaagtggcaaaaccagtggcaccagggagacctgttgggtcagtatttccttatgagactggaagcaccaatgatccttatggtccaaggggaccagtgatgagttcagggtatcctccccagcaacaaatctcacaagcatatggttatcatcaagtgcctgcaaggatgaactgtgttgaacaatcacaagccatggatgcttataaaatgcattcacagtcacagacgcaggcctatgcttatccgaacagcaaagtcacggctgatgttgctctggacatgagaggatccacgttccatcattcagcaggatcaaagaacggctcgttagatagaatggtaacacagactgacatatacacaagatctcttaacggtattgttgctgccgcgacttcggcaggcgttggtactaacagaaaggttggtgctgtacccatcagcacctcaaggatgtattag

SEQ ID NO: 142405 - protein, 700 aa, Oryza sativa
MAVKMRIGRRRAIQQGIAEGGFEWRRVWGCREADSRGALWELVWGERSVRERNAAGAAEEVIALFIMDEMCDPASNLEYVVEKAKCDVHRTSSAEEFFTEYGDANRYRIQEVIGKGSYGVVCSAIDLHTRQKVAIKKVHNIFEHVSDAARILREIKLLRLLRHPDIVEIKHIMLPPSRRDFKDIYVVFELMESDLHQVIKANDDLTKEHYQFFLYQLLRALKYIHTASVYHRDLKPKNILANSNCKLKICDFGLARVAFNDTPTTVFWTDYVATRWYRAPELCGSFFSKYTPAIDIWSIGCIFAEVLTGKPLFPGKNVVHQLDLMTDLLGTPSMDTISRVRNEKARRYLSSMRKKDPVPFSQKFPNADPLALKLLQRLLAFDPKDRPTAEEALTDPYFKGLSKIDREPSCQPIRKLEFEFEQKKLSKEDIRELIFQEILEYHPQLQKNYRNGRERATFLYPSAVDQFKKQFSNLEESNGSGSAIPMERKHASLPRSTTVHSTPIPPKEQPLAASLKSSRPVSDEPCKNPWVMGGFSGNIPTSSQVSQVAKPVAPGRPVGSVFPYETGSTNDPYGPRGPVMSSGYPPQQQISQAYGYHQVPARMNCVEQSQAMDAYKMHSQSQTQAYAYPNSKVTADVALDMRGSTFHHSAGSKNGSLDRMVTQTDIYTRSLNGIVAAATSAGVGTNRKVGAVPISTSRMY

SEQ ID NO: 142406 - DNA, 1197 bp, Oryza sativa
  CDS (1)..(1197)
atggacgccggggcgcagccgccggacacggagatggcggaggccggcggcgggcagcagccgcctgctgcggctgcggcggcgggggcgggggcaggggcggggatgatggagaacatccaggcgacgctgagccatggcgggaggttcatccagtacaacatcttcgggaacgtgttcgaggtcaccgccaagtacaagccccccatcctccccatcggcaagggcgcctacggcatcgtctgctcggcgctcaactcggagacgggggagcaggtggcgatcaagaagatcgccaacgcgttcgacaacaagatcgacgccaagcgcacgctcagggagatcaagctgctccgccacatggaccacgagaatattgttgccataagggatatcatacctcctccacaaaggaattcattcaatgacgtttatattgcatatgaattgatggatactgatctgcatcaaattattcgctcaaatcaagcattgtcagaggagcactgccagtatttcctttatcagattctccgtggcttgaagtatatacattcagcaaatgtccttcaccgagacttgaagcccagcaacctacttttgaatgcaaattgtgacctcaaaatttgtgattttggacttgctcgtaccacctcagaaaccgattttatgactgagtatgttgtcacaagatggtatagggcaccggaacttctgttgaattcctctgaatatactgcagcaattgatgtgtggtctgtgggctgtatttttatggaactcatggatcgtaaacctttgtttcctggaagagatcatgtccatcaattacgtctactaatggagctcatcggaacgccaaatgaggctgatctggattttgtaaatgaaaatgcaagaagatacattcgccaacttcctagacatgcaaggcagtcctttcctgaaaaatttccacatgttcatcctttagcaattgatctggttgaaaagatgctgacatttgatcctagacagagaataacagttgaaggtgcccttgcacatccttacctggcatcactgcatgacataagtgatgagccagtctgctcatcacccttcagctttgacttcgagcagcatgcattgtccgaggaacaaatgaaggatctaatctaccaagaaggccttgcgttcaaccctgattaccagtag

SEQ ID NO: 142407 - protein, 398 aa, Oryza sativa; identical to SEQ ID NO: 140295

SEQ ID NO: 142408 - DNA, 1713 bp, Oryza sativa
  CDS (1)..(1713)
atgcagaccagcaattttcgtaagaagaatgcagcagaggtggatttcttcatggggtatggtgatgttaatcgatacgaagttctggaggtcataggaaaaggaagttatggacttgtatgttctgcaaatgatatacatactggagaaaaggttgcaataaagaagatacacaacatttttgaacatatatcagatgctgcacgcatactccgtgaaatcaagcttctcaggctgcttaggcatcctgacatagtggaaataaagcatattatgctacccccatccaagatggatttcagggacatatatgttgtctttgagcttatggaatcagatcttcatcaggtcataaaggctaatgatgatttgacaagagagcactatcaatttttcctgtatcagatgctccgtgctttgaaatatatccatacagcaaatgtttatcacagagatctgaagccaaaaaacatacttgctaatgcaaattgcaaactcaaaatatgtgattttggcttggcaagagttgcattcactgatgctcccactacagtcttctggaccgattatgttgcaacgagatggtatagagcacctgaactgtgtggttcattttattccaagtacacaccagctattgatatatggagtatagggtgcatttttgctgaggtgttgattggaaagccactatttcctggtaaaaatgttgttcaccagttggatttgataactgatcttctgggaacaccctccttagatgctatttctcaggtgcggaatgacaaggcaagaaaatatctgacatgcatgcggaagaagcagcctgcatcattttcacataaatttctgaaggctgatccattagcattacaattgcttaggaagcttctagcttttgatccaaaggaccgtccatctgctcaagaggcactggcagatccgtacttcaatggattagcaaaggtagagcgagaaccatcttgtcagccaattccaaagatggaatttgaatttgagcgtcggagagcaacaaaggaggatatcaaggaacttatttttcaagaaatattggagtaccatcctcaattattgaaagaacacatcagtggaacagaaaggccaaattttcatcatttaagtgtggttgaccaattcagaaagcaatttactcaagttgaggaaaatctgaatggaagtggggctgctgtttcgctacagaggaaacattcttctttgccaaggtcaacaatagtgcactctgctgcaattcctgcaaaggattataaacatgtggcctcatctagtacaaagcttgcagtagatggatcttggaatgcacagattcagggagtacatgcaaatatagctggcgagccttcaactatcgttagacctgcagtgtcctcggaaagaagcttagcgcctacacttcaatggcaaccaaatatgacgcattttctgaatcatgcattgtgttaccagaacacagtatttagcgggtcacttcttgatgcaacaggcccagcccaagccattcctcgaactactccatatgtagactacaggtccgggaacttggacctctatcagcatcatgtttctagagaggatgtacaaagtgacacagccactgcacaagcacacgctgcttctcatggcccggttccagctgtgtcttacagtcttccagggacgtatagaatcacctag

SEQ ID NO: 142409 - protein, 570 aa, Oryza sativa
MQTSNFRKKNAAEVDFFMGYGDVNRYEVLEVIGKGSYGLVCSANDIHTGEKVAIKKIHNIFEHISDAARILREIKLLRLLRHPDIVEIKHIMLPPSKMDFRDIYVVFELMESDLHQVIKANDDLTREHYQFFLYQMLRALKYIHTANVYHRDLKPKNILANANCKLKICDFGLARVAFTDAPTTVFWTDYVATRWYRAPELCGSFYSKYTPAIDIWSIGCIFAEVLIGKPLFPGKNVVHQLDLITDLLGTPSLDAISQVRNDKARKYLTCMRKKQPASFSHKFLKADPLALQLLRKLLAFDPKDRPSAQEALADPYFNGLAKVEREPSCQPIPKMEFEFERRRATKEDIKELIFQEILEYHPQLLKEHISGTERPNFHHLSVVDQFRKQFTQVEENLNGSGAAVSLQRKHSSLPRSTIVHSAAIPAKDYKHVASSSTKLAVDGSWNAQIQGVHANIAGEPSTIVRPAVSSERSLAPTLQWQPNMTHFLNHALCYQNTVFSGSLLDATGPAQAIPRTTPYVDYRSGNLDLYQHHVSREDVQSDTATAQAHAASHGPVPAVSYSLPGTYRIT

SEQ ID NO: 142410 - DNA, 1266 bp, Oryza sativa; identical to SEQ ID NO: 140310
  CDS (1)..(1266)

SEQ ID NO: 142411 - protein, 421 aa, Oryza sativa; identical to SEQ ID NO: 140311

SEQ ID NO: 142412 - DNA, 1212 bp, Oryza sativa
  CDS (1)..(1212)
atggccgcgatgccaggtgggcccgaccttgccggggccggtggcgccgtcgccgtcgccgtcgacgcgatgcaggtcgacgacccgccgcgtgcgtccgccgaggagaagcatggtcccactataatgggaggaaatgatccagtcacaggtcatataatttcaactactattggagggaagaacgatgagcccaaaaggactattagctatatggctgaacgagttgttggaactggatcctttggtgttgtattccaggcaaaatgccttgagactggtgaaactgttgccattaagaaggtcttacaggacaaacgatacaagaacagagagttacagataatgcgatcaatggatcattgcaatgtcatctccctaaagcattgtttcttctctaccacaagcagagatgaacttttccttaacttagtcatggagtttgttcccgagtcactttatcgtgtcctgaaacactacaaagatatgaagcagaggatgccacttatatatgtcaaactttacatgtatcagatattccgcggattagcttacattcacactgttcctggagtttgtcaccgagatataaagccacaaaatatcttggttgatcctcttacccaccaagtgaaggtctgtgattttgggagtgctaaaatgctgattaaaggtgaagcaaatatatcttacatatgctcacgttactatcgtgctcctgagctcatatttggtgcaactgagtacacaacatcaattgatatatggtctgctggatgtgttcttgctgagctgcttcttggtcaacctctgtttcctggtgaaagtgcagtggaccagcttgttgagataattaaggttttgggtactccaacgcgagaggaaatccgttgtatgaatcccaattacacagaattcaaatttccgcagataaaagcatgcccatggcacaagatcttccacaagcgaatgcctcccgaagcaatagatcttgtgtcccgtctccttcagtattcgccaaatctgcgatgtactgcgctggaggcatgtgctcattcattttttgatgagttacgagaaccacatgcaaaactgccaaatggccgtccgtttccgcctctgttcaactttaagcaagaattagcaaatacacacccagagctcgtgagcaggctgttaccagaacatgcgcagcggcattcaggattttaa

SEQ ID NO: 142413 - protein, 403 aa, Oryza sativa
MAAMPGGPDLAGAGGAVAVAVDAMQVDDPPRASAEEKHGPTIMGGNDPVTGHIISTTIGGKNDEPKRTISYMAERVVGTGSFGVVFQAKCLETGETVAIKKVLQDKRYKNRELQIMRSMDHCNVISLKHCFFSTTSRDELFLNLVMEFVPESLYRVLKHYKDMKQRMPLIYVKLYMYQIFRGLAYIHTVPGVCHRDIKPQNILVDPLTHQVKVCDFGSAKMLIKGEANISYICSRYYRAPELIFGATEYTTSIDIWSAGCVLAELLLGQPLFPGESAVDQLVEIIKVLGTPTREEIRCMNPNYTEFKFPQIKACPWHKIFHKRMPPEAIDLVSRLLQYSPNLRCTALEACAHSFFDELREPHAKLPNGRPFPPLFNFKQELANTHPELVSRLLPEHAQRHSGF

SEQ ID NO: 142414 - DNA, 1110 bp, Oryza sativa; identical to SEQ ID NO: 140312
  CDS (1)..(1110)

SEQ ID NO: 142415 - protein, 369 aa, Oryza sativa; identical to SEQ ID NO: 140313

SEQ ID NO: 142416 - DNA, 1743 bp, Oryza sativa
  CDS (1)..(1743)
atggggggagggggcacgctcgtcgacggattccgccgcctcttccaccgccgcacggcgtccggctccaaccagtcgtccaacgccggcgaggaggccgcctcctccgacctcgaggtcgccgacgacccggatctcgtcgccctccgctccatccgcatccgcgtgcccaagcgcaagatgcctctccccgtcgagagccacaagaagaacacagtggaaatggagttcttcactgagtatggagaagcaagccagtaccagatccaggaagtcattggcaaaggaagttatggagtagttgctgctgcagtagatacccgcacgggtgagcgggttgcaatcaagaagatcaatgatgtgtttgagcatgtatcagacgctacgcgcatattgcgtgagatcaagctccttcgtctgctccgtcacccagacatagttgagatcaaacacattatgcttcccccttctcgaagggagttccaagatatttatgttgtttttgagctcatggaatcagatctccatcaagtcatcagagcgaacgatgacctcaccccggagcactaccagtttttcctgtaccaacttctccgtgctctcaagtacatccatgcagctaatgtatttcatcgcgatctaaagcccaagaatatactggcaaactcagactgcaaattgaaaatatgtgatttcggacttgcccgagcatcattcaatgatgccccttcagcaatattttggacggattatgttgcaacgaggtggtaccgagcacctgaattatgtggctcatttttctccaaatacactcctgcaattgatatttggagtattgggtgcatatttgctgaacttctcactgggagaccactatttcctgggaagaatgttgtgcaccaattagatattataacagatcttcttggaactccatcatcagaaaccttatccaggattcgaaatgagaaggccaggagatacttgagcaccatgcggaaaaaacatgctgtccccttctctcagaagttccgcaatactgaccccttggctcttcgtctgctagagcgtttactggcatttgatcctaaagatcggtcttcagctgaagaagctttggctgatccgtacttcgcaagtcttgctaatgtggaacgtgagccctcaagacatccaatctcaaaacttgagtttgaattcgagagacggaagctgacaaaagatgatgttagagaattaatttatcgagagattttggagtatcacccacagatgctgcaagagtatatgaaaggtggagagcagattagcttcctctatccaagtggggttgatcgcttcaaacgacagtttgcacaccttgaggagaactacagcaaaggagaaagaggttctccactgcagaggaagcatgcttctttaccgagggagagagtaggtgtatcaaaggatggttataaccaacaaaacaccaatgaccaagagaggagtgcagattccgttgcccgcactacagtaagccctccaatgtcacaagatgcacaacaacatggatctgctggccaaaatggtgtgacatccacagacttgagttcgaggagctatctgaagagtgcaagcattagtgcttccaagtgtgtcgctgtcaaggacaataaagaaccagaggatgattacatctctgaagaaatggaagggtcggtcgatggattgtctgaacaagtctccaggatgcactcctag

SEQ ID NO: 142417 - protein, 580 aa, Oryza sativa
MGGGGTLVDGFRRLFHRRTASGSNQSSNAGEEAASSDLEVADDPDLVALRSIRIRVPKRKMPLPVESHKKNTVEMEFFTEYGEASQYQIQEVIGKGSYGVVAAAVDTRTGERVAIKKINDVFEHVSDATRILREIKLLRLLRHPDIVEIKHIMLPPSRREFQDIYVVFELMESDLHQVIRANDDLTPEHYQFFLYQLLRALKYIHAANVFHRDLKPKNILANSDCKLKICDFGLARASFNDAPSAIFWTDYVATRWYRAPELCGSFFSKYTPAIDIWSIGCIFAELLTGRPLFPGKNVVHQLDIITDLLGTPSSETLSRIRNEKARRYLSTMRKKHAVPFSQKFRNTDPLALRLLERLLAFDPKDRSSAEEALADPYFASLANVEREPSRHPISKLEFEFERRKLTKDDVRELIYREILEYHPQMLQEYMKGGEQISFLYPSGVDRFKRQFAHLEENYSKGERGSPLQRKHASLPRERVGVSKDGYNQQNTNDQERSADSVARTTVSPPMSQDAQQHGSAGQNGVTSTDLSSRSYLKSASISASKCVAVKDNKEPEDDYISEEMEGSVDGLSEQVSRMHS

SEQ ID NO: 142418 - DNA, 1521 bp, Oryza sativa
  CDS (1)..(1521)
atggagttcttcactgagtatggagaagcaagccagtaccagatccaggaagtcattggcaaaggaagttatggagtagttgctgctgcagtagatacccgcacgggtgagcgggttgcaatcaagaagatcaatgatgtgtttgagcatgtatcagacgctacgcgcatattgcgtgagatcaagctccttcgtctgctccgtcacccagacatagttgagatcaaacacattatgcttcccccttctcgaagggagttccaagatatttatgttgtttttgagctcatggaatcagatctccatcaagtcatcagagcgaacgatgacctcaccccggagcactaccagtttttcctgtaccaacttctccgtgctctcaagtacatccatgcagctaatgtatttcatcgcgatctaaagcccaagaatatactggcaaactcagactgcaaattgaaaatatgtgatttcggacttgcccgagcatcattcaatgatgccccttcagcaatattttggacggattatgttgcaacgaggtggtaccgagcacctgaattatgtggctcatttttctccaaatacactcctgcaattgatatttggagtattgggtgcatatttgctgaacttctcactgggagaccactatttcctgggaagaatgttgtgcaccaattagatattataacagatcttcttggaactccatcatcagaaaccttatccaggattcgaaatgagaaggccaggagatacttgagcaccatgcggaaaaaacatgctgtccccttctctcagaagttccgcaatactgaccccttggctcttcgtctgctagagcgtttactggcatttgatcctaaagatcggtcttcagctgaagaagctttggctgatccgtacttcgcaagtcttgctaatgtggaacgtgagccctcaagacatccaatctcaaaacttgagtttgaattcgagagacggaagctgacaaaagatgatgttagagaattaatttatcgagagattttggagtatcacccacagatgctgcaagagtatatgaaaggtggagagcagattagcttcctctatccaagtggggttgatcgcttcaaacgacagtttgcacaccttgaggagaactacagcaaaggagaaagaggttctccactgcagaggaagcatgcttctttaccgagggagagagtaggtgtatcaaaggatggttataaccaacaaaacaccaatgaccaagagaggagtgcagattccgttgcccgcactacagtaagccctccaatgtcacaagatgcacaacaacatggatctgctggccaaaatggtgtgacatccacagacttgagttcgaggagctatctgaagagtgcaagcattagtgcttccaagtgtgtcgctgtcaaggacaataaagaaccagaggatgattacatctctgaagaaatggaagggtcggtcgatggattgtctgaacaagtctccaggatgcactcctag

SEQ ID NO: 142419 - protein, 506 aa, Oryza sativa
MEFFTEYGEASQYQIQEVIGKGSYGVVAAAVDTRTGERVAIKKINDVFEHVSDATRILREIKLLRLLRHPDIVEIKHIMLPPSRREFQDIYVVFELMESDLHQVIRANDDLTPEHYQFFLYQLLRALKYIHAANVFHRDLKPKNILANSDCKLKICDFGLARASFNDAPSAIFWTDYVATRWYRAPELCGSFFSKYTPAIDIWSIGCIFAELLTGRPLFPGKNVVHQLDIITDLLGTPSSETLSRIRNEKARRYLSTMRKKHAVPFSQKFRNTDPLALRLLERLLAFDPKDRSSAEEALADPYFASLANVEREPSRHPISKLEFEFERRKLTKDDVRELIYREILEYHPQMLQEYMKGGEQISFLYPSGVDRFKRQFAHLEENYSKGERGSPLQRKHASLPRERVGVSKDGYNQQNTNDQERSADSVARTTVSPPMSQDAQQHGSAGQNGVTSTDLSSRSYLKSASISASKCVAVKDNKEPEDDYISEEMEGSVDGLSEQVSRMHS

SEQ ID NO: 142420 - DNA, 1185 bp, Oryza sativa; identical to SEQ ID NO: 140314
  CDS (1)..(1185)

SEQ ID NO: 142421 - protein, 394 aa, Oryza sativa; identical to SEQ ID NO: 140315

SEQ ID NO: 142422 - DNA, 1131 bp, Oryza sativa; identical to SEQ ID NO: 140316
  CDS (1)..(1131)

SEQ ID NO: 142423 - protein, 376 aa, Oryza sativa; identical to SEQ ID NO: 140317

SEQ ID NO: 142424 - DNA, 1497 bp, Oryza sativa
  CDS (1)..(1497)
atggacttctttaccgagtatggtgaggggaacaggtataagatagaagaggtcataggaaaagggagttacggtgtagtatgctccgcgctggatactcatactggtgagaaagttgctatcaagaagattaatgacatttttgaacatgtgtctgatgctactcggatacttcgtgaaatcaagttgctccggctactgcgacacccagatatcgtggaaataaaacatattttgcttcctccgtcgaggagagaattcaaggacatttatgttgtttttgaactcatggagtctgatttgcaccaagttataaaggccaacgacgacttgactccagaacactaccagtttttcctctatcagttgcttcgaggattgaagtacatacatacagcaaatgtgtttcaccgagatcttaaaccaaaaaatattttggcaaatgctgattgtaagctcaaaatatgtgattttggccttgcaagagttgctttcagtgatacaccaactgccatcttttggacggattatgttgcaacaaggtggtatcgtgcacctgaactttgtggatcttttttctctaagtacacaccagcaatagatatatggagcatcggttgcatatttgcagaacttttaacaggaaaacctcttttccccgggaaaaatgtggtgcatcaacttgatataattacagatcttttggggacaccttctacagaagcaatatctaggattcgaaatgagaaggccaggcgatatttgagcagtatgagacgcaaaaagcctataccatttactcagaagttcccaaatgcagatccacttgcattacgtttgttggagagaatgctatcttttgagcccaaagataggccaaatgctgaagaggctcttgccgatccttatttcagaaacatagcaaatgtagatagagaaccttcagcacagcctgtgacaaagctggaatttgagtttgaaaggaggaggattacaaaggaagatataagggaactcatctatagagatattctggagtatcatccaaatatgttgagggaataccttgaagggactgagtcagctggtttcatgtaccctagtgcggtagatcattttaaaaagcagtttgcatatcttgaagaacattatgctaagggatcaacagcagctccacctgagaggcaacataactctttaccaagaccttctgtgttatattcggatgaccgtccacaaaacacagccaacatcgccgaggatctttcaaaatgtgtacttggagataatacacaaaaaatgcatcaaggttctgcttctgtttgtgcgaatagagttcctcaaggtggtgctgcaagacctggtaaagttgttggttctgcgcttcgatatggtaactgctcaacatctactgctgagcaatatgagcatcgacgaaccgatagaaacccagcattggctactaacactgtttctccccgaggctcttacccctga

SEQ ID NO: 142425 - protein, 498 aa, Oryza sativa
MDFFTEYGEGNRYKIEEVIGKGSYGVVCSALDTHTGEKVAIKKINDIFEHVSDATRILREIKLLRLLRHPDIVEIKHILLPPSRREFKDIYVVFELMESDLHQVIKANDDLTPEHYQFFLYQLLRGLKYIHTANVFHRDLKPKNILANADCKLKICDFGLARVAFSDTPTAIFWTDYVATRWYRAPELCGSFFSKYTPAIDIWSIGCIFAELLTGKPLFPGKNVVHQLDIITDLLGTPSTEAISRIRNEKARRYLSSMRRKKPIPFTQKFPNADPLALRLLERMLSFEPKDRPNAEEALADPYFRNIANVDREPSAQPVTKLEFEFERRRITKEDIRELIYRDILEYHPNMLREYLEGTESAGFMYPSAVDHFKKQFAYLEEHYAKGSTAAPPERQHNSLPRPSVLYSDDRPQNTANIAEDLSKCVLGDNTQKMHQGSASVCANRVPQGGAARPGKVVGSALRYGNCSTSTAEQYEHRRTDRNPALATNTVSPRGSYP

SEQ ID NO: 142426 - DNA, 1119 bp, Oryza sativa
  CDS (1)..(1119)
atggacttctttaccgagtatggtgaggggaacaggtataagatagaagaggtcataggaaaagggagttacggtgtagtatgctccgcgctggatactcatactggtgagaaagttgctatcaagaagattaatgacatttttgaacatgtgtctgatgctactcggatacttcgtgaaatcaagttgctccggctactgcgacacccagatatcgtggaaataaaacatattttgcttcctccgtcgaggagagaattcaaggacatttatgttgtttttgaactcatggagtctgatttgcaccaagttataaaggccaacgacgacttgactccagaacactaccagtttttcctctatcagttgcttcgaggattgaagtacatacatacagcaaatgtgtttcaccgagatcttaaaccaaaaaatattttggcaaatgctgattgtaagctcaaaatatgtgattttggccttgcaagagttgctttcagtgatacaccaactgccatcttttggacggattatgttgcaacaaggtggtatcgtgcacctgaactttgtggatcttttttctctaagtacacaccagcaatagatatatggagcatcggttgcatatttgcagaacttttaacaggaaaacctcttttccccgggaaaaatgtggtgcatcaacttgatataattacagatcttttggggacaccttctacagaagcaatatctaggattcgaaatgagaaggccaggcgatatttgagcagtatgagacgcaaaaagcctataccatttactcagaagttcccaaatgcagatccacttgcattacgtttgttggagagaatgctatcttttgagcccaaagataggccaaatgctgaagaggctcttgccgatccttatttcagaaacatagcaaatgtagatagagaaccttcagcacagcctgtgacaaagctggaatttgagtttgaaaggaggaggattacaaaggaagatataagggaactcatctatagagatattctggagtatcatccaaatatgttgagggaataccttgaagggactgagtcagctggtttcatgtaccctaggtgcgatgatttttaa

SEQ ID NO: 142427 - protein, 372 aa, Oryza sativa
MDFFTEYGEGNRYKIEEVIGKGSYGVVCSALDTHTGEKVAIKKINDIFEHVSDATRILREIKLLRLLRHPDIVEIKHILLPPSRREFKDIYVVFELMESDLHQVIKANDDLTPEHYQFFLYQLLRGLKYIHTANVFHRDLKPKNILANADCKLKICDFGLARVAFSDTPTAIFWTDYVATRWYRAPELCGSFFSKYTPAIDIWSIGCIFAELLTGKPLFPGKNVVHQLDIITDLLGTPSTEAISRIRNEKARRYLSSMRRKKPIPFTQKFPNADPLALRLLERMLSFEPKDRPNAEEALADPYFRNIANVDREPSAQPVTKLEFEFERRRITKEDIRELIYRDILEYHPNMLREYLEGTESAGFMYPRCDDF

SEQ ID NO: 142428 - DNA, 942 bp, Brassica napus; identical to SEQ ID NO: 63063
  CDS (1)..(942)

SEQ ID NO: 142429 - protein, 313 aa, Brassica napus; identical to SEQ ID NO: 63064

SEQ ID NO: 142430 - DNA, 1113 bp, Brassica napus; identical to SEQ ID NO: 140320
  CDS (1)..(1113)

SEQ ID NO: 142431 - protein, 370 aa, Brassica napus; identical to SEQ ID NO: 140321

SEQ ID NO: 142432 - DNA, 1107 bp, Brassica napus; identical to SEQ ID NO: 63065
  CDS (1)..(1107)

SEQ ID NO: 142433 - protein, 368 aa, Brassica napus; identical to SEQ ID NO: 63066

SEQ ID NO: 142434 - DNA, 885 bp, Glycine max; identical to SEQ ID NO: 140326
  CDS (1)..(885)

SEQ ID NO: 142435 - protein, 294 aa, Glycine max; identical to SEQ ID NO: 62742

SEQ ID NO: 142436 - DNA, 1110 bp, Triticum aestivum; identical to SEQ ID NO: 63067
  CDS (1)..(1110)

SEQ ID NO: 142437 - protein, 369 aa, Triticum aestivum; identical to SEQ ID NO: 63068

SEQ ID NO: 142438 - DNA, 1650 bp, Triticum aestivum; identical to SEQ ID NO: 140546
  CDS (1)..(1650)

SEQ ID NO: 142439 - protein, 549 aa, Triticum aestivum; identical to SEQ ID NO: 140547

SEQ ID NO: 142440 - DNA, 1227 bp, Triticum aestivum
  CDS (1)..(1227)
atgacctcatttggtgtcgcaccggcatctgggctgagagatgctggtggtagtagtgaagtggataagttgccggatgaaattagtaatatgagaataagtgacgaaaaggaagtagaggcaacaatcatcaatgggaatggaacagaagctggtcatattatagtcacgactatcggaggcagagatggccaaaggaagcagacaataagttacatggctgaacgtgtcattggtcaaggatcatttggtgttgtgttccaggcaaaatgtttggagacaagtgagacagtagctatcaagaaggttcttcaggataagagatacaagaaccgtgagttgcaaatgatgcgtctacttgaccatccaaatgtcgtctctctcaaacactgcttcttctcaaccactgaaaaggatgaactctttctgaatcttgtgcttgagtatgttcctgagacagtccaccgtgtcatcagacactacaacaagatgaaccaacgcatgccactgatatatgtgaagctatatacttatcagatttgtagggcactggcttacatccatcgcaccgttggtgtttgccacagggacataaaaccacagaatcttctggttaacccacacactcatcagctgaagatctgtgatttcggaagtgcaaaagttctggtgaaaggcgaacccaatatatcatacatctgctctaggtactatagggcaccggagcttatttttggtgctactgagtacacgacagcaatcgacatctggtctgctggatgtgttcttgctgaacttctgacaggacagcctctgtttcccggtgaaagtggagttgatcaacttgttgagattatcaagattctgggcacacctacaagggaagaaatcaaatgtatgaacccgaactacacagaattcaagtttccccaaatcaaggcccatccatggcataaggtgttccacaagcgaatgccacctgaagcagtggacctggtttccaggcttcttcagtactcaccgcaccttcggtcctcagctctggatgctctgatccatccattcttcgatgagctccgtgacccaaacacccgcctccccaacggccggttccttcctcccctcttcaacttcaagccccacgagctgaagggacttccgatggagatcgcggcgaagctggtcccggagcacgcgaggagccaatgcccgttcctagggctgtag

SEQ ID NO: 142441 - protein, 408 aa, Triticum aestivum; identical to SEQ ID NO: 140551

SEQ ID NO: 142442 - DNA, 1203 bp, Zea mays; identical to SEQ ID NO: 140330
  CDS (1)..(1203)

SEQ ID NO: 142443 - protein, 400 aa, Zea mays; identical to SEQ ID NO: 140331

SEQ ID NO: 142444 - DNA, 1848 bp, Glycine max; identical to SEQ ID NO: 140332
  CDS (1)..(1848)

SEQ ID NO: 142445 - protein, 615 aa, Glycine max; identical to SEQ ID NO: 140333

SEQ ID NO: 142446 - DNA, 1122 bp, Glycine max; identical to SEQ ID NO: 140334
  CDS (1)..(1122)

SEQ ID NO: 142447 - protein, 373 aa, Glycine max; identical to SEQ ID NO: 140335

SEQ ID NO: 142448 - DNA, 1122 bp, Glycine max; identical to SEQ ID NO: 140442
  CDS (1)..(1122)

SEQ ID NO: 142449 - protein, 373 aa, Glycine max; identical to SEQ ID NO: 140443

SEQ ID NO: 142450 - DNA, 1842 bp, Triticum aestivum; identical to SEQ ID NO: 140342
  CDS (1)..(1842)

SEQ ID NO: 142451 - protein, 613 aa, Triticum aestivum; identical to SEQ ID NO: 140343

SEQ ID NO: 142452 - DNA, 1134 bp, Linum usitatissimum; identical to SEQ ID NO: 140346
  CDS (1)..(1134)

SEQ ID NO: 142453 - protein, 377 aa, Linum usitatissimum; identical to SEQ ID NO: 140347

SEQ ID NO: 142454 - DNA, 1002 bp, Linum usitatissimum; identical to SEQ ID NO: 140510
  CDS (1)..(1002)

SEQ ID NO: 142455 - protein, 333 aa, Linum usitatissimum; identical to SEQ ID NO: 140511

SEQ ID NO: 142456 - DNA, 1632 bp, Zea mays; identical to SEQ ID NO: 140352
  CDS (1)..(1632)

SEQ ID NO: 142457 - protein, 543 aa, Zea mays; identical to SEQ ID NO: 140353

SEQ ID NO: 142458 - DNA, 1533 bp, Zea mays; identical to SEQ ID NO: 140354
  CDS (1)..(1533)

SEQ ID NO: 142459 - protein, 510 aa, Zea mays; identical to SEQ ID NO: 140355

SEQ ID NO: 142460 - DNA, 1287 bp, Zea mays; identical to SEQ ID NO: 63071
  CDS (1)..(1287)

SEQ ID NO: 142461 - protein, 428 aa, Zea mays; identical to SEQ ID NO: 63072

SEQ ID NO: 142462 - DNA, 972 bp, Zea mays; identical to SEQ ID NO: 63141
  CDS (1)..(972)

SEQ ID NO: 142463 - protein, 323 aa, Zea mays; identical to SEQ ID NO: 63142

SEQ ID NO: 142464 - DNA, 927 bp, Zea mays; identical to SEQ ID NO: 63073
  CDS (1)..(927)

SEQ ID NO: 142465 - protein, 308 aa, Zea mays; identical to SEQ ID NO: 63074

SEQ ID NO: 142466 - DNA, 1152 bp, Zea mays
  CDS (1)..(1152)
atgatcggtttccccccttggaactgcctgcctaccggcatcgccaagatcgccgccgcggctgccgtcgtcgtagcggcgctcgcgtcctccgggatcgccctcccgcgtccacgcgccgcgccgcccccatcgggattcggcctcctcatgtcgaaggcgaaggtctacaccgacgtcaacgtcctgcgtcccaaggagtactgggactacgaggcgctcaccgtccaatggggtgagcaggatgactatgaagttgtcaggaaagttggaagaggtaaatatagtgaggtctttgaaggcatcaatgttaacaacaatgagaaatgcatcattaagatccttaagcctgtcaagaaaaagaagatcaaaagggagatcaaaatacttcagaatctctgtggaggtccaaacattgtgaaattgcttgatattgtcagggatcagcattcaaagactcccagtttgatatttgaattcgtcaacaacacagacttcaaagttttgtaccccacattgacggattatgacatccgctactacatatatgagctactcaaggcccttgattactgtcattctcaaggcatcatgcatcgagatgtcaagccccataatgtaatgatagatcatgagcttcgaaaacttcggttgatagactggggcttagctgagttctaccatccaggcaaggaatacaatgtccgtgttgcatcgaggtatttcaagggacctgaactccttgttgatttacaagactatgattattctttagacatgtggagtcttggttgcatgtttgctggaatgatatttcgcaaggaaccattcttttatggccatgacaaccatgaccaacttgtgaagattgcaaaggtccttggaacagatgggctgaattcttatttgaacaagtaccacattgagctggaccctcaacttgaagctcttgttggaaggcatagtagaaaaccctggttgaagttcatgaatggtgataaccaacatctagtatcacctgagtccatagattttctcgataagctcctgcgctatgatcaccaagacaggcttactgcacgggaagctatggcacatccctacttccttcaagtcagagctgtggagaacagtaggacgagagcacaataa

SEQ ID NO: 142467 - protein, 383 aa, Zea mays
MIGFPPWNCLPTGIAKIAAAAAVVVAALASSGIALPRPRAAPPPSGFGLLMSKAKVYTDVNVLRPKEYWDYEALTVQWGEQDDYEVVRKVGRGKYSEVFEGINVNNNEKCIIKILKPVKKKKIKREIKILQNLCGGPNIVKLLDIVRDQHSKTPSLIFEFVNNTDFKVLYPTLTDYDIRYYIYELLKALDYCHSQGIMHRDVKPHNVMIDHELRKLRLIDWGLAEFYHPGKEYNVRVASRYFKGPELLVDLQDYDYSLDMWSLGCMFAGMIFRKEPFFYGHDNHDQLVKIAKVLGTDGLNSYLNKYHIELDPQLEALVGRHSRKPWLKFMNGDNQHLVSPESIDFLDKLLRYDHQDRLTAREAMAHPYFLQVRAVENSRTRAQ

SEQ ID NO: 142468 - DNA, 1221 bp, Hordeum vulgare
  CDS (1)..(1221)
atggcttctgtaggcgttgctccgtccgggcacaagaacagcagcggcaccagcatgggtgttgagaagctaccagatcagatgaacgatttgaagatcagagatgataaggaagtggaagctaccattattaatggtaagggaacagagactggtcacataattgtcacgactactggtggcaaaaatggtcagccgaaacagaccgtgagctacatggctgagcggattgttggtcaaggttcatttggtattgtattccaggctaaatgtttggagacaggggaaactgttgccattaagaaggtccttcaggacaagcgctacaagaaccgtgagctacagaccatgcgcctgcttgaccacccaaatgtcgtagctctgaagcattgcttcttttctacaactgagaaggatgaactgtatctaaacttggttctcgagtatgtgcctgagactgtccatcgtgttgtcaagcattacaacaagatgaaccagcgcatgccactaatctatgtgaagctgtatacataccagatatgtagggctctggcttacattcatggcagcattggagtttgccacagggatatcaagccacaaaatcttctggtaaacccacatacccaccagctgaaactgtgtgactttgggagtgcaaaagttcttgttaagggagaaccaaacatatcatatatttgttcccgatactatagggctccagagctcatatttggtgctactgagtacactacggccattgacatttggtctgctggatgtgttcttgctgagcttatgctagggcagcctctgtttcctggtgaaagtggtgtggaccagcttgttgaaatcatcaaggtccttggtacccctacaagggaagaaattaaatgcatgaacccaaattatacggagttcaaattcccacagattaaagcacacccttggcacaaggtattccataaaaggatgccacctgaagctgttgatctggtctctcggctcctccagtactcgcccaacctaagatgcactgctgtggaggcacttgttcaccccttctttgatgagcttcgggacccgggtacccgccttccgaatggtcgctttctgcctcctctttttaacttcaagcctaacgaactgaaaggaatcccagtggatgttgcggcaaaactgatcccggagcacgcgagaaagcagagctcccatgcatga

SEQ ID NO: 142469 - protein, 406 aa, Hordeum vulgare
MASVGVAPSGHKNSSGTSMGVEKLPDQMNDLKIRDDKEVEATIINGKGTETGHIIVTTTGGKNGQPKQTVSYMAERIVGQGSFGIVFQAKCLETGETVAIKKVLQDKRYKNRELQTMRLLDHPNVVALKHCFFSTTEKDELYLNLVLEYVPETVHRVVKHYNKMNQRMPLIYVKLYTYQICRALAYIHGSIGVCHRDIKPQNLLVNPHTHQLKLCDFGSAKVLVKGEPNISYICSRYYRAPELIFGATEYTTAIDIWSAGCVLAELMLGQPLFPGESGVDQLVEIIKVLGTPTREEIKCMNPNYTEFKFPQIKAHPWHKVFHKRMPPEAVDLVSRLLQYSPNLRCTAVEALVHPFFDELRDPGTRLPNGRFLPPLFNFKPNELKGIPVDVAAKLIPEHARKQSSHA

SEQ ID NO: 142470 - DNA, 1227 bp, Hordeum vulgare
  CDS (1)..(1227)
atgacctcatttggtgtcgcaccggcatctgggctgagagatgctggtggtagtagtgaagtagatagattgccggatgaaattagtaatatgaggataagtgatgaaaaggaagtagaggcaacaatcatcaatgggaatggaacagaagctggtcatattatagtcacaactatcggaggcagagatggccaaaggaagcagacaataagttacatggctgaacgtgtcattggtcaaggatcatttggtgttgtgttccaggcaaaatgtttggagacaagtgagacagtagctatcaagaaggtccttcaggataagagatacaagaaccgtgagttgcaaatgatgcgtctacttgaccatccaaatgtcgtctctctgaaacactgcttcttctcaaccactgaaaaggatgaactctttctgaatcttgtgcttgagtatgttcctgagacagtccaccgtgtcatcagacactacaacaagatgaaccaacgcatgccactgatatatgtgaagctatattcttatcagatttgtagggcactggcttatatccatcgcactgttggtgtttgccacagggacataaaaccacagaatcttctggttaacccacacactcatcagctgaagatctgtgattttggaagtgcaaaagttctggtgaaaggcgaacccaatatatcatacatctgctctaggtactatagggcaccagagcttatttttggtgctactgagtacacaacagcaatcgacatctggtctgctggatgtgttcttgctgaacttctgacaggacagcctctgtttcctggtgaaagtggagttgatcaacttgttgaaattatcaagattctgggcacacctacaagggaagaaatcaaatgtatgaacccgaactacacagaattcaagtttccccaaatcaaggcccatccatggcataaggtattccacaagcgaatgccgcctgaagcagtggacctggtctccaggcttcttcagtactcaccgcaccttcggtcctcagctctggacgccctgatccatccgttcttcgacgagctccgggacccaaacacacgcctccccaacggccggttcctacctcccctcttcaacttcaagcctcacgagctgaaggggcttccaatggagatcgcaatgaagctggtccccgagcacgcgaggagccaatgccccttcctagggctgtag

SEQ ID NO: 142471 - protein, 408 aa, Hordeum vulgare
MTSFGVAPASGLRDAGGSSEVDRLPDEISNMRISDEKEVEATIINGNGTEAGHIIVTTIGGRDGQRKQTISYMAERVIGQGSFGVVFQAKCLETSETVAIKKVLQDKRYKNRELQMMRLLDHPNVVSLKHCFFSTTEKDELFLNLVLEYVPETVHRVIRHYNKMNQRMPLIYVKLYSYQICRALAYIHRTVGVCHRDIKPQNLLVNPHTHQLKICDFGSAKVLVKGEPNISYICSRYYRAPELIFGATEYTTAIDIWSAGCVLAELLTGQPLFPGESGVDQLVEIIKILGTPTREEIKCMNPNYTEFKFPQIKAHPWHKVFHKRMPPEAVDLVSRLLQYSPHLRSSALDALIHPFFDELRDPNTRLPNGRFLPPLFNFKPHELKGLPMEIAMKLVPEHARSQCPFLGL

SEQ ID NO: 142472 - DNA, 885 bp, Helianthus annuus; identical to SEQ ID NO: 63075
  CDS (1)..(885)

SEQ ID NO: 142473 - protein, 294 aa, Helianthus annuus; identical to SEQ ID NO: 63076

SEQ ID NO: 142474 - DNA, 1146 bp, Brassica napus; identical to SEQ ID NO: 140366
  CDS (1)..(1146)

SEQ ID NO: 142475 - protein, 381 aa, Brassica napus; identical to SEQ ID NO: 140367

SEQ ID NO: 142476 - DNA, 885 bp, Brassica napus; identical to SEQ ID NO: 63077
  CDS (1)..(885)

SEQ ID NO: 142477 - protein, 294 aa, Brassica napus; identical to SEQ ID NO: 63078

SEQ ID NO: 142478 - DNA, 1233 bp, Brassica napus; identical to SEQ ID NO: 140370
  CDS (1)..(1233)

SEQ ID NO: 142479 - protein, 410 aa, Brassica napus; identical to SEQ ID NO: 140371

SEQ ID NO: 142480 - DNA, 1143 bp, Brassica napus; identical to SEQ ID NO: 140374
  CDS (1)..(1143)

SEQ ID NO: 142481 - protein, 380 aa, Brassica napus; identical to SEQ ID NO: 140375

SEQ ID NO: 142482 - DNA, 1107 bp, Brassica napus; identical to SEQ ID NO: 63079
  CDS (1)..(1107)

SEQ ID NO: 142483 - protein, 368 aa, Brassica napus; identical to SEQ ID NO: 63080

SEQ ID NO: 142484 - DNA, 1119 bp, Brassica napus; identical to SEQ ID NO: 140378
  CDS (1)..(1119)

SEQ ID NO: 142485 - protein, 372 aa, Brassica napus; identical to SEQ ID NO: 140379

SEQ ID NO: 142486 - DNA, 1173 bp, Brassica napus; identical to SEQ ID NO: 63081
  CDS (1)..(1173)

SEQ ID NO: 142487 - protein, 390 aa, Brassica napus; identical to SEQ ID NO: 63082

SEQ ID NO: 142488 - DNA, 951 bp, Brassica napus; identical to SEQ ID NO: 63083
  CDS (1)..(951)

SEQ ID NO: 142489 - protein, 316 aa, Brassica napus; identical to SEQ ID NO: 63084

SEQ ID NO: 142490 - DNA, 1683 bp, Brassica napus; identical to SEQ ID NO: 140382
  CDS (1)..(1683)

SEQ ID NO: 142491 - protein, 560 aa, Brassica napus; identical to SEQ ID NO: 140383

SEQ ID NO: 142492 - DNA, 1803 bp, Brassica napus; identical to SEQ ID NO: 140386
  CDS (1)..(1803)

SEQ ID NO: 142493 - protein, 600 aa, Brassica napus; identical to SEQ ID NO: 140387

SEQ ID NO: 142494 - DNA, 1107 bp, Brassica napus; identical to SEQ ID NO: 63087
  CDS (1)..(1107)

SEQ ID NO: 142495 - protein, 368 aa, Brassica napus; identical to SEQ ID NO: 63088

SEQ ID NO: 142496 - DNA, 1839 bp, Brassica napus; identical to SEQ ID NO: 140390
  CDS (1)..(1839)

SEQ ID NO: 142497 - protein, 612 aa, Brassica napus; identical to SEQ ID NO: 140391

SEQ ID NO: 142498 - DNA, 1188 bp, Brassica napus; identical to SEQ ID NO: 140392
  CDS (1)..(1188)

SEQ ID NO: 142499 - protein, 395 aa, Brassica napus; identical to SEQ ID NO: 140393

SEQ ID NO: 142500 - DNA, 915 bp, Brassica napus; identical to SEQ ID NO: 63061
  CDS (1)..(915)

SEQ ID NO: 142501 - protein, 304 aa, Brassica napus; identical to SEQ ID NO: 63062

SEQ ID NO: 142502 - DNA, 1044 bp, Brassica napus; identical to SEQ ID NO: 63089
  CDS (1)..(1044)

SEQ ID NO: 142503 - protein, 347 aa, Brassica napus; identical to SEQ ID NO: 63090

SEQ ID NO: 142504 - DNA, 1113 bp, Brassica napus; identical to SEQ ID NO: 140398
  CDS (1)..(1113)

SEQ ID NO: 142505 - protein, 370 aa, Brassica napus; identical to SEQ ID NO: 140399

SEQ ID NO: 142506 - DNA, 1107 bp, Brassica napus; identical to SEQ ID NO: 63091
  CDS (1)..(1107)

SEQ ID NO: 142507 - protein, 368 aa, Brassica napus; identical to SEQ ID NO: 63092

SEQ ID NO: 142508 - DNA, 1821 bp, Brassica napus; identical to SEQ ID NO: 140322
  CDS (1)..(1821)

SEQ ID NO: 142509 - protein, 606 aa, Brassica napus; identical to SEQ ID NO: 140323

SEQ ID NO: 142510 - DNA, 1122 bp, Brassica napus
  CDS (1)..(1122)
atgtcggcggagaactgttttggcggcggcggtggtgatcagagcacgaaaggattggctactcacggtggtcagtacgttcagtacaatgtctacggaaacatcttcgaagtgactagaaagtacgttcctcctcttcgccccatcggcagaggcgcttacggcatcgtctgtgctgctacaaactcagagacgggagaggaagtagctatcaagaagatcggtaacgcttttgacaacatcatcgacgccaagagaaccttgagagagattaagctcctcaagcacatggatcacgagaatgttattgctgtgaaggatataataagaccacccctgagagagaacttcaacgatgtttacattgtttatgagctcatggacactgatctccaccagattatacgctctaaccaacccttaactgatgatcattgtcggttcttcttgtatcagttgttgcgtgggctcaagtacgttcattcagccaatgtgttacaccgagatctaaagcccagcaatttgctcctgaacgcaaactgtgatctaaagcttggggatttcgggcttgcgaggaccaaatccgagactgacttcatgactgagtacgttgttacacgctggtaccgagctccagagttacttcttaactgctccgagtacacagcagcgatcgatatctggtccgtcggttgtattctcggtgaaacaatgacaagagagcccttgtttccgggtaaagattatgttcatcagcttaggcttatcactgagcttataggatcacctgatgattcaagcttggggttcttaaggagcgacaacgcaaggagatacgttaaacagcttccacagtacccgagacagaacttcgctgctaggttcccaaacatgtcagctggcgcagccgatttgcttgagaaaatgctcgtctttgatccaagcagacgcatcactgttgatgaggcgttgtgccacccatatttggcgccgctgcacgatataaacgaggaaccggtgtgtgtgaggccgttcaatttcgattttgagcaaccttctttgacagaagagaacatcaaggagcttatatatcgtgaaacagtcaagttcaatcctcagtaa

SEQ ID NO: 142511 - protein, 373 aa, Brassica napus; identical to SEQ ID NO: 63086

SEQ ID NO: 142512 - DNA, 1188 bp, Brassica napus; identical to SEQ ID NO: 140402
  CDS (1)..(1188)

SEQ ID NO: 142513 - protein, 395 aa, Brassica napus; identical to SEQ ID NO: 140403

SEQ ID NO: 142514 - DNA, 1143 bp, Brassica napus; identical to SEQ ID NO: 140404
  CDS (1)..(1143)

SEQ ID NO: 142515 - protein, 380 aa, Brassica napus; identical to SEQ ID NO: 140405

SEQ ID NO: 142516 - DNA, 1212 bp, Brassica napus
  CDS (1)..(1212)
atggcatcagtgagcataccacctcctatagactctactggtggtgttgataagttgcctgaagaaatgaacgacatgaagattcgtgatgataaagagatggaagccactgtggttgatggtaatagcacagagactggccacattatagtcactaccatcggtggtagaaacggccaacctaaacagacgatcagctacatggccgaacgtgttgttggccaaggttctttcggagttgtcttccaggcgaaatgccttgagacaggagaaaccgttgcgataaagaaagttttgcaagaccggaggtacaagaaccgtgagcttcaaaccatgaggctgctcgaccacccaaacgtcgtctctctcaaacactgcttcttctcaaccacggagaaagacgagctttacctcaacctggtgcttgagtacgtccctgaaacagttcaccgtgttatcaaacactacaacaaactcaaccagcgtatgcctatcatatacgtcaaactctacacctatcagatctttagggctttatcttacattcaccgttgtattggtgtgtgtcatcgtgacatcaaacctcaaaacttgttggtaaatccacacactcatcaagtgaagctatgtgattttggaagtgcaaaagtattggtaaaaggggaaccgaacatctcctacatatgctcgaggtattacagagcacctgaacttatctttggagccaccgagtatacaacagccattgatgtctggtctgcaggatgtgttcttgctgagctcttgcttggacagccattgttccctggtgagagtggtgttgatcaacttgtagagattatcaaggttttgggaacgcctactagggaagaaatcaagtgcatgaatccaaactacacggagttcaaattccctcagattaaagctcatccatggcacaagatattccacaaacgcatgcctccagaggctgttgatttggtatcaaggcttcttcagtactctcccaatctgcgatctgccgctcttgacacattggtccacccattctttgacgagctaagagatccaaatgcgcgtctgcctaatggacgtttccttccacctctgttcaacttcaagcctcacgagctgaaaggtgtggcagtggagattgtagcaaagttagtacctgatcatgcgaggaagcagtgtcattggctcggtttgtga

SEQ ID NO: 142517 - protein, 403 aa, Brassica napus
MASVSIPPPIDSTGGVDKLPEEMNDMKIRDDKEMEATVVDGNSTETGHIIVTTIGGRNGQPKQTISYMAERVVGQGSFGVVFQAKCLETGETVAIKKVLQDRRYKNRELQTMRLLDHPNVVSLKHCFFSTTEKDELYLNLVLEYVPETVHRVIKHYNKLNQRMPIIYVKLYTYQIFRALSYIHRCIGVCHRDIKPQNLLVNPHTHQVKLCDFGSAKVLVKGEPNISYICSRYYRAPELIFGATEYTTAIDVWSAGCVLAELLLGQPLFPGESGVDQLVEIIKVLGTPTREEIKCMNPNYTEFKFPQIKAHPWHKIFHKRMPPEAVDLVSRLLQYSPNLRSAALDTLVHPFFDELRDPNARLPNGRFLPPLFNFKPHELKGVAVEIVAKLVPDHARKQCHWLGL

SEQ ID NO: 142518 - DNA, 885 bp, Brassica napus; identical to SEQ ID NO: 63093
  CDS (1)..(885)

SEQ ID NO: 142519 - protein, 294 aa, Brassica napus; identical to SEQ ID NO: 63094

SEQ ID NO: 142520 - DNA, 1233 bp, Brassica napus; identical to SEQ ID NO: 140408
  CDS (1)..(1233)

SEQ ID NO: 142521 - protein, 410 aa, Brassica napus; identical to SEQ ID NO: 140409

SEQ ID NO: 142522 - DNA, 1107 bp, Glycine max; identical to SEQ ID NO: 63095
  CDS (1)..(1107)

SEQ ID NO: 142523 - protein, 368 aa, Glycine max; identical to SEQ ID NO: 63096

SEQ ID NO: 142524 - DNA, 1224 bp, Zea mays; identical to SEQ ID NO: 140412
  CDS (1)..(1224)

SEQ ID NO: 142525 - protein, 407 aa, Zea mays; identical to SEQ ID NO: 140413

SEQ ID NO: 142526 - DNA, 1176 bp, Glycine max; identical to SEQ ID NO: 140414
  CDS (1)..(1176)

SEQ ID NO: 142527 - protein, 391 aa, Glycine max; identical to SEQ ID NO: 140415

SEQ ID NO: 142528 - DNA, 885 bp, Glycine max; identical to SEQ ID NO: 63097
  CDS (1)..(885)

SEQ ID NO: 142529 - protein, 294 aa, Glycine max; identical to SEQ ID NO: 63098

SEQ ID NO: 142530 - DNA, 1221 bp, Glycine max; identical to SEQ ID NO: 140418
  CDS (1)..(1221)

SEQ ID NO: 142531 - protein, 406 aa, Glycine max; identical to SEQ ID NO: 140419

SEQ ID NO: 142532 - DNA, 1230 bp, Glycine max; identical to SEQ ID NO: 140420
  CDS (1)..(1230)

SEQ ID NO: 142533 - protein, 409 aa, Glycine max; identical to SEQ ID NO: 140421

SEQ ID NO: 142534 - DNA, 1371 bp, Glycine max; identical to SEQ ID NO: 140336
  CDS (1)..(1371)

SEQ ID NO: 142535 - protein, 456 aa, Glycine max; identical to SEQ ID NO: 140337

SEQ ID NO: 142536 - DNA, 1698 bp, Glycine max; identical to SEQ ID NO: 140422
  CDS (1)..(1698)

SEQ ID NO: 142537 - protein, 565 aa, Glycine max; identical to SEQ ID NO: 140423

SEQ ID NO: 142538 - DNA, 1119 bp, Glycine max; identical to SEQ ID NO: 140424
  CDS (1)..(1119)

SEQ ID NO: 142539 - protein, 372 aa, Glycine max; identical to SEQ ID NO: 140425

SEQ ID NO: 142540 - DNA, 885 bp, Zea mays; identical to SEQ ID NO: 63099
  CDS (1)..(885)

SEQ ID NO: 142541 - protein, 294 aa, Zea mays; identical to SEQ ID NO: 63100

SEQ ID NO: 142542 - DNA, 981 bp, Zea mays; identical to SEQ ID NO: 63101
  CDS (1)..(981)

SEQ ID NO: 142543 - protein, 326 aa, Zea mays; identical to SEQ ID NO: 63102

SEQ ID NO: 142544 - DNA, 1197 bp, Zea mays; identical to SEQ ID NO: 140430
  CDS (1)..(1197)

SEQ ID NO: 142545 - protein, 398 aa, Zea mays; identical to SEQ ID NO: 140431

SEQ ID NO: 142546 - DNA, 1119 bp, Zea mays; identical to SEQ ID NO: 63103
  CDS (1)..(1119)

SEQ ID NO: 142547 - protein, 372 aa, Zea mays; identical to SEQ ID NO: 63104

SEQ ID NO: 142548 - DNA, 1110 bp, Zea mays; identical to SEQ ID NO: 63105
  CDS (1)..(1110)

SEQ ID NO: 142549 - protein, 369 aa, Zea mays; identical to SEQ ID NO: 63106

SEQ ID NO: 142550 - DNA, 1626 bp, Glycine max; identical to SEQ ID NO: 63111
  CDS (1)..(1626)

SEQ ID NO: 142551 - protein, 541 aa, Glycine max; identical to SEQ ID NO: 63112

SEQ ID NO: 142552 - DNA, 885 bp, Glycine max; identical to SEQ ID NO: 63113
  CDS (1)..(885)

SEQ ID NO: 142553 - protein, 294 aa, Glycine max; identical to SEQ ID NO: 63114

SEQ ID NO: 142554 - DNA, 1308 bp, Glycine max; identical to SEQ ID NO: 140440
  CDS (1)..(1308)

SEQ ID NO: 142555 - protein, 435 aa, Glycine max; identical to SEQ ID NO: 140441

SEQ ID NO: 142556 - DNA, 1221 bp, Glycine max
  CDS (1)..(1221)
atggcttcagttggtgtggcaccaacatcatcaggcttgagagaatccagtggtgttgataggttgccagaggagatgaatgatatgagaattagggatgataaagaaatggaagccaccgttgtcgatggtaacggaacagagaccggacatattattgttactaccattgggggtagaaatggtcaaccgaagcagactataagctatatggcagagcggattgttggacatggatcatttggggttgtcttccaggctaaatgcttggagactggtgaaactgtggctatcaaaaaagttcttcaagacaagaggtataaaaaccgggagctgcaaacaatgcgccttcttgaccacccaaatgttgtctgtttgaagcattgtttcttttcaaccaccgaaaaggatgaactataccttaatttggtactggagtatgttcccgaaacagttaatcgtgtgatcaaacattataacaagttgaaccaacggatgcctctgatatatgtaaaactctatacataccagatctttagggcactctcttatattcatcgttgcattggagtctgccatcgggatatcaagcctcaaaatctattagttaatccacatactcaccaggtcaaaatatgcgactttggaagtgcaaaagtcttggtaaaaggcgaaccaaatatatcgtacatatgctctagatattatagagcacctgagcttatatttggagcaactgaatatactacagctattgacatttggtcagttggctgtgtattggctgagcttatgcttggacagcccttgttccccggtgagagtggagttgatcagcttgttgagatcatcaaggttctgggaactccaacaagggaagagataaagtgcatgaatcctaactatacagaatttaaattcccacagattaaagcacatccatggcacaagatctttcacaagcgcatgcctccagaagctgttgatttagtatcaagactactacaatactcccctaacttgcggtgcacagctttagatgccttgacccatcctttctttgatgaacttcgtgacccaaacactcgcttgccaaatggtcgtttccttccaccattgttcaattttaaatctcatgaattgaagggagtcccagttgagattttgctgaaattgattccagaacatgcaaggaagcagtgcccgtttcttggcttgtga

SEQ ID NO: 142557 - protein, 406 aa, Glycine max
MASVGVAPTSSGLRESSGVDRLPEEMNDMRIRDDKEMEATVVDGNGTETGHIIVTTIGGRNGQPKQTISYMAERIVGHGSFGVVFQAKCLETGETVAIKKVLQDKRYKNRELQTMRLLDHPNVVCLKHCFFSTTEKDELYLNLVLEYVPETVNRVIKHYNKLNQRMPLIYVKLYTYQIFRALSYIHRCIGVCHRDIKPQNLLVNPHTHQVKICDFGSAKVLVKGEPNISYICSRYYRAPELIFGATEYTTAIDIWSVGCVLAELMLGQPLFPGESGVDQLVEIIKVLGTPTREEIKCMNPNYTEFKFPQIKAHPWHKIFHKRMPPEAVDLVSRLLQYSPNLRCTALDALTHPFFDELRDPNTRLPNGRFLPPLFNFKSHELKGVPVEILLKLIPEHARKQCPFLGL

SEQ ID NO: 142558 - DNA, 1230 bp, Glycine max
  CDS (1)..(1230)
atggcatcggcgggtgtagcacctgcttctggggtaagagatgtgaatgcaagttctgttgctgttgaaaggttgcctgatgagatgaatggcatgaaaattagggatgaaagggaaatggaagcaactgtggtagatggaaatgggactgaaacaggacatataattgttactaccattggtggtaaaaatggccagccaaagcagacaataagctacatggctgagcgagttgttggaaatggatcatttggtgtagttttccaggcaaagtgcttggagacaggggaaactgtggctataaagaaggttcttcaagacaagaggtacaagaaccgggaattgcaaaccatgcgtcttctggatcaccccaatgttgtaactttgaagcattgcttcttttcaacaactgaaaaagacgagctttatcttaatttggtacttgagtatgttcctgagactgtccaccgagttatcaggcattacaacaaaatgaatcaaagaatgcctttgatatacgtgaaactctatttttaccagatatgtagagcactagcttatattcacaactgcattggagtgtctcacagggacataaaacctcaaaatttactggtcaatcctcacactcaccagctaaagatttgtgactttgggagtgcaaaagtcttggtcaaaggcgaaccaaacatatcttatatctgttctaggtactatagagcacctgagcttatatttggtgcaactgagtacaccacggccattgatatctggtcagccggttgtgtacttggtgaactattgcttggccagcctctattccctggtgagagtggagtagatcagcttgttgaaattatcaaggttttaggaaccccgacaagggaagaaatcaagtgtatgaatcctaattacaccgagttcaaatttccacaaattaaagctcatccatggcataagatatttcacaagcgtttacctcctgaggctgtggatctcgtctcaaggctactgcaatactctccaaatcttcgatgcacagctctggaggccttggctcacccattctttgatgaactgcgtgatccaaatactcgcctaccaaatgggcgttaccttcccccactctttaacttcagagccaatgagcttaaaggagtgcctccagagatgctggtgaaactgattccatctcatgcaagaaagcagtgtgccttgtttgcgtcatag

SEQ ID NO: 142559 - protein, 409 aa, Glycine max
MASAGVAPASGVRDVNASSVAVERLPDEMNGMKIRDEREMEATVVDGNGTETGHIIVTTIGGKNGQPKQTISYMAERVVGNGSFGVVFQAKCLETGETVAIKKVLQDKRYKNRELQTMRLLDHPNVVTLKHCFFSTTEKDELYLNLVLEYVPETVHRVIRHYNKMNQRMPLIYVKLYFYQICRALAYIHNCIGVSHRDIKPQNLLVNPHTHQLKICDFGSAKVLVKGEPNISYICSRYYRAPELIFGATEYTTAIDIWSAGCVLGELLLGQPLFPGESGVDQLVEIIKVLGTPTREEIKCMNPNYTEFKFPQIKAHPWHKIFHKRLPPEAVDLVSRLLQYSPNLRCTALEALAHPFFDELRDPNTRLPNGRYLPPLFNFRANELKGVPPEMLVKLIPSHARKQCALFAS

SEQ ID NO: 142560 - DNA, 1692 bp, Glycine max
  CDS (1)..(1692)
atgcttcctgatcagagaaaaaagtcatctgtagaggtggacttctttactgaatacggtgaagggagcagatacagaatagaggaagtaattggtaaaggaagctatggtgttgtctgctctgcatatgatacacacactggagaaaaggttgcaataaagaaaataaatgacatatttgaacatgtttctgatgccactcgcattcttcgcgagattaagcttcttagacttttacgccatccagatattgtggagatcaaacatattctgttacctccttctagaagggaattcaaagatatatatgttgtcttcgaactcatggaatctgatttacatcaggtcatcaaagctaatgatgatctgacaccagagcattaccagttttttttgtatcagcttcttcgaggcatgaagtatattcatacagcaaatgtttttcaccgtgatctaaagccaaaaaacattttagcaaatgctgactgcaaactgaagatttgcgactttggtcttgccagagtggctttcaatgatactcccactgctattttctggacagattatgttgcaaccaggtggtatagggctcctgagttgtgtggatcctttttttccaagtatacaccagctatagacatatggagcattggctgcatttttgcagaacttttgacgggaaaacctcttttccctgggaagaatgttgtccatcaactagaccttatgactgatcttcttggaactccatctcttgaagccattgctagggtacgaaatgagaaagctcggagatatttgagcagcatgcgaaagaagaagcctgttcctctctcgcagaagtttcctaatgcagacccccttgctcttcgtttgttagaaaaaatgttggcatttgagcctaaggatcggcctactgctgaagaggctctagcggatccatattttaaaggcctggccaaggttgagagagaaccatctgctcagccagttactaagatggagtttgaatttgagagacgccggataacaaaggaagatgtacgagagcttatataccgagagattctggagtatcatccaaagatgttgaaggaatttctagagggatcagagccaacaggtttcatgtatccaagtgctgtggaccacttcaagaaacaatttgcatatcttgaggagcattacggcaaaggggggactgttactccccctgagaggcaacatgcatcattaccaagaccttgtgtattgtattcagaccactcaatgcagaatacatctgaggttgcagatgacctatccaaatgttgcatcaaagaagttgagaaacaacccatagatagcagtagtgccatccctatgtctcgacttcctttacaagcaccacaaaatattcaaggtgttgctgcaaggcctggaaaggttgtgggttcggtaatgcgttacaacaactgtggggtagccgggacggccgaggctgaacagcgtcgggtggtcaggaatccatctgtttcagctcagtacgcagcatcgagctgttcatatcctaggagaaactcaggctataaaagtgaaagggggacagaggagggtgggattgaaggttcaaatggactgcagccaaagcctcaatacatggcaagaaaagtggctgctgctcaagctggacctggtggtcagtggtattga

SEQ ID NO: 142561 - protein, 563 aa, Glycine max; identical to SEQ ID NO: 140445

SEQ ID NO: 142562 - DNA, 1263 bp, Glycine max
  CDS (1)..(1263)
atggcctccttgcccttggggcaccaccaccaccaccacaaaccggcggcggcggctatacatccgtcgcaaccgccgcagtctcagccgcaacccgaagttcctcgccggagctccgatatggagaccgataaggatatgtcagctactgtcattgaggggaatgatgctgtcactggccacataatctccaccacaattggaggcaaaaatggggaacctaaagagaccatcagttacatggcagaacgtgttgttggcactggatcatttggagttgtttttcaggcaaagtgcttggagactggagaagcagtggctattaaaaaggtcttgcaagacaggcggtacaaaaatcgtgaattgcagttaatgcgcttaatggatcaccctaatgtaatttccctgaagcactgtttcttctccacaacaagcagagatgaactttttctaaacttggtaatggaatatgttcccgaatcaatgtaccgagttataaagcactacactactatgaaccagagaatgcctctcatctatgtgaaactgtatacatatcaaatctttaggggattagcatatatccataccgcactgggagtttgccatagggatgtgaagcctcaaaatcttttggttcatcctcttactcaccaagttaagctatgtgattttgggagtgccaaagttctggtcaagggtgaatcaaacatttcatacatatgttcacgttactatcgggctccagaactaatatttggtgcaacagaatacacagcttctattgatatctggtcagctggttgtgttcttgctgaacttcttctaggacagccattatttcctggagaaaaccaagtggaccaacttgtggaaattatcaaggttcttggtactccaacacgcgaggaaatccgttgtatgaacccaaattatacagagtttagattccctcagattaaagctcatccttggcacaaggttttccacaagcgaatgcctcctgaagcaattgaccttgcatcaaggcttctccaatattcacctagtctccgctgcactgcgctggaagcatgtgcacatcctttctttgatgagcttcgcgaaccaaatgcccggctacctaatggccgtccactgcccccacttttcaacttcaaacaggagttagctggagcatcacctgaactgatcaataggctcatcccagagcatattaggcggcagatgggtctcagcttcccgcattctgccggtacatag

SEQ ID NO: 142563 - protein, 420 aa, Glycine max
MASLPLGHHHHHHKPAAAAIHPSQPPQSQPQPEVPRRSSDMETDKDMSATVIEGNDAVTGHIISTTIGGKNGEPKETISYMAERVVGTGSFGVVFQAKCLETGEAVAIKKVLQDRRYKNRELQLMRLMDHPNVISLKHCFFSTTSRDELFLNLVMEYVPESMYRVIKHYTTMNQRMPLIYVKLYTYQIFRGLAYIHTALGVCHRDVKPQNLLVHPLTHQVKLCDFGSAKVLVKGESNISYICSRYYRAPELIFGATEYTASIDIWSAGCVLAELLLGQPLFPGENQVDQLVEIIKVLGTPTREEIRCMNPNYTEFRFPQIKAHPWHKVFHKRMPPEAIDLASRLLQYSPSLRCTALEACAHPFFDELREPNARLPNGRPLPPLFNFKQELAGASPELINRLIPEHIRRQMGLSFPHSAGT

SEQ ID NO: 142564 - DNA, 1230 bp, Glycine max
  CDS (1)..(1230)
atggcctctatgccgttggggccgcagcaacagcttccaccgccgccgccgcaacaaccgccgccagcggagaatgacgcgatgaaagtggactctcgcggcggctccgacgccggcaccgaaaaggaaatgtcagctcctgtcgcagatggtaatgatgcactcactggtcacataatctcaaccacaattgcaggcaaaaatggcgaacctaaacaaaccatcagttacatggccgaacgtgttgttggcactggatcatttggcattgttttccaggcgaagtgcttggagactggcgaggcagtggctataaagaaggtcttgcaggacaggcgatacaaaaatcgtgaactgcagttaatgcgcgtgatggatcacccaaatataatttccttgagtaactatttcttctctacaacaagtagagatgaactttttctgaacttggtgatggaatatgtccctgagacgatcttccgtgttataaagcactacagtagcatgaaacagagaatgcccctaatctatgtgaaattatatacatatcaaatctttaggggactggcgtatatccatactgtaccaggaatctgccatagggatttgaagcctcaaaatcttttggttgatcgactcacacaccaagtcaagctctgtgattttgggagtgcaaaagttctggtggagggtgaatcaaacatttcatacatatgttcacggtactatcgtgccccagagctaatatttggtgcggcagaatacacaacttctgttgatatttggtccgctggttgtgtccttgcggaacttcttctaggccagcctttgttcccaggagaaaatcaggttgaccaactcgtggaaattatcaagattcttggcactcctactcgagaagaaattcgatgcatgaatcctaattatacagatttcagattcccccatatcaaagctcatccttggcataaggtttttcacaagcgaatgcctcctgaagcaattgaccttgcatcaaggcttctccaatattccccaaaacttcgttacagtgcagtggaagcaatggcacatcctttctttgacgagcttcgcgagcccaatgcccggctacctaatggtcgtccactgcctccacttttcaactttaaacaggaattagatggagcgccccctgaactgcttcctaagctcatcccagagcatgtcaggcggcaaacccaaatgtaa

SEQ ID NO: 142565 - protein, 409 aa, Glycine max
MASMPLGPQQQLPPPPPQQPPPAENDAMKVDSRGGSDAGTEKEMSAPVADGNDALTGHIISTTIAGKNGEPKQTISYMAERVVGTGSFGIVFQAKCLETGEAVAIKKVLQDRRYKNRELQLMRVMDHPNIISLSNYFFSTTSRDELFLNLVMEYVPETIFRVIKHYSSMKQRMPLIYVKLYTYQIFRGLAYIHTVPGICHRDLKPQNLLVDRLTHQVKLCDFGSAKVLVEGESNISYICSRYYRAPELIFGAAEYTTSVDIWSAGCVLAELLLGQPLFPGENQVDQLVEIIKILGTPTREEIRCMNPNYTDFRFPHIKAHPWHKVFHKRMPPEAIDLASRLLQYSPKLRYSAVEAMAHPFFDELREPNARLPNGRPLPPLFNFKQELDGAPPELLPKLIPEHVRRQTQM

SEQ ID NO: 142566 - DNA, 1107 bp, Glycine max; identical to SEQ ID NO: 63115
  CDS (1)..(1107)

SEQ ID NO: 142567 - protein, 368 aa, Glycine max; identical to SEQ ID NO: 63116

SEQ ID NO: 142568 - DNA, 1176 bp, Glycine max; identical to SEQ ID NO: 140448
  CDS (1)..(1176)

SEQ ID NO: 142569 - protein, 391 aa, Glycine max; identical to SEQ ID NO: 140449

SEQ ID NO: 142570 - DNA, 1107 bp, Glycine max; identical to SEQ ID NO: 63117
  CDS (1)..(1107)

SEQ ID NO: 142571 - protein, 368 aa, Glycine max; identical to SEQ ID NO: 63118

SEQ ID NO: 142572 - DNA, 945 bp, Glycine max; identical to SEQ ID NO: 63119
  CDS (1)..(945)

SEQ ID NO: 142573 - protein, 314 aa, Glycine max; identical to SEQ ID NO: 63120

SEQ ID NO: 142574 - DNA, 1116 bp, Glycine max; identical to SEQ ID NO: 63121
  CDS (1)..(1116)

SEQ ID NO: 142575 - protein, 371 aa, Glycine max; identical to SEQ ID NO: 63122

SEQ ID NO: 142576 - DNA, 1353 bp, Glycine max; identical to SEQ ID NO: 140456
  CDS (1)..(1353)

SEQ ID NO: 142577 - protein, 450 aa, Glycine max; identical to SEQ ID NO: 140457

SEQ ID NO: 142578 - DNA, 1281 bp, Glycine max; identical to SEQ ID NO: 140458
  CDS (1)..(1281)

SEQ ID NO: 142579 - protein, 426 aa, Glycine max; identical to SEQ ID NO: 140459

SEQ ID NO: 142580 - DNA, 1551 bp, Glycine max; identical to SEQ ID NO: 140460
  CDS (1)..(1551)

SEQ ID NO: 142581 - protein, 516 aa, Glycine max; identical to SEQ ID NO: 140461

SEQ ID NO: 142582 - DNA, 1230 bp, Glycine max; identical to SEQ ID NO: 140462
  CDS (1)..(1230)

SEQ ID NO: 142583 - protein, 409 aa, Glycine max; identical to SEQ ID NO: 140463

SEQ ID NO: 142584 - DNA, 2091 bp, Glycine max; identical to SEQ ID NO: 140464
  CDS (1)..(2091)

SEQ ID NO: 142585 - protein, 696 aa, Glycine max; identical to SEQ ID NO: 140465

SEQ ID NO: 142586 - DNA, 1230 bp, Glycine max; identical to SEQ ID NO: 140466
  CDS (1)..(1230)

SEQ ID NO: 142587 - protein, 409 aa, Glycine max; identical to SEQ ID NO: 140467

SEQ ID NO: 142588 - DNA, 1122 bp, Glycine max; identical to SEQ ID NO: 140468
  CDS (1)..(1122)

SEQ ID NO: 142589 - protein, 373 aa, Glycine max; identical to SEQ ID NO: 140469

SEQ ID NO: 142590 - DNA, 1116 bp, Glycine max; identical to SEQ ID NO: 140470
  CDS (1)..(1116)

SEQ ID NO: 142591 - protein, 371 aa, Glycine max; identical to SEQ ID NO: 140471

SEQ ID NO: 142592 - DNA, 1143 bp, Glycine max; identical to SEQ ID NO: 140472
  CDS (1)..(1143)

SEQ ID NO: 142593 - protein, 380 aa, Glycine max; identical to SEQ ID NO: 140473

SEQ ID NO: 142594 - DNA, 1221 bp, Glycine max; identical to SEQ ID NO: 140474
  CDS (1)..(1221)

SEQ ID NO: 142595 - protein, 406 aa, Glycine max; identical to SEQ ID NO: 140475

SEQ ID NO: 142596 - DNA, 1122 bp, Glycine max; identical to SEQ ID NO: 140476
  CDS (1)..(1122)

SEQ ID NO: 142597 - protein, 373 aa, Glycine max; identical to SEQ ID NO: 140477

SEQ ID NO: 142598 - DNA, 1413 bp, Glycine max; identical to SEQ ID NO: 140478
  CDS (1)..(1413)

SEQ ID NO: 142599 - protein, 470 aa, Glycine max; identical to SEQ ID NO: 140479

SEQ ID NO: 142600 - DNA, 885 bp, Glycine max; identical to SEQ ID NO: 63123
  CDS (1)..(885)

SEQ ID NO: 142601 - protein, 294 aa, Glycine max; identical to SEQ ID NO: 63124

SEQ ID NO: 142602 - DNA, 1353 bp, Glycine max; identical to SEQ ID NO: 140482
  CDS (1)..(1353)

SEQ ID NO: 142603 - protein, 450 aa, Glycine max; identical to SEQ ID NO: 140483

SEQ ID NO: 142604 - DNA, 1836 bp, Glycine max; identical to SEQ ID NO: 140484
  CDS (1)..(1836)

SEQ ID NO: 142605 - protein, 611 aa, Glycine max; identical to SEQ ID NO: 140485

SEQ ID NO: 142606 - DNA, 1281 bp, Glycine max; identical to SEQ ID NO: 140486
  CDS (1)..(1281)

SEQ ID NO: 142607 - protein, 426 aa, Glycine max; identical to SEQ ID NO: 140487

SEQ ID NO: 142608 - DNA, 1116 bp, Glycine max; identical to SEQ ID NO: 63125
  CDS (1)..(1116)

SEQ ID NO: 142609 - protein, 371 aa, Glycine max; identical to SEQ ID NO: 63126

SEQ ID NO: 142610 - DNA, 1218 bp, Helianthus annuus; identical to SEQ ID NO: 140490
  CDS (1)..(1218)

SEQ ID NO: 142611 - protein, 405 aa, Helianthus annuus; identical to SEQ ID NO: 140491

SEQ ID NO: 142612 - DNA, 1185 bp, Helianthus annuus; identical to SEQ ID NO: 140364
  CDS (1)..(1185)

SEQ ID NO: 142613 - protein, 394 aa, Helianthus annuus; identical to SEQ ID NO: 140365

SEQ ID NO: 142614 - DNA, 1110 bp, Hordeum vulgare; identical to SEQ ID NO: 63127
  CDS (1)..(1110)

SEQ ID NO: 142615 - protein, 369 aa, Hordeum vulgare; identical to SEQ ID NO: 63128

SEQ ID NO: 142616 - DNA, 1110 bp, Hordeum vulgare; identical to SEQ ID NO: 140494
  CDS (1)..(1110)

SEQ ID NO: 142617 - protein, 369 aa, Hordeum vulgare; identical to SEQ ID NO: 140495

SEQ ID NO: 142618 - DNA, 1737 bp, Hordeum vulgare; identical to SEQ ID NO: 140496
  CDS (1)..(1737)

SEQ ID NO: 142619 - protein, 578 aa, Hordeum vulgare; identical to SEQ ID NO: 140497

SEQ ID NO: 142620 - DNA, 1134 bp, Hordeum vulgare; identical to SEQ ID NO: 140498
  CDS (1)..(1134)

SEQ ID NO: 142621 - protein, 377 aa, Hordeum vulgare; identical to SEQ ID NO: 140499

SEQ ID NO: 142622 - DNA, 1233 bp, Hordeum vulgare; identical to SEQ ID NO: 140500
  CDS (1)..(1233)

SEQ ID NO: 142623 - protein, 410 aa, Hordeum vulgare; identical to SEQ ID NO: 140501

SEQ ID NO: 142624 - DNA, 1209 bp, Hordeum vulgare; identical to SEQ ID NO: 140502
  CDS (1)..(1209)

SEQ ID NO: 142625 - protein, 402 aa, Hordeum vulgare; identical to SEQ ID NO: 140503

SEQ ID NO: 142626 - DNA, 882 bp, Hordeum vulgare; identical to SEQ ID NO: 63129
  CDS (1)..(882)

SEQ ID NO: 142627 - protein, 293 aa, Hordeum vulgare; identical to SEQ ID NO: 63130

SEQ ID NO: 142628 - DNA, 1248 bp, Linum usitatissimum; identical to SEQ ID NO: 140508
  CDS (1)..(1248)

SEQ ID NO: 142629 - protein, 415 aa, Linum usitatissimum; identical to SEQ ID NO: 140509

SEQ ID NO: 142630 - DNA, 1146 bp, Linum usitatissimum; identical to SEQ ID NO: 140344
  CDS (1)..(1146)

SEQ ID NO: 142631 - protein, 381 aa, Linum usitatissimum; identical to SEQ ID NO: 140345

SEQ ID NO: 142632 - DNA, 1128 bp, Linum usitatissimum; identical to SEQ ID NO: 140512
  CDS (1)..(1128)

SEQ ID NO: 142633 - protein, 375 aa, Linum usitatissimum; identical to SEQ ID NO: 140513

SEQ ID NO: 142634 - DNA, 885 bp, Linum usitatissimum; identical to SEQ ID NO: 63131
  CDS (1)..(885)

SEQ ID NO: 142635 - protein, 294 aa, Linum usitatissimum; identical to SEQ ID NO: 63132

SEQ ID NO: 142636 - DNA, 1128 bp, Linum usitatissimum; identical to SEQ ID NO: 140516
  CDS (1)..(1128)

SEQ ID NO: 142637 - protein, 375 aa, Linum usitatissimum; identical to SEQ ID NO: 140517

SEQ ID NO: 142638 - DNA, 885 bp, Linum usitatissimum; identical to SEQ ID NO: 63069
  CDS (1)..(885)

SEQ ID NO: 142639 - protein, 294 aa, Linum usitatissimum; identical to SEQ ID NO: 63070

SEQ ID NO: 142640 - DNA, 879 bp, Zea mays; identical to SEQ ID NO: 63133
  CDS (1)..(879)

SEQ ID NO: 142641 - protein, 292 aa, Zea mays; identical to SEQ ID NO: 63134

SEQ ID NO: 142642 - DNA, 1413 bp, Zea mays
  CDS (1)..(1413)
atggagagatatacaattatcaacgaagttggtgatggaacatttgggagtgtttggcgtgcaaccaataaggaaagcggtgaagtggttgcgatcaagaagatgaagaaaaagtattattcttgggaagagtgcataaacctccgtgaagtgaagtccctgcgaaggatgaaccatccaaacattgtaaagctcaaagaagtcataagagagagtgatacgctgttctttgtttttgagtacatggaatgcagtctttatcagctgatgaagagcagagggaagcccttttcagagactgaaatccgaaactggtgctttcaaatatttcaagctctgagtcacatgcaccagcgtggatattttcaccgtgaccttaagcctgaaaatttgcttgttacaaaggaactcatcaagatagcggattttgggcttgctcgtgaaatttcttctgagccaccttatacggaatatgtgtccactcgttggtatcgtgcccctgaagttcttcttcaagctactgtttataatgctgcagttgacatgtgggcaatgggtgccattatcgcggagctattttcactgcgacctctttttcctggatcaagtgagccagatgaactttacaaaatctgtagcattattggcactccaaatcagcgtacttggcctgaaggactgcagctagcagcatctatgggttttcagttccctcagtgtgaaagtgtacatctttcggaagtggttcctttagcaagcaaagatgcaatcaatcttatctcgtggctttgctcatgggacccacgaagaaggccaacagcagtggaggttttgcagcatcccttctttcagccatgcttctatgtcccaccttcacttcgcttcaaatctactggatatgcatcaacgccaccatcagctggggctaaaggagctgttgatcagaagaacattaggagatactacatgggtactgtacccaatgcgaggccaacagttaattactcgtacttgagaaacaatgctcctgcaagagcagttggtgcacaaaggaaattggagttggattatcagctcccagagactaataaccataataaggtgacaaaggcagaagcgatgaaccagtcttggtccagaccagcagcagtaaggagcaatgcaggaaatcatcttgccaacgacctgaacccccgtgtacctgaccttgccgagaagctgtctcagttgtcaatgggccccaacagggtgtcgggtttgggttccgagaggtttgttagaacccatgagaacgctgccaagcgccccttgcccgtgggatccagggcgtggcatggtccagctgaccccttccggcgcccatacgagatgccaggtgatagaactctccttccaaggaatctcgttcgctga

SEQ ID NO: 142643 - protein, 470 aa, Zea mays
MERYTIINEVGDGTFGSVWRATNKESGEVVAIKKMKKKYYSWEECINLREVKSLRRMNHPNIVKLKEVIRESDTLFFVFEYMECSLYQLMKSRGKPFSETEIRNWCFQIFQALSHMHQRGYFHRDLKPENLLVTKELIKIADFGLAREISSEPPYTEYVSTRWYRAPEVLLQATVYNAAVDMWAMGAIIAELFSLRPLFPGSSEPDELYKICSIIGTPNQRTWPEGLQLAASMGFQFPQCESVHLSEVVPLASKDAINLISWLCSWDPRRRPTAVEVLQHPFFQPCFYVPPSLRFKSTGYASTPPSAGAKGAVDQKNIRRYYMGTVPNARPTVNYSYLRNNAPARAVGAQRKLELDYQLPETNNHNKVTKAEAMNQSWSRPAAVRSNAGNHLANDLNPRVPDLAEKLSQLSMGPNRVSGLGSERFVRTHENAAKRPLPVGSRAWHGPADPFRRPYEMPGDRTLLPRNLVR

SEQ ID NO: 142644 - DNA, 1233 bp, Triticum aestivum; identical to SEQ ID NO: 140524
  CDS (1)..(1233)

SEQ ID NO: 142645 - protein, 410 aa, Triticum aestivum; identical to SEQ ID NO: 140525

SEQ ID NO: 142646 - DNA, 1227 bp, Triticum aestivum
  CDS (1)..(1227)
atgacctcatttggtgtcgcaccggcatctgggctgagagatgctggtggtagtagtgaagtggataaattgccggatgaaattagtaatatgagaataagtgacgaaaaggaagtagaggcaacaatcatcaatgggaatggaacagaagctggtcatattatagtcacaactatcggaggcagagatggccaaaggaagcagacaataagttacatggctgaacgtgtcattggtcaaggatcatttggtgttgtgttccaggcaaaatgtttggagacaagtgagacagtagctatcaagaaggtccttcaggataagagatacaagaaccgtgagttgcaaatgatgcgtctacttgaccatccaaatgtcgtatctctgaaacactgcttcttctcaaccactgaaaaggatgaactctttctgaatcttgtgcttgagtatgttcctgagacagttcaccgtgtcatcagacactacaacaagatgaaccaacgcatgccactgatatatgtgaagctatatacttatcagatttgtagggcactggcctatatccatcgcaccgttggtgtttgccacagggacataaaaccacagaatcttctggttaacccacacactcatcagctgaagatctgtgattttggaagtgcaaaagttctggtgaagggcgaacccaatatatcatacatctgctctaggtactatagggcaccagagcttatttttggtgctactgagtacacaacagcaattgacatctggtctgctggatgtgttcttgctgaacttctgacaggacagcctttgtttcctggtgaaagtggagttgatcaacttgttgaaattatcaagattctgggcactcctacaagggaagaaatcaaatgtatgaacccgaactacacggaatttaagtttccccaaatcaaggcccatccatggcataaggtgttccacagacgaatgccgcctgaagcagtggacctggtttccaggcttcttcagtactcaccgcaccttcggtcctcagctctggacgctctgatccatccgttcttcgacgagctccgggacccaaacacccgcctccccaacggccggttcctacctcccctcttcaacttcaagcctcacgagctgaaggggcttccgatggagatcgcggcgaagctggtcccggagcacgcgaggagccaatgccccttcctagggctgtag

SEQ ID NO: 142647 - protein, 408 aa, Triticum aestivum; identical to SEQ ID NO: 140341

SEQ ID NO: 142648 - DNA, 1209 bp, Triticum aestivum; identical to SEQ ID NO: 140526
  CDS (1)..(1209)

SEQ ID NO: 142649 - protein, 402 aa, Triticum aestivum; identical to SEQ ID NO: 140527

SEQ ID NO: 142650 - DNA, 1110 bp, Triticum aestivum; identical to SEQ ID NO: 63135
  CDS (1)..(1110)

SEQ ID NO: 142651 - protein, 369 aa, Triticum aestivum; identical to SEQ ID NO: 63136

SEQ ID NO: 142652 - DNA, 1206 bp, Triticum aestivum; identical to SEQ ID NO: 140530
  CDS (1)..(1206)

SEQ ID NO: 142653 - protein, 401 aa, Triticum aestivum; identical to SEQ ID NO: 140531

SEQ ID NO: 142654 - DNA, 1650 bp, Triticum aestivum; identical to SEQ ID NO: 140532
  CDS (1)..(1650)

SEQ ID NO: 142655 - protein, 549 aa, Triticum aestivum; identical to SEQ ID NO: 140533

SEQ ID NO: 142656 - DNA, 981 bp, Triticum aestivum; identical to SEQ ID NO: 63137
  CDS (1)..(981)

SEQ ID NO: 142657 - protein, 326 aa, Triticum aestivum; identical to SEQ ID NO: 63138

SEQ ID NO: 142658 - DNA, 1842 bp, Triticum aestivum; identical to SEQ ID NO: 140536
  CDS (1)..(1842)

SEQ ID NO: 142659 - protein, 613 aa, Triticum aestivum; identical to SEQ ID NO: 140537

SEQ ID NO: 142660 - DNA, 1209 bp, Triticum aestivum; identical to SEQ ID NO: 140538
  CDS (1)..(1209)

SEQ ID NO: 142661 - protein, 402 aa, Triticum aestivum; identical to SEQ ID NO: 140539

SEQ ID NO: 142662 - DNA, 1110 bp, Triticum aestivum; identical to SEQ ID NO: 63139
  CDS (1)..(1110)

SEQ ID NO: 142663 - protein, 369 aa, Triticum aestivum; identical to SEQ ID NO: 63140

SEQ ID NO: 142664 - DNA, 1131 bp, Triticum aestivum; identical to SEQ ID NO: 140542
  CDS (1)..(1131)

SEQ ID NO: 142665 - protein, 376 aa, Triticum aestivum; identical to SEQ ID NO: 140543

SEQ ID NO: 142666 - DNA, 1797 bp, Triticum aestivum; identical to SEQ ID NO: 140544
  CDS (1)..(1797)

SEQ ID NO: 142667 - protein, 598 aa, Triticum aestivum; identical to SEQ ID NO: 140545

SEQ ID NO: 142668 - DNA, 1233 bp, Triticum aestivum; identical to SEQ ID NO: 140548
  CDS (1)..(1233)

SEQ ID NO: 142669 - protein, 410 aa, Triticum aestivum; identical to SEQ ID NO: 140549

SEQ ID NO: 142670 - DNA, 1755 bp, Triticum aestivum; identical to SEQ ID NO: 140552
  CDS (1)..(1755)

SEQ ID NO: 142671 - protein, 584 aa, Triticum aestivum; identical to SEQ ID NO: 140553

SEQ ID NO: 142672 - DNA, 1221 bp, Triticum aestivum; identical to SEQ ID NO: 140554
  CDS (1)..(1221)

SEQ ID NO: 142673 - protein, 406 aa, Triticum aestivum; identical to SEQ ID NO: 140555

SEQ ID NO: 142674 - DNA, 1227 bp, Zea mays; identical to SEQ ID NO: 140576
  CDS (1)..(1227)

SEQ ID NO: 142675 - protein, 408 aa, Zea mays; identical to SEQ ID NO: 140577

SEQ ID NO: 142676 - DNA, 1413 bp, Zea mays; identical to SEQ ID NO: 140556
  CDS (1)..(1413)

SEQ ID NO: 142677 - protein, 470 aa, Zea mays; identical to SEQ ID NO: 140557

SEQ ID NO: 142678 - DNA, 1119 bp, Zea mays; identical to SEQ ID NO: 140558
  CDS (1)..(1119)

SEQ ID NO: 142679 - protein, 372 aa, Zea mays; identical to SEQ ID NO: 140559

SEQ ID NO: 142680 - DNA, 1227 bp, Zea mays; identical to SEQ ID NO: 140560
  CDS (1)..(1227)

SEQ ID NO: 142681 - protein, 408 aa, Zea mays; identical to SEQ ID NO: 140561

SEQ ID NO: 142682 - DNA, 993 bp, Zea mays; identical to SEQ ID NO: 62727
  CDS (1)..(993)

SEQ ID NO: 142683 - protein, 330 aa, Zea mays; identical to SEQ ID NO: 62728

SEQ ID NO: 142684 - DNA, 1635 bp, Zea mays; identical to SEQ ID NO: 140566
  CDS (1)..(1635)

SEQ ID NO: 142685 - protein, 544 aa, Zea mays; identical to SEQ ID NO: 140567

SEQ ID NO: 142686 - DNA, 1866 bp, Zea mays; identical to SEQ ID NO: 140568
  CDS (1)..(1866)

SEQ ID NO: 142687 - protein, 621 aa, Zea mays; identical to SEQ ID NO: 140569

SEQ ID NO: 142688 - DNA, 1413 bp, Zea mays; identical to SEQ ID NO: 140572
  CDS (1)..(1413)

SEQ ID NO: 142689 - protein, 470 aa, Zea mays; identical to SEQ ID NO: 140573

SEQ ID NO: 142690 - DNA, 1533 bp, Zea mays; identical to SEQ ID NO: 140574
  CDS (1)..(1533)

SEQ ID NO: 142691 - protein, 510 aa, Zea mays; identical to SEQ ID NO: 140575

SEQ ID NO: 142692 - DNA, 1197 bp, Zea mays; identical to SEQ ID NO: 140562
  CDS (1)..(1197)

SEQ ID NO: 142693 - protein, 398 aa, Zea mays; identical to SEQ ID NO: 140563

SEQ ID NO: 142694 - DNA, 1998 bp, Zea mays
  CDS (1)..(1998)
atggctgcggcgcggcacgggggttataggagcttcgacgtggccaggaggcgggagttcgacctggagcgttctaggaggagcaaggagtaccgccactcgagccgccaccgcgactcggatcgccaccgtgatggcagcaggggccgtgaagtgcccaacgggtacatccgccaccgctcgccgtatgcgccaccgaagagccgaccttcaaaaaggaaggacgataaggagcctggtgaggtctcaagcgatagcggctcggagtctggtgggcgcccaccagtgctgagggaggatgggggtcttggggtctgcagggatggaggtgcgttgccagcaagcaagaagaggaagcactcacctggattccacgatacgaatgtttcaaagctgcgggcaagagatgaggtgtggagcaggagaggacctgatgccatagctgtggagctccctcttccttcgccaccccctatgtctgcggttggtgggtgctcaccaatggatccagaagttttggtagttccaaatgatgctgaaaggatggacgcgattactgagggggaagaggattgtgcaacgagaaacatttttacttcaaggtgggcggatgctgctgaagaggaggaagtggtgattgtgcctaagaagaagaaaagtgtgccacctgctcatttgcctgaacagaaatccacaaagaaaatcatgggctcagagctgggagaagcgatgggcagtaaaacatcaagaagaagttcctcaagttcgtctaactcaatgggtagtgaaaactggaatatcgaggtagacgagggtgatggcattgattcttctgttggttgttcgctggatactcattccaggagcaatatgcgtaggtctggatcacctgaggttgtgcgaacaccacgtaggtgctttaacatgcttcagggctgtaggagtattgatgactttgagaggatcaacacaatcaatgagggtacatatggagtcgtatttagggtgagagacaagaaaactggtgagatagttgctttgaagaaggtcaaggtagataaggaaaatggacgggaagggtttccattgacttctctcagagaaatcaatatccttctatcctttgaccatccttcaattgtggatgtcaaggaagtagttgttggtggtcatgacgatgatacttttatggtgatggaatacatggagcatgaccttaagggtgtcatggaggcgatgaagcaaccatatagccaaagtgaggtcaaatgtttgatgcttcagctgctagagggcgtgaagtatcttcatgacaattgggtacttcacagggatctcaagacatcaaatctcctcttgaataaccgcggtgagttgaaaatatgtgactttggactctctcgtcaatatggcagcctgctaaagccttacacccaaccagttgtgactttgtggtacagggctccggaactactattaggagcaaaggagtattcgactgctatcgatatgtggtcattaggttgcataatggcagaactcttgtcaaaagagccactcttcactgggaagtctgagatagatcaacttgataagatatttagaatactcggcacacccaatgaggagcggtggcatggttgttccaaattgcctggcttcaaaggcaacttcgtaaagcgaccgtacaatagattaagggacaaatttccagctgtatccttcacgggaggcttgaccttgtcagaagctgggtttgacctgctaaataggttgttggcatatgaccctgagaagcgcatatctgctgctgatgccttgaaccatgagtggttccgtgaagttcctctgcccaagatgaaggaattcatgccaacttttcctgctctgaatgaacaggacaggaggatcaagagatacatgaagagccctgaccccttggtggagcaacagatgaaagaacaagggagcataggagatcatggcctttttgactga

SEQ ID NO: 142695 - protein, 665 aa, Zea mays
MAAARHGGYRSFDVARRREFDLERSRRSKEYRHSSRHRDSDRHRDGSRGREVPNGYIRHRSPYAPPKSRPSKRKDDKEPGEVSSDSGSESGGRPPVLREDGGLGVCRDGGALPASKKRKHSPGFHDTNVSKLRARDEVWSRRGPDAIAVELPLPSPPPMSAVGGCSPMDPEVLVVPNDAERMDAITEGEEDCATRNIFTSRWADAAEEEEVVIVPKKKKSVPPAHLPEQKSTKKIMGSELGEAMGSKTSRRSSSSSSNSMGSENWNIEVDEGDGIDSSVGCSLDTHSRSNMRRSGSPEVVRTPRRCFNMLQGCRSIDDFERINTINEGTYGVVFRVRDKKTGEIVALKKVKVDKENGREGFPLTSLREINILLSFDHPSIVDVKEVVVGGHDDDTFMVMEYMEHDLKGVMEAMKQPYSQSEVKCLMLQLLEGVKYLHDNWVLHRDLKTSNLLLNNRGELKICDFGLSRQYGSLLKPYTQPVVTLWYRAPELLLGAKEYSTAIDMWSLGCIMAELLSKEPLFTGKSEIDQLDKIFRILGTPNEERWHGCSKLPGFKGNFVKRPYNRLRDKFPAVSFTGGLTLSEAGFDLLNRLLAYDPEKRISAADALNHEWFREVPLPKMKEFMPTFPALNEQDRRIKRYMKSPDPLVEQQMKEQGSIGDHGLFD

SEQ ID NO: 142696 - DNA, 1221 bp, Zea mays; identical to SEQ ID NO: 140578
  CDS (1)..(1221)

SEQ ID NO: 142697 - protein, 406 aa, Zea mays; identical to SEQ ID NO: 140579

SEQ ID NO: 142698 - DNA, 981 bp, Zea mays; identical to SEQ ID NO: 63143
  CDS (1)..(981)

SEQ ID NO: 142699 - protein, 326 aa, Zea mays; identical to SEQ ID NO: 63144

SEQ ID NO: 142700 - DNA, 909 bp, Zea mays; identical to SEQ ID NO: 63145
  CDS (1)..(909)

SEQ ID NO: 142701 - protein, 302 aa, Zea mays; identical to SEQ ID NO: 63146

SEQ ID NO: 142702 - DNA, 1215 bp, Zea mays; identical to SEQ ID NO: 140584
  CDS (1)..(1215)

SEQ ID NO: 142703 - protein, 404 aa, Zea mays; identical to SEQ ID NO: 140585

SEQ ID NO: 142704 - DNA, 1233 bp, Zea mays; identical to SEQ ID NO: 140588
  CDS (1)..(1233)

SEQ ID NO: 142705 - protein, 410 aa, Zea mays; identical to SEQ ID NO: 140589

SEQ ID NO: 142706 - DNA, 1767 bp, Zea mays; identical to SEQ ID NO: 140590
  CDS (1)..(1767)

SEQ ID NO: 142707 - protein, 588 aa, Zea mays; identical to SEQ ID NO: 140591

SEQ ID NO: 142708 - DNA, 2169 bp, Zea mays
  CDS (1)..(2169)
atggccgctgggcgccatgggggttacagggactacgaggcgagggagcgggagctcgacgcggaggcctccaggaggagcaaggagcagcaccaccatctcggcggccgccaccgcgacgtggaccgccaccgcgatggcgggcgcagcaggggtggcagagactttgccaacggctacggtcgccgacgctcgccgccaccccggagccggctggcgggaaggcttggtgaccgtgagcctggcgaggtgctgaaccgtagtgcatctgatgactccggtgggaggccgcatagagggagggagaatggcgtgctcagttccggcagggagggtgatgtgatggcagtcactgatgactccggtgggaggtcgcataggaggagggagaatggcgtgcgcagttccagcagggagggcgacatgatggcaggcacagggatatcgtcaccgagcaagaagaggaaattctcaccgataatttgggacagggatagcccaaagccaccacattctgatgcagccagggacaagaaagcggtagaacctgtgccttctgagctccctccgcccccgccgctgcctccacaagaccacatcacactgagcttggctgtggagaagtcacctatggatatagaaactactgttggtacagagagtgctgagcagttgccggaacatgaggtcaataaggtgacagagcaggaagaggactatccaagtccaacaatgaggaacatatcgacttcaagatgggcgggtgcaaatgatgatgaggaagatggggcagctccaatgaagaagaaaagtctgtcacctgcagactcctctgtaccagggcagtggaaaagagcaagcccagaacctggtgaagtatctggaggaaggacaatgtctaggtcatctgactcagggaaaataagtaatgatgagaaagaagattccgaggtcgataaagatgactatatggatgttgacagggagcatgctagtgacagtggtacagaaaactgtatgtcggatactgactcagacaatgaaatgtgcaggcctgaaacccctgaaccagagaggccaccacacaggtgtatcaatatgcttcaaggttgcagaagtgttgatgagtttgagaggctcaacaaaattaatgagggaacatatggtgttgtatacagagcaagggataagaagacaagtgagattgttgcattgaagaaggtaaagatggagagggagcgagaaggtttcccattaacctctcttagggaaataaatatcctcttgtctttccaccatccttcaatcgtggatgttaaggaagtagtagttggaagtagtttagatagcatttttatggttatggagtacatggaacatgatcttaaaggtgtcatggagaccatgaaacaaccatatacacaaagcgaggtcaaatgtttgatgcttcagctgctagagggtgtaaaatatctacatgacaattgggtactccatagggatctgaagacctcaaatcttttgctgaataaccgtggtgagttaaaaatatgtgattttggactgtctcgtcaatatgggagcccattaaaaccttatactcaactggttgtgactttgtggtacagggccccagaactgttgttaggaacaaaggagtattctactgctattgatatgtggtccgtgggctgtataatggctgagctccttgccaaagaaccattatttaatggaaaaacagagtttgaacagctagataagatttttagaacacttggcacacctagcgagaagatttggcctggctatgctaaattaccaggcgtgaaagtaaattttgtcaaacaaccgtataataggctaagggataagttcccagctgcatctttttctgggcgaccaatcctgtctgaagctggttttgatctattgaatagactgctaacttatgatcctgataagcgcatatcagcagacgatgctctgaaacacaaatggttctctgaagttcctctgcctaaatcaaaagacttcatgccaacatttcctgctcttaatgaacttgacaggcgtaccaaacgttatctgaagagtcctgatcctctggaagagcaacgtctgaaagaactgcaagggaacataggcaaccgtgggctttttggctga

SEQ ID NO: 142709 - protein, 722 aa, Zea mays
MAAGRHGGYRDYEARERELDAEASRRSKEQHHHLGGRHRDVDRHRDGGRSRGGRDFANGYGRRRSPPPRSRLAGRLGDREPGEVLNRSASDDSGGRPHRGRENGVLSSGREGDVMAVTDDSGGRSHRRRENGVRSSSREGDMMAGTGISSPSKKRKFSPIIWDRDSPKPPHSDAARDKKAVEPVPSELPPPPPLPPQDHITLSLAVEKSPMDIETTVGTESAEQLPEHEVNKVTEQEEDYPSPTMRNISTSRWAGANDDEEDGAAPMKKKSLSPADSSVPGQWKRASPEPGEVSGGRTMSRSSDSGKISNDEKEDSEVDKDDYMDVDREHASDSGTENCMSDTDSDNEMCRPETPEPERPPHRCINMLQGCRSVDEFERLNKINEGTYGVVYRARDKKTSEIVALKKVKMEREREGFPLTSLREINILLSFHHPSIVDVKEVVVGSSLDSIFMVMEYMEHDLKGVMETMKQPYTQSEVKCLMLQLLEGVKYLHDNWVLHRDLKTSNLLLNNRGELKICDFGLSRQYGSPLKPYTQLVVTLWYRAPELLLGTKEYSTAIDMWSVGCIMAELLAKEPLFNGKTEFEQLDKIFRTLGTPSEKIWPGYAKLPGVKVNFVKQPYNRLRDKFPAASFSGRPILSEAGFDLLNRLLTYDPDKRISADDALKHKWFSEVPLPKSKDFMPTFPALNELDRRTKRYLKSPDPLEEQRLKELQGNIGNRGLFG

SEQ ID NO: 142710 - DNA, 1299 bp, Zea mays; identical to SEQ ID NO: 140592
  CDS (1)..(1299)

SEQ ID NO: 142711 - protein, 432 aa, Zea mays; identical to SEQ ID NO: 140593

SEQ ID NO: 142712 - DNA, 1476 bp, Zea mays; identical to SEQ ID NO: 140594
  CDS (1)..(1476)

SEQ ID NO: 142713 - protein, 491 aa, Zea mays; identical to SEQ ID NO: 140595

SEQ ID NO: 142714 - DNA, 879 bp, Zea mays; identical to SEQ ID NO: 63147
  CDS (1)..(879)

SEQ ID NO: 142715 - protein, 292 aa, Zea mays; identical to SEQ ID NO: 63148

SEQ ID NO: 142716 - DNA, 1413 bp, Zea mays; identical to SEQ ID NO: 140598
  CDS (1)..(1413)

SEQ ID NO: 142717 - protein, 470 aa, Zea mays; identical to SEQ ID NO: 140599

SEQ ID NO: 142718 - DNA, 1740 bp, Zea mays; identical to SEQ ID NO: 140600
  CDS (1)..(1740)

SEQ ID NO: 142719 - protein, 579 aa, Zea mays; identical to SEQ ID NO: 140601

SEQ ID NO: 142720 - DNA, 1110 bp, Zea mays; identical to SEQ ID NO: 63149
  CDS (1)..(1110)

SEQ ID NO: 142721 - protein, 369 aa, Zea mays; identical to SEQ ID NO: 63150

SEQ ID NO: 142722 - DNA, 1674 bp, Zea mays; identical to SEQ ID NO: 140604
  CDS (1)..(1674)

SEQ ID NO: 142723 - protein, 557 aa, Zea mays; identical to SEQ ID NO: 140605

SEQ ID NO: 142724 - DNA, 2088 bp, Zea mays
  CDS (1)..(2088)
atgggctgcgtctgcggtctcccctccgcctttgacgacggccagtgccgcgcgacgcctccgccggccgcgaagctctcggcggcggtgaggagcaaggaggaagcacggaaacagcagcagctccagcttcagcagcatgtgagggcagggagcggaagggaggaggcgctcgagaggaggcgagcaatgatggcgatggcggcggtgtgccaggtgaggagcccggtgccgagggcggttgaggcggagcatgtggccgtggggtggccgccgtggctcgtcgccgtcgccccggaggccgtgcgcggatgggtgccccgccgcgccgagtcgttcgagaagctcgacaagattggtcagggtacatacagtaatgtttacagagctcgtgacctcgaaaaggagaagattgttgctttgaagaaagtgcgctttgataatttggaacctgagagcgtgaaatttatggcaagggaaatcctcattttgcgccgacttgatcatccaaatgttatcaaactagagggtctagtaacatcaaggatgtcctgcagcttatatcttgtttttgagtacatggagcatgatctagccggactagcttctttccctggagtaaaatttactgagtctcaggtaaagtgttacatgcaacagctcctccgtggtcttgagcattgccacagccgtcacattctgcaccgtgacattaagggttcaaatctcttgattgataaccgaggcatattgaagatagcagattttggattggcaagtttctttgatcctgaacaacgacagcctttgactagccgtgttgtcacactatggtacaggccaccagagctcttgctcggtgccaccaattatggtgttgccgtagacctctggagtgctggctgcattcttgccgagctatatgctggcaagcctatcatgcccggcagaacagaggttgagcagttgcataaaatatttaaactttgtggttcaccgtcagaggattattggaggaaatctaagcttccccatgccaccattttcaaaccgcaacacccgtatgcaaggcgtgtagcagaaacattcaaagagttccctgctcctactctggcattagtagatgttcttctttcagtagacccagcagatcgtggaactgcgtcttctgcattgcaaagtgagttttttacaacaaaaccatatgcttgcaatccttcaagcttgcctaggtaccctccaagcaaagagtttgatgcaaaacgtcgggaggaggaagctcgaaggcaaggtgttactggaggaaagcagcataaacatgatcctgaaaggagaactagagaatcaagagcagtccctgcccctgatgcaaatgcagaattagtgtcatcattgcagaaaaggcgagcccaagctaataccaggagcaggagtgagatgttcaatccctgcaaagaagactctgcgtctggattccgaattgaaccaccccgtccgactcctgttaccgagtcttctgaagacccgcaacgtgcctatccgaccaggatctttcattctgggcctttagttaatcagagtcagccatcaaaggctggaggtggcaaaaatggtgaacttcaggtccctggtgttgcgaatcaccctgtggttttgtcatctagaacaggtccccgagcagatgatagtagttggacaatggttgctcaagctggagcattttctcatgggcggaggctgtcggaatccatcaatgagcatctcagtaacagtgggaagtacgatcaagtgttcccgaagaaggatgacaggaacactattagggctgatggagctattggctacggatccaagggcaacaagatccaccattctgggcccctgacctgcccttcgggcagcgtcgtcgacgagatgctaaaagagaacgaccggcaaatccaagaagtcttccggcgaacccgggtggagaagtcgagagcgaggagggaccatggacatcaccagggcggcatgaggcccgccgattttggcgccatcccggtcttcccttccagccgctccagttatcaggccgtgcaacagtga

SEQ ID NO: 142725 - protein, 695 aa, Zea mays
MGCVCGLPSAFDDGQCRATPPPAAKLSAAVRSKEEARKQQQLQLQQHVRAGSGREEALERRRAMMAMAAVCQVRSPVPRAVEAEHVAVGWPPWLVAVAPEAVRGWVPRRAESFEKLDKIGQGTYSNVYRARDLEKEKIVALKKVRFDNLEPESVKFMAREILILRRLDHPNVIKLEGLVTSRMSCSLYLVFEYMEHDLAGLASFPGVKFTESQVKCYMQQLLRGLEHCHSRHILHRDIKGSNLLIDNRGILKIADFGLASFFDPEQRQPLTSRVVTLWYRPPELLLGATNYGVAVDLWSAGCILAELYAGKPIMPGRTEVEQLHKIFKLCGSPSEDYWRKSKLPHATIFKPQHPYARRVAETFKEFPAPTLALVDVLLSVDPADRGTASSALQSEFFTTKPYACNPSSLPRYPPSKEFDAKRREEEARRQGVTGGKQHKHDPERRTRESRAVPAPDANAELVSSLQKRRAQANTRSRSEMFNPCKEDSASGFRIEPPRPTPVTESSEDPQRAYPTRIFHSGPLVNQSQPSKAGGGKNGELQVPGVANHPVVLSSRTGPRADDSSWTMVAQAGAFSHGRRLSESINEHLSNSGKYDQVFPKKDDRNTIRADGAIGYGSKGNKIHHSGPLTCPSGSVVDEMLKENDRQIQEVFRRTRVEKSRARRDHGHHQGGMRPADFGAIPVFPSSRSSYQAVQQ

SEQ ID NO: 142726 - DNA, 2262 bp, Zea mays
  CDS (1)..(2262)
atgggctgtgtcagttccagacaatcccacggcggggacgaccgtggggacggcaagccgcgccggcggccctcgagcaactcgctgaagcgcctggttagttccagttccagcaagaggcatgaggagttagaagaggagtatgaggaaggggtggctgtggcagccacgtcctcaagcgccggacgccgcgctgggaatgacgccagcacggcgaggttgatccggaagcctccagcattggtggtcgaggctgtgccggcattgttagaggaggcagccactttggcggttggtgtagttgatgcagaaagggaggtttctgcaacgactgggaaccggaagaggcctccaggggatgtacaagtcaatggtgtggcggaacaagagccgaggagcggtggcgttagggcagagggggaggccaaactgaggaccaaggacatgcccaatggcgtccagggggagcacgtggcagcaggatggccgagatggctcacagaggtggcggcagaggcggttcgtgggtggcaacctcggagggccgagtcttttgagaagttggacaagataggacaaggtacatatagcagcgtttataaagcacgtgatcttgagaacggaaaaattgtggctctgaagaaagttcggtttgccaatatggaccctgagagtgtccgatttatggcaagggaaatccacatcttaagaagacttgatcatccaaatgtcatcaaacttgaaggtttggtgacgtcacgcatgtcaagcagcttgtatcttgtatttgaatacatggagcatgaccttgcaggccttgcagctaccccaggcttaaaattctcagaacctcaggtcaagtgttacatgcaacagctactctctggacttgaccattgtcataaccgtggtgttttgcatcgggatataaagggtgcaaatctcctacttgacaataatggcattcttaaaatagcagattttggtctagctacattctttaatcccaaccaaaaacaacatttgacaagtcgcgtagtaacattgtggtaccggcctcctgagcttttgttgggttctactaactatggtgctgctgttgatctatggagtgccggttgcattcttgctgagttgctgtcagggaagcctatcatgccaggacgaactgaggtggaacagttacacaagatttttaagctttgtggttcaccatcagaggagttttgggctaatctgaagttatcccgagctaccatattcaagcctcagcatccgtaccgccgatgtgtgaatgatgtatataaggacttccctactactgctttaacacttctggactatctacttgctgtagaacctgggaataggggtaccgctgcatctgcccttgacagtgaattctttacaacaaagccttatgcctgtgatccatcaaatctacccaaatatcccccaagcaaggaatacgatgctaagcttcgagatgaagaagctaggaggcaaagagcagctgctaaaggacaggaagctgaagctggacggaggaagcaacttcctgcacccgatggtaatagtggattgcagcaccaccgagttcaggtgaattccaaaaacagcacttacaagttcactccaaaggaggatgtttctggatttccaattgatccgtcagcaagagctgcagataatggttacccacagcgtgttcctttgatgcaagctggccgttcttcgtccactctgggcagatcaagtggaatggatccaaaagcccaacgatttcacacctcccaaattgttactattactacagaaatgtccaaccaatctactgcatctgggcagagaggcaatgctccgaagatgtctaaccttggggaaagtgcccggaggcaatatttgagagagcaccggtccagttcaagatacagtcagctcaccgctgctgacccttctgacagacctgagtggaatcatcagttccaagaaagaccatcatcttcccatcggaaggatgatgctgcggtaaacaaagagactacagtggtgaatggcacaaagaagaacagaatccactattcgggaccactgatgcctcacggagcgaatatggatgagattcttagagagcacgagcgacagatccaacaggcggtacgaagagcccgccttgacaaggggaagggaaagcacaacggcgagagagaccagtcagaggcactgctgtacaccaccgggaatgtcagggctgatcgctga

SEQ ID NO: 142727 - protein, 753 aa, Zea mays
MGCVSSRQSHGGDDRGDGKPRRRPSSNSLKRLVSSSSSKRHEELEEEYEEGVAVAATSSSAGRRAGNDASTARLIRKPPALVVEAVPALLEEAATLAVGVVDAEREVSATTGNRKRPPGDVQVNGVAEQEPRSGGVRAEGEAKLRTKDMPNGVQGEHVAAGWPRWLTEVAAEAVRGWQPRRAESFEKLDKIGQGTYSSVYKARDLENGKIVALKKVRFANMDPESVRFMAREIHILRRLDHPNVIKLEGLVTSRMSSSLYLVFEYMEHDLAGLAATPGLKFSEPQVKCYMQQLLSGLDHCHNRGVLHRDIKGANLLLDNNGILKIADFGLATFFNPNQKQHLTSRVVTLWYRPPELLLGSTNYGAAVDLWSAGCILAELLSGKPIMPGRTEVEQLHKIFKLCGSPSEEFWANLKLSRATIFKPQHPYRRCVNDVYKDFPTTALTLLDYLLAVEPGNRGTAASALDSEFFTTKPYACDPSNLPKYPPSKEYDAKLRDEEARRQRAAAKGQEAEAGRRKQLPAPDGNSGLQHHRVQVNSKNSTYKFTPKEDVSGFPIDPSARAADNGYPQRVPLMQAGRSSSTLGRSSGMDPKAQRFHTSQIVTITTEMSNQSTASGQRGNAPKMSNLGESARRQYLREHRSSSRYSQLTAADPSDRPEWNHQFQERPSSSHRKDDAAVNKETTVVNGTKKNRIHYSGPLMPHGANMDEILREHERQIQQAVRRARLDKGKGKHNGERDQSEALLYTTGNVRADR

SEQ ID NO: 142728 - DNA, 1113 bp, Zea mays; identical to SEQ ID NO: 63151
  CDS (1)..(1113)

SEQ ID NO: 142729 - protein, 370 aa, Zea mays; identical to SEQ ID NO: 63152

SEQ ID NO: 142730 - DNA, 1476 bp, Zea mays; identical to SEQ ID NO: 63153
  CDS (1)..(1476)

SEQ ID NO: 142731 - protein, 491 aa, Zea mays; identical to SEQ ID NO: 63154

SEQ ID NO: 142732 - DNA, 1635 bp, Zea mays; identical to SEQ ID NO: 140612
  CDS (1)..(1635)

SEQ ID NO: 142733 - protein, 544 aa, Zea mays; identical to SEQ ID NO: 140613

SEQ ID NO: 142734 - DNA, 1806 bp, Zea mays; identical to SEQ ID NO: 140616
  CDS (1)..(1806)

SEQ ID NO: 142735 - protein, 601 aa, Zea mays; identical to SEQ ID NO: 140617

SEQ ID NO: 142736 - DNA, 1131 bp, Zea mays; identical to SEQ ID NO: 140618
  CDS (1)..(1131)

SEQ ID NO: 142737 - protein, 376 aa, Zea mays; identical to SEQ ID NO: 140619

SEQ ID NO: 142738 - DNA, 978 bp, Zea mays; identical to SEQ ID NO: 63157
  CDS (1)..(978)

SEQ ID NO: 142739 - protein, 325 aa, Zea mays; identical to SEQ ID NO: 63158

SEQ ID NO: 142740 - DNA, 1227 bp, Zea mays
  CDS (1)..(1227)
atggcttcagctggtgttgccccttctgggtacaagaacagcagcagcaccagcattggtgccgaaaagttgcaagatcacatgaacgagctaaagattagagatgataaggaagttgaagcaaccataattaatgggaaagggaccgaaactgggcacataattgtcaccactactggtggcaagaatggtcaaccaaaacagacagtgagctacatggctgagcgcattgtaggtcaaggttcttttgggattgtcttccaggccaagtgtttggaaacgggtgagactgttgccataaagaaggttcttcaggacaagcgttacaagaaccgcgagttgcagaccatgcgccttcttgaccaccctaatgttgttgctttgaagcattgcttcttttcaactactgagaaggatgagctttatctgaacttggtccttgagtatgtgccggagacagttcatcgagttgtgaagcatcacaacaagatgaaccaacgcatgccacttatttatgtgaagctgtatatgtaccagatatgtagggcattggcttacattcatggcactatcggtgtctgccacagagatattaagccacaaaaccttctggtgaacccacacacccaccagcttaaactatgtgactttggcagtgcaaaagttctggtcaagggggaaccaaacatatcgtacatctgctcgcgatactatagggctccagagctcatatttggtgccactgagtataccacagcgattgacatttggtctgctggatgtgttcttgctgagcttatgctagggcagcctttgtttccgggtgaaagtggtgtggaccaactcgtcgaaatcatcaaggtcctcggtacgccaacaagggaagaaattaaatgcatgaacccaaattacacagagtttaagttcccacaaatcaaagcacacccatggcacaaggtattccacaaaaggatgccgccagaagctgttgatctggtctctcggctactccagtactccccaaatctgagatgcactgctgtggaggcacttgttcacccattctttgatgagcttcgagatcctaatactcgccttccaaatggccgctttttgccaccacttttcaatttcaagcctcacgaacttaaaggagtcccatcagacattgtcgcgaaattgattccagaacatgcaaagaagcaatgctcctatgttggattgtga

SEQ ID NO: 142741 - protein, 408 aa, Zea mays
MASAGVAPSGYKNSSSTSIGAEKLQDHMNELKIRDDKEVEATIINGKGTETGHIIVTTTGGKNGQPKQTVSYMAERIVGQGSFGIVFQAKCLETGETVAIKKVLQDKRYKNRELQTMRLLDHPNVVALKHCFFSTTEKDELYLNLVLEYVPETVHRVVKHHNKMNQRMPLIYVKLYMYQICRALAYIHGTIGVCHRDIKPQNLLVNPHTHQLKLCDFGSAKVLVKGEPNISYICSRYYRAPELIFGATEYTTAIDIWSAGCVLAELMLGQPLFPGESGVDQLVEIIKVLGTPTREEIKCMNPNYTEFKFPQIKAHPWHKVFHKRMPPEAVDLVSRLLQYSPNLRCTAVEALVHPFFDELRDPNTRLPNGRFLPPLFNFKPHELKGVPSDIVAKLIPEHAKKQCSYVGL

SEQ ID NO: 142742 - DNA, 1716 bp, Zea mays
  CDS (1)..(1716)
atgggctgcgtgcacggccgccccgccacctccagccccgcgcccgccgccacctcctccagccgccgggaccatcccacggcctcccagacgcacaaggacggggtcgattccgccgccgccgcacctccggtggacgccgaggcgccggagcagcaggcggccgagaagccccagaaggtcaagcgggagcggcggtcgcggtcgtcgcgctccgccgccttcgcggcgcacaccgaggtgcgcctgggcgggagcttcgccaacaaggcgcgcggcgagcaggtcgccgccggctggcccgcttggctctccgctgtcgccggcgaggccatcgaaggatggaccccgcgccgcgccgacggcttcgagaagatcgacaagatcggccagggcacgtacagcaatgtgtacaaggcgcgagactcgctgagcggcaagatcgtggcgctcaagaaggtgcgcttcgacaacctggagcccgagagcgtgcggttcatggcgcgcgagatcctcatcctgcgccgcctcgaccaccccaatgtcgtcaagctcgacgggctcgtcacctcccgcatgtcctgcagcctctacctcgtcttcgactacatggtccacgacctcgccggcctagccgccagccccgacatcaagttcacgctgccccaggtcaagtgctatgtgcaccagctgttgtcaggacttgagcattgtcacaaccggggagtgctacatcgcgacatcaaggggtctaacctgcttttggacaacaacggtgtgctgaagattgctgatttcggtctggcgtccttcttcgaccccaaccataaacagccaatgacgagtcgggtggtgacactctggtaccgcccaccagagctgctgctgggtgcgacagattatggagttggcgtcgacttgtggagcgcaggatgtatactagctgaattgctggctggaaagcccattatgcctggacggactgaggtggaacagctgcataaaatttttaagctatgtggctctccgacagaagaatattggaaaaaatcaaagttgcctcatgcaactatatttaagccccaacagccatacaaaaggcgaatagcggatacattcaaagatttccctcaatcagcacttcgactgatcgagacactacttgcaattgatccagctgatcggttaacggcaacttctgcattgaacagtgatttctttgcaacagagccttatgcgtgtgaaccatcaagtctgccccaatacccaccaagtaaagagatggatgctaaacgaagagacgaagaagctagacgcttaagggctgctggtggtagaggtaacggagatggaacaaggaagacaaggacacgggatcggcctagggctgttccagcgccagaggcaaacgccgaactgcaagcaaacattgataaaagaaggttgataactcatgcaaatgctaagagcaagagcgaaaagttccctccaccgcatcaggacggcgcgctcggctttcccttgggctgttcgaatcacatggaaccttcattcgagcccccggacccttcttccttcagcactgtatttcctttcgagaaaagcgcggtgccaacctggtccggaccgctggcggactccgcagctgggaaccagaagcggaaacacaagtctgcccgctcctcaaaacaaccagcaactgcccgtgctagatga

SEQ ID NO: 142743 - protein, 571 aa, Zea mays
MGCVHGRPATSSPAPAATSSSRRDHPTASQTHKDGVDSAAAAPPVDAEAPEQQAAEKPQKVKRERRSRSSRSAAFAAHTEVRLGGSFANKARGEQVAAGWPAWLSAVAGEAIEGWTPRRADGFEKIDKIGQGTYSNVYKARDSLSGKIVALKKVRFDNLEPESVRFMAREILILRRLDHPNVVKLDGLVTSRMSCSLYLVFDYMVHDLAGLAASPDIKFTLPQVKCYVHQLLSGLEHCHNRGVLHRDIKGSNLLLDNNGVLKIADFGLASFFDPNHKQPMTSRVVTLWYRPPELLLGATDYGVGVDLWSAGCILAELLAGKPIMPGRTEVEQLHKIFKLCGSPTEEYWKKSKLPHATIFKPQQPYKRRIADTFKDFPQSALRLIETLLAIDPADRLTATSALNSDFFATEPYACEPSSLPQYPPSKEMDAKRRDEEARRLRAAGGRGNGDGTRKTRTRDRPRAVPAPEANAELQANIDKRRLITHANAKSKSEKFPPPHQDGALGFPLGCSNHMEPSFEPPDPSSFSTVFPFEKSAVPTWSGPLADSAAGNQKRKHKSARSSKQPATARAR

SEQ ID NO: 142744 - DNA, 1674 bp, Zea mays
  CDS (1)..(1674)
atgggctgcgtcttcggccgggcggctgcgtcgtcctctgcagcgccgaagaagaagtggggcaaggggaggtcgtccccgcagcccgaagcggggtcgccctccgcagtcgccgccaccgacggggacgggaggccgcggcggcggctcgggggccgcagggcgtcgggacccaggcagggttgcgtccccgcggctgccgcggcggagcagctcgccgccggttggccaccgtggctcgtcgcagtcgccggggaggccctccgcggctgggcgccgcgccgcgccgacacgttcgagaaacttaataagataggatcgggcacgtacagcaacgtgtaccgggcgagggacaccgtctctggccggatcgtcgctcttaaaaaggtccgcttcgataacctcgagccagaaagcgtcaagtttatggcccgggaaatactgatcctaaggagactcgaccaccccaacatcatcaaattagagggcttggtcacctccaggatgtcatgcagcctttaccttgtcttcgagtacatggagcatgatcttgctggtcttgcggcaagttgtgatgtcaagttcacgttgcctcagataaaatgttacatacagcagctgttgtcagggcttgagcattgtcatgacaataatgtattgcaccgggatatcaaggggtcaaacttgttgttggataataatgggattcttaagattgcggattttgggctggcaacattctttgatccacgacataaacgaccaatgacgagccgagtggtcacgctatggtaccgtccaccagaattgttacttggtgccactgagtatagtgtaggtgttgatttgtggagtgctggatgcattcttgcagagctcctgtatggaaagcccataatgcctgggcgcactgaggtggaacagttgcacaagattttcaagctatgtggttccccttctgaggagtactggaagaagtctaaattgccacacgcaacaatattcaaacctcaacaaccctataaacgttgcatcagggagacatttaaagattttcctacatcggctctgccattggttgaaactctgcttgcaattgatccagctgagcgacaaactgcctcagctgcattacacagtgattttttttcaaccgagccttatgcttgtaacccttcaagtctgccaacatatccaccaagcaaggagatggatgccaagttaagagacgaggaggctagaagactacgagcggctgcaaaggccaagggagaacagaaaaggactcgaccacgtgatcgatctcggagggctggaccagcaccagaagctaatgcagagattcaagcaaacttagaccagaggcgacgaatgataactcatgcaaatgcaaagagtaaaagtgagaagtttcctcctccgcatcaggatggaggtacgggtaatccgcttggatcctatcatcatatggagcctatgttcgagcaccaggatgcttccttcagtacagtagtccccatagagaaggggacctcacaaacatggtccgggccgttgtttgatccagcagctctcgggcagtcgaggcggaagaagcaaactaccctagatgctaaggctgctgcttactcaaagcagctccaaaaggaaaagggagggatacgagcccgataa

SEQ ID NO: 142745 - protein, 557 aa, Zea mays
MGCVFGRAAASSSAAPKKKWGKGRSSPQPEAGSPSAVAATDGDGRPRRRLGGRRASGPRQGCVPAAAAAEQLAAGWPPWLVAVAGEALRGWAPRRADTFEKLNKIGSGTYSNVYRARDTVSGRIVALKKVRFDNLEPESVKFMAREILILRRLDHPNIIKLEGLVTSRMSCSLYLVFEYMEHDLAGLAASCDVKFTLPQIKCYIQQLLSGLEHCHDNNVLHRDIKGSNLLLDNNGILKIADFGLATFFDPRHKRPMTSRVVTLWYRPPELLLGATEYSVGVDLWSAGCILAELLYGKPIMPGRTEVEQLHKIFKLCGSPSEEYWKKSKLPHATIFKPQQPYKRCIRETFKDFPTSALPLVETLLAIDPAERQTASAALHSDFFSTEPYACNPSSLPTYPPSKEMDAKLRDEEARRLRAAAKAKGEQKRTRPRDRSRRAGPAPEANAEIQANLDQRRRMITHANAKSKSEKFPPPHQDGGTGNPLGSYHHMEPMFEHQDASFSTVVPIEKGTSQTWSGPLFDPAALGQSRRKKQTTLDAKAAAYSKQLQKEKGGIRAR

SEQ ID NO: 142746 - DNA, 20 bp, Artificial sequence
  primer
atggagccaactaacgatgc

SEQ ID NO: 142747 - DNA, 20 bp, Artificial sequence
  primer
tcaatcattgctggtttcag

SEQ ID NO: 142748 - protein, 337 aa, Artificial sequence
  consensus sequence
  Variant (2)..(2): Xaa in position 2 is any amino acid
  Variant (4)..(5): Xaa in position 4 to 5 is any amino acid
  Variant (7)..(7): Xaa in position 7 is any amino acid
  Variant (9)..(10): Xaa in position 9 to 10 is any amino acid
  Variant (12)..(18): Xaa in position 12 to 18 is any amino acid
  Variant (19)..(26): Xaa in position 19 to 26 is any or no amino acid
  Variant (28)..(36): Xaa in position 28 to 36 is any amino acid
  Variant (37)..(42): Xaa in position 37 to 42 is any or no amino acid
  Variant (45)..(47): Xaa in position 45 to 47 is any amino acid
  Variant (49)..(52): Xaa in position 49 to 52 is any amino acid
  Variant (54)..(54): Xaa in position 54 is any amino acid
  Variant (55)..(58): Xaa in position 55 to 58 is any or no amino acid
  Variant (60)..(73): Xaa in position 60 to 73 is any amino acid
  Variant (74)..(91): Xaa in position 74 to 91 is any or no amino acid
  Variant (93)..(95): Xaa in position 93 to 95 is any amino acid
  Variant (97)..(100): Xaa in position 97 to 100 is any amino acid
  Variant (103)..(118): Xaa in position 103 to 118 is any amino acid
  Variant (119)..(127): Xaa in position 119 to 127 is any or no amino acid
  Variant (130)..(130): Xaa in position 130 is any amino acid
  Variant (133)..(133): Xaa in position 133 is any amino acid
  Variant (135)..(137): Xaa in position 135 to 137 is any amino acid
  Variant (139)..(141): Xaa in position 139 to 141 is any amino acid
  Variant (142)..(142): Xaa in position 142 is any or no amino acid
  Variant (144)..(144): Xaa in position 144 is any amino acid
  Variant (151)..(151): Xaa in position 151 is any amino acid
  Variant (153)..(153): Xaa in position 153 is any amino acid
  Variant (155)..(159): Xaa in position 155 to 159 is any amino acid
  Variant (160)..(161): Xaa in position 160 to 161 is any or no amino acid
  Variant (164)..(165): Xaa in position 164 to 165 is any amino acid
  Variant (172)..(177): Xaa in position 172 to 177 is any amino acid
  Variant (178)..(190): Xaa in position 178 to 190 is any or no amino acid
  Variant (192)..(193): Xaa in position 192 to 193 is any amino acid
  Variant (195)..(195): Xaa in position 195 is any amino acid
  Variant (198)..(198): Xaa in position 198 is any amino acid
  Variant (204)..(209): Xaa in position 204 to 209 is any amino acid
  Variant (210)..(211): Xaa in position 210 to 211 is any or no amino acid
  Variant (213)..(216): Xaa in position 213 to 216 is any amino acid
  Variant (218)..(218): Xaa in position 218 is any amino acid
  Variant (221)..(221): Xaa in position 221 is any amino acid
  Variant (225)..(226): Xaa in position 225 to 226 is any amino acid
  Variant (228)..(232): Xaa in position 228 to 232 is any amino acid
  Variant (233)..(233): Xaa in position 233 is any or no amino acid
  Variant (235)..(235): Xaa in position 235 is any amino acid
  Variant (239)..(243): Xaa in position 239 to 243 is any amino acid
  Variant (246)..(247): Xaa in position 246 to 247 is any amino acid
  Variant (249)..(252): Xaa in position 249 to 252 is any amino acid
  Variant (254)..(254): Xaa in position 254 is any amino acid
  Variant (256)..(290): Xaa in position 256 to 290 is any amino acid
  Variant (291)..(310): Xaa in position 291 to 310 is any or no amino acid
  Variant (312)..(313): Xaa in position 312 to 313 is any amino acid
  Variant (315)..(318): Xaa in position 315 to 318 is any amino acid
  Variant (320)..(322): Xaa in position 320 to 322 is any amino acid
  Variant (324)..(325): Xaa in position 324 to 325 is any amino acid
  Variant (327)..(331): Xaa in position 327 to 331 is any amino acid
  Variant (334)..(334): Xaa in position 334 is any amino acid
  Variant (336)..(336): Xaa in position 336 is any amino acid
GXGXXGXVXXAXXXXXXXXXXXXXXXKXXXXXXXXXXXXXXXREXXXLXXXXHXXXXXNXXXXXXXXXXXXXXXXXXXXXXXXXXXXXXXXYXXXEXXXXDLXXXXXXXXXXXXXXXXXXXXXXXXXYQXLRXLXXXHXXXXVXHRDLKPXNXLXXXXXXXLKXXDFGLARXXXXXXXXXXXXXXXXXXXTXXVXTRXYRAPEXXXXXXXXYXXXXDXWSXGCIXXEXXXXXXPXFPGXXXXXQLXXIXXXXGXPXXXXXXXXXXXXXXXXXXXXXXXXXXXXXXXXXXXXXXXXXXXXXXXXXXXXXXXAXXLXXXXLXXXPXXRXXXXXALXHXY

SEQ ID NO: 142749 - protein, 16 aa, Artificial sequence
  protein pattern
  Variant (2)..(2): Xaa in position 2 is Asp, Gly, Asn, Ser or Thr
  Variant (3)..(4): Xaa in position 3 to 4 is any amino acid
  Variant (5)..(5): Xaa in position 5 is Ile or Val
  Variant (7)..(7): Xaa in position 7 is Ile, Leu, Met or Val
  Variant (9)..(9): Xaa in position 9 is Ala or Ser
  Variant (10)..(10): Xaa in position 10 is any amino acid
  Variant (14)..(15): Xaa in position 14 to 15 is any amino acid
YXXXXDXWXXGCIXXE

SEQ ID NO: 142750 - protein, 17 aa, Artificial sequence
  protein pattern
  Variant (2)..(3): Xaa in position 2 to 3 is any amino acid
  Variant (4)..(4): Xaa in position 4 is any or no amino acid
  Variant (6)..(6): Xaa in position 6 is any or no amino acid
  Variant (8)..(8): Xaa in position 8 is any amino acid
  Variant (9)..(9): Xaa in position 9 is Trp or Tyr
  Variant (12)..(12): Xaa in position 12 is Ala or Pro
  Variant (15)..(15): Xaa in position 15 is Ile, Leu or Val
  Variant (16)..(16): Xaa in position 16 is any amino acid
  Variant (17)..(17): Xaa in position 17 is Gly or Leu
TXXXVXTXXYRXPEXXX

SEQ ID NO: 142751 - protein, 10 aa, Artificial sequence
  protein pattern
  Variant (3)..(3): Xaa in position 3 is Ile or Leu
  Variant (6)..(6): Xaa in position 6 is any amino acid
  Variant (8)..(8): Xaa in position 8 is any or no amino acid
  Variant (10)..(10): Xaa in position 10 is Ala, Ile, Leu or Val
RDXKPXNXLX

SEQ ID NO: 142752 - protein, 19 aa, Artificial sequence
  protein pattern
  Variant (2)..(3): Xaa in position 2 to 3 is any amino acid
  Variant (4)..(4): Xaa in position 4 is Asp, Glu, Asn or Ser
  Variant (6)..(7): Xaa in position 6 to 7 is any amino acid
  Variant (9)..(10): Xaa in position 9 to 10 is any amino acid
  Variant (11)..(11): Xaa in position 11 is Ala or Val
  Variant (12)..(13): Xaa in position 12 to 13 is any amino acid
  Variant (16)..(18): Xaa in position 16 to 18 is any amino acid
  Variant (19)..(19): Xaa in position 19 is Phe, Trp or Tyr
LXXXPXXRXXXXXALXXXX

SEQ ID NO: 142753 - DNA, 1533 bp, Arabidopsis thaliana
  CDS (1)..(1533)
atgttcatcgaaagcttcaaggttgaatctccgaacgtgaagtacaccgagaatgagatccactcagtgtacgactaccaaaccactgagcttgttcatgagaacaaaaacggtgcttttcaatggactgtgaagccaaagactgtgaagtatgagtttaagaccgacactcatgttcccaaacttggagtaatgctcgttggttggggaggcaacaatggttctacacttaccgctggtgttatcgccaatcgtgagggaatatcttgggctacaaaggagaaagtgcaacaagctaattatttcgggtcattaacccaagcatcttctattcgggtcgggtcatttaatggtgaagaaatctatgctcctttcaaaagtcttctccccatggtgaatccggaagaaattgtgtttggaggatgggacataagtgacatgaacttagcagacgcaatggcacgagccaaggtcctagacatcgaccttcaaaagcagatgcgtccgttcatggaacacatggttccactccccggaatcttcgacccagatttcatcgcagctaaccaagggtcacgtgctaaccacgtgatcaaaggcaccaagaaacaacaactcgaacaagtcatcaaggacatcagggagttcaaagagaaaaacaaagtggataaagtggtggtactgtggacggcaaacacagaaagatacagcaatgtggtggttggtcttaacgacacgacggagaatctcatgtcatctttggacaaggatgaggctgagatttctccttctacactttacgccattgcttgtgttcttgagaacgttccttttatcaatggaagtccacaaaacacttttgtccctgggcttattgaattagccataaagagaaactgcttgatcggtggtgatgacttcaagagtggtcagaccaagatgaagtctgtcctcgtcgatttccttgttggcgccggaatcaaaccgacgtcgattgtcagttacaaccatcttgggaacaacgacggcatgaacttgtcagcacctcaaacattccggtcaaaggagatatcgaagagcaatgtcgtggacgatatggttggtagcaacggaattttgtacgagcctggtgaacaccctgaccacgttgtggtcattaagtatgtgccatgtgtaggagacagcaagagagcaatggatgaatacacatcagagatattcatgggagggaagaacacgattgtgatgcacaacacttgtgaagactctctcttggctgctccaattattttggaccttgttcttcttgctgagctcactactcggatccagttcatgagtgaaaacgagggaaagtttcattctttccatccggtggctactctcctaagttacctctcaaaggcaccactggttcctcctggcacgccagttgttaatgctttgtcgaaacagcgtgcaatgcttgagaacgtactcagagcttgtgttggacttgctcctgagaacaacatgattctcgagtacaagtga

SEQ ID NO: 142754 - protein, 510 aa, Arabidopsis thaliana
MFIESFKVESPNVKYTENEIHSVYDYQTTELVHENKNGAFQWTVKPKTVKYEFKTDTHVPKLGVMLVGWGGNNGSTLTAGVIANREGISWATKEKVQQANYFGSLTQASSIRVGSFNGEEIYAPFKSLLPMVNPEEIVFGGWDISDMNLADAMARAKVLDIDLQKQMRPFMEHMVPLPGIFDPDFIAANQGSRANHVIKGTKKQQLEQVIKDIREFKEKNKVDKVVVLWTANTERYSNVVVGLNDTTENLMSSLDKDEAEISPSTLYAIACVLENVPFINGSPQNTFVPGLIELAIKRNCLIGGDDFKSGQTKMKSVLVDFLVGAGIKPTSIVSYNHLGNNDGMNLSAPQTFRSKEISKSNVVDDMVGSNGILYEPGEHPDHVVVIKYVPCVGDSKRAMDEYTSEIFMGGKNTIVMHNTCEDSLLAAPIILDLVLLAELTTRIQFMSENEGKFHSFHPVATLLSYLSKAPLVPPGTPVVNALSKQRAMLENVLRACVGLAPENNMILEYK

SEQ ID NO: 142755 - DNA, 2018 bp, Glycine max
  CDS (98)..(1630)
ttcttctgcttctcttaaaagttattaagagcttttgcttttctttctgcgcgcttttcccaattaagtagttcttccttttctcaaagcaaaaaaaatgttcatcgagagtttcaaggttgagagtcctaacgtgaagtacacagagactgagattcagtccgtgtacaactatgaaaccactgaacttgttcacgagaacaataatggcacttatcagtgggttgtcaagcccaaaactgtcaaatatgaatttaaaaccaacacccatgtccctaaactaggggtaatgcttgtggggtgggggggaaacaatggctcaaccctcactggtggtgttattgctaaccgagagggtatttcatgggcaacaaaggacaagattcaacaagccaattactttgggtcgctgacccaggcatcagctatcagagtggggtctttccaaggggaagaaatatatgctccattcaagagcctgcttccaatggtgaaccctgatgatgttgtgtttgggggatgggatatcagtaacttgaacctggctgatgccatggccagggccaaggtgtttgatatcgacctgcagaaacagttgaggccgtacatggaatccatggttccactccccggaatctatgacccggatttcattgctgccaaccaaggagaccgtgccactaacgtaatcaggggcacaaagaaagaacaagttcaacaaatcatcaaagacattagggagttcaaagaaagcactaaggttgacaaggtggttgtcctgtggacagccaacacagagaggtacagcaacgtagttgtgggactaaacgacaccatggaaaacctctttgcttccttggacaggaatgaggctgagatttccccttccaccttgtatgccattgcttgtgttatggaaaatgttcctttcatcaatggaagccctcagaacacctttgtcccaggactcattgatctggccatcaaaaggaatagtttgattggaggagatgactttaagagtggtcagaccaaaatgaaatcggtgttggtggatttcctagtaggggccggcatcaagccaacatctatagtgagttacaaccatttgggaaacaatgatggcatgaatctctcagcccctcaaaccttccgctcgaaggaaatttccaagagcaatgttgttgacgatatggtcaacagcaacgccatcctctatgagcctggtgaacatccggaccatgtggttgtcattaagtatgtaccttacgttggggacagcaagagggccatggatgagtactcttctgagatattcatgggcggaaagaacacaattgtgttgcacaacacttgtgaggattcactgttagctgctcctattatcttggacttggtccttcttgctgagcttagcactcgaatcgagtttaaagctgaaaatgagggaaagttccactcattccacccagttgcgaccatcctcagttacctgaccaaggcccctctggttccaccgagtacgccagtggttaatgcactgtcaaagcagcgagctatgctggaaaacatcctaagggcttgtgttggattagctcctgagaacaacatgatcctggagtacaagtgaagttcaaagtcttaagagtaatggtttgggatactgtagttgaatgagatcaaaacttaactcatatcccataccctcttttctgttatatatttatggcaaatgtgaaatttaaagatcgttggatctctctatctttgttcctgctgactaatttgagagcaggctatctatgctatgcatgcatgtaaaataatataaagttatcgaagtattttgtgcttaaaaaaaaaaaaaaaaaaaaaaaaaaaaaaaaaaaaaaaaaggggggccccccaaaaagaaacccctccccccgggaaataaatccgggccgggaactggagggggaaaaatttcccccaaagggggcccaaataaaacctgggggaaaacggggcaaaagttt

SEQ ID NO: 142756 - protein, 510 aa, Glycine max
MFIESFKVESPNVKYTETEIQSVYNYETTELVHENNNGTYQWVVKPKTVKYEFKTNTHVPKLGVMLVGWGGNNGSTLTGGVIANREGISWATKDKIQQANYFGSLTQASAIRVGSFQGEEIYAPFKSLLPMVNPDDVVFGGWDISNLNLADAMARAKVFDIDLQKQLRPYMESMVPLPGIYDPDFIAANQGDRATNVIRGTKKEQVQQIIKDIREFKESTKVDKVVVLWTANTERYSNVVVGLNDTMENLFASLDRNEAEISPSTLYAIACVMENVPFINGSPQNTFVPGLIDLAIKRNSLIGGDDFKSGQTKMKSVLVDFLVGAGIKPTSIVSYNHLGNNDGMNLSAPQTFRSKEISKSNVVDDMVNSNAILYEPGEHPDHVVVIKYVPYVGDSKRAMDEYSSEIFMGGKNTIVLHNTCEDSLLAAPIILDLVLLAELSTRIEFKAENEGKFHSFHPVATILSYLTKAPLVPPSTPVVNALSKQRAMLENILRACVGLAPENNMILEYK

SEQ ID NO: 142757 - DNA, 1924 bp, Sorghum bicolor
  CDS (93)..(1625)
accaacccagcggcagcagcctcctccatcctctcgctcgcttggcagcattcccattcgaggacagcggtgagagggggaggaaaggcaagatgttcatcgagagcttccgcgtcgagagccctcacgtgcggtacggcccgacggagatcgagtcggagtaccggtacgacacgacggagctggtgcacgagggcaaggacggcgcctcccgctgggtcgtccgccccaagtccgtcaagtacaacttccggaccagcaccgccgtccccaaactcggggtgatgcttgtggggtggggaggcaacaacgggtccacgctgacagctggggtcattgccaacagggaggggatctcatgggcgaccaaggacaaggtgcagcaagccaactacttcggctccctcacccaggcctccaccatcagagttggcagctacaacggggaggagatctatgcgccattcaagagcctcctgcccatggtgaacccagacgaccttgtgttcggaggctgggacatcagcaacatgaacctggctgattccatgaccagggccaaggtgctggacattgacctgcagaagcagctcaggccctacatggagtccatggtgccacttcccggcatctatgacccagacttcatcgccgctaaccagggctctcgcgccaacaatgtcatcaagggtaccaagaaagaacaggtggagcagatcatcaaggatatcagggaatttaaggagaagaacaaagtggacaagatagttgtgctgtggactgcaaacactgaaaggtacagcaatgtatgcactggtctcaacgacacaatggagaatctgctggcgtctgtggacaagaacgaggcacagatctcgccatcaacactatatgccattgcctgtgtcatggagggggtgccgttcattaatgggagccctcacaacacctttgtgccagggctgattgatcttgctattaagaacaactgcttgattggtggtgacgacttcaagagtggacagaccaagatgaaatctgtcttggttgatttccttgttggtgctggaataaagcccacctcaattgtgagctacaaccaccttggaaacaacgatggcatgaacctgtctgcccctcaaacattcagatccaaggagatctccaagagcaatgtggtggatgacatggtctcaagtaatgctatcctctatgagcctggcgagcatcctgatcatgttgttgtcatcaagtatgtgccgtatgtgggagacagtaagagggctatggacgagtacacctccgagatcttcatgggtggcaagaacaccatcgtgctgcacaacacctgtgaggactcactcctcgccgcacctatcatccttgatctggtgctcctggctgagctcagcaccaggatccagctaaaagctgagggagaggacaagttccactccttccacccggtggccaccatcctgagctacctcaccaaggcacccctggttccccctggcacaccggtggtgaacgctttggcaaagcagagggcgatgctggagaacatcatgagggcctgcgttggcctggccccagagaacaacatgatcctggagtacaagtgagcgaagtggcgtggcctatatgcaggaggctgctggaagggaactagaatggcgagattagctgtgggattgtattggcttctcgtgttttcttttgcgttctttcctggtcattgctgttacgcttgtgtatttgtcggacccgtaactatcagggctctgctattagcggcacgaagcctgtaatagtatcaggtatcgtatgataatttgatggagggtgctagtttccctcggcattcctagtgttcattgcaagtttcctcgacgcctgttcggattttaaatgttatatcact

SEQ ID NO: 142758 - protein, 510 aa, Sorghum bicolor
MFIESFRVESPHVRYGPTEIESEYRYDTTELVHEGKDGASRWVVRPKSVKYNFRTSTAVPKLGVMLVGWGGNNGSTLTAGVIANREGISWATKDKVQQANYFGSLTQASTIRVGSYNGEEIYAPFKSLLPMVNPDDLVFGGWDISNMNLADSMTRAKVLDIDLQKQLRPYMESMVPLPGIYDPDFIAANQGSRANNVIKGTKKEQVEQIIKDIREFKEKNKVDKIVVLWTANTERYSNVCTGLNDTMENLLASVDKNEAQISPSTLYAIACVMEGVPFINGSPHNTFVPGLIDLAIKNNCLIGGDDFKSGQTKMKSVLVDFLVGAGIKPTSIVSYNHLGNNDGMNLSAPQTFRSKEISKSNVVDDMVSSNAILYEPGEHPDHVVVIKYVPYVGDSKRAMDEYTSEIFMGGKNTIVLHNTCEDSLLAAPIILDLVLLAELSTRIQLKAEGEDKFHSFHPVATILSYLTKAPLVPPGTPVVNALAKQRAMLENIMRACVGLAPENNMILEYK

SEQ ID NO: 142759 - DNA, 2129 bp, Zea mays
  CDS (93)..(1625)
ccgcgcgcagctatataatggtggattaaccctaggaacccctcgcgtccgcgcaatcgtcgactgctgctgcgttctgttccgttcggaagatgttcttggagagcttccgggtggagagcccgcgggtgaagtacggcgacggcgagatccagtcggagtaccgctacgacaccaccgaagtcgtcccgccggggaatggcggcggcgcggggtgggtggtgcgcccaaagtccgtcacctacaacttcaagaccagcaccaacgtcccaaagctgggggtgatgctcgtcggatggggcggcaacaacgggacgacgctcacggccggggtgatcgccaacagggaagggatttcgtgggagacgaaagagaaggttcacaaggccaactacttcggctccctgacccaggcttccaccatcagggtcggctcccacaacggggaggaggtctacgcgcctttcaagagcctcgtgcctatggttgaccccaactctatcgtgtttggtggatgggacatcagcaagctgaacatggccgacgccatggccagggccaaggtcctagactttcacctccagaagcagctcaggccctacatggaatccatgctgccactccctggcattttcaacccagacttcgtcgccgcaaaccaaggtgcccgtgctgacaatgtcatcaagggcaccaagaaagagcaggtggagcagatcaagaaggacatcaaggagttcaaggaaaaaaacaaggtggacaaggtagtcgtgctgtggacggcgaacaccgagaggtacagcaacgtggttgcagggcttaacgacaccatggacaagctcctggcttcgttggacaagaacgaagcagagatctcgccatccaccttgtatgcgatagcctgtgtcctcgagggtgtcccgttcgtcaatggaagccctcagaacaccttcgtgcctgggctgatggagcttgccataaaaaagaattcggtgataggaggcgacgacttcaagagtgggcagaccaagatgaagtctgtgttggtcgatttcctcgtcggcgctgggattaagcccacctcaattgcaagctacaaccatctgggaaacaacgacggcatgaatctctctgccccacaagtcttccggtccaaagagatctccaagagcagcgtggtggacgacatggtcgctagcaatcccatcctctacaagcccggcgaacatccggatcacgtaatcgtgatcaagtacatcccctacgtgggtgacagcaagagggctatggacgagtatacctctgagatcttcatgggtggcaagaacaccatcgcgctgcacaacacctgcgaggactcgcttctcgccgcgcccatcatccttgacttggtgctcctagctgagctcagcactcggattcagctcaaggccgaagggcaggataagttccactccttccatcctgtcgccactattctgagctacctcagcaaggctcctcttgtacctcctggcacaccagtggtgaatgctctagccaagcagagggccatgctggaaaacatcttgcgggcctgcattggccttgcccctgagaacaacatgatgcttgagcacaagtgaagagtttcacgtcccttaattaactaccgcaagataggatgaatggaaaaggagggatcaagcgaaggtgtgggaataatcagtgactcctctgagcccaacgaagaaatgtcaggaggctacaggaaggagaagtgtaaggagagaagaccaggcatggatatatcctcttttcgaaggctatctatctattctttttttgtagatttgactcgttttttgtactcgtgggacgagattgtgtactggctatatgtccactgtatgcagcatgaaacctttatttgttctgttgtgtgatagaggttatatatagaagtgtccagcctagtttttgaaactcctagttgattaatattttcactaggtggttgatgaacacatttgatatgctctagagacgtcaatggagctttgatcgctgattcctaacagggagttctcgatgcggacagggccaattcttccccatgtggatggatatggttctctatcctccatccc

SEQ ID NO: 142760 - protein, 510 aa, Zea mays
MFLESFRVESPRVKYGDGEIQSEYRYDTTEVVPPGNGGGAGWVVRPKSVTYNFKTSTNVPKLGVMLVGWGGNNGTTLTAGVIANREGISWETKEKVHKANYFGSLTQASTIRVGSHNGEEVYAPFKSLVPMVDPNSIVFGGWDISKLNMADAMARAKVLDFHLQKQLRPYMESMLPLPGIFNPDFVAANQGARADNVIKGTKKEQVEQIKKDIKEFKEKNKVDKVVVLWTANTERYSNVVAGLNDTMDKLLASLDKNEAEISPSTLYAIACVLEGVPFVNGSPQNTFVPGLMELAIKKNSVIGGDDFKSGQTKMKSVLVDFLVGAGIKPTSIASYNHLGNNDGMNLSAPQVFRSKEISKSSVVDDMVASNPILYKPGEHPDHVIVIKYIPYVGDSKRAMDEYTSEIFMGGKNTIALHNTCEDSLLAAPIILDLVLLAELSTRIQLKAEGQDKFHSFHPVATILSYLSKAPLVPPGTPVVNALAKQRAMLENILRACIGLAPENNMMLEHK

SEQ ID NO: 142761 - DNA, 2444 bp, Zea mays
  CDS (268)..(1800)
  misc_feature (2207)..(2207): n is a, g, c or t
  misc_feature (2208)..(2208): n is a, g, c or t
  misc_feature (2209)..(2209): n is a, g, c or t
  misc_feature (2210)..(2210): n is a, g, c or t
  misc_feature (2213)..(2213): n is a, g, c or t
  misc_feature (2214)..(2214): n is a, g, c or t
  misc_feature (2215)..(2215): n is a, g, c or t
  misc_feature (2216)..(2216): n is a, g, c or t
  misc_feature (2218)..(2218): n is a, g, c or t
  misc_feature (2313)..(2313): n is a, g, c or t
  misc_feature (2335)..(2335): n is a, g, c or t
tttgcccctgacgcggctacgacgtcgctcctccggtcccttcgatccggtggggtccgtttctttcaagcgcggcctcgctggccgcctcgtggcagtgaccgtcgaaccctctataaatcccgtgccccgagcacccttcctcgatcacacaacccaaagcagccacagcagcctccttcctcctctcactctcgctcgcgctgcgctcgctacctcgcttcgcattccattcgaggagagcggtgagaggggaggaaaggcaagatgttcatcgagagcttccgcgtcgagagcccccacgtgcggtacggcccgacggagatcgagtcggagtaccggtacgacacgacggagctggtacacgagggcaaggacggcgcctcacgctgggtcgtccgccccaagtccgtcaagtacaacttccggaccagaaccgccgtccccaagctcggggtgatgcttgtggggtggggaggcaacaacgggtccacgctgacggctggggtcattgccaacagggaggggatctcatgggcgaccaaggacaaggtgcagcaagccaactactacggctccctcacccaggcctccaccatcagagtcggcagctacaacggggaggagatctatgcgccgttcaagagcctccttcccatggtgaacccagacgacattgtgttcggaggctgggacattagcaacatgaacctggccgactccatgaccagggccaaggtgctggatattgacctgcagaagcagctcaggccctacatggagtccatggtgccacttcccggtatctatgatccggacttcatcgcggctaaccagggctctcgcgccaacagtgtcatcaagggcaccaagaaagaacaggtggagcagatcatcaaggatatcagggagtttaagaagaagaacaaagtggacaagatagttgtgttgtggactgcaaacactgaaaggtatagcaatgtgtgcgctggtctcaacgacacgatggagaatctactggcatctgtggacaagaacgaggcggaggtatcaccatcaacactatatgccattgcctgtgtcatggagggggtgccgttcatcaatgggagcccccagaacacctttgtgcctgggctgattgatcttgctataaaaaacaactgcttgattggtggtgacgacttcaagagtggacagaccaagatgaaatctgtcttggtcgatttccttgttggtgctggaataaagcccacctcaatcgtgagctacaaccacttgggaaacaacgatggcatgaacctgtctgcccctcaaacattcaggtccaaggagatctccaagagcaacgtggtggatgacatggtctcgagcaatgccatcctctatgagcccggcgagcatcccgatcatgtcgttgtcatcaagtatgtgccgtacgtgggagacagcaagagggctatggacgagtacacctcagagatcttcatgggcggcaagaacaccatcgtgctgcacaacacctgtgaggactcgctcctcgccgcacctatcatccttgatctggtgctcttggctgagctcagcaccaggatccagctgaaagctgagggagaggacaaattccactccttccacccggtggccaccatcctgagctacctcaccaaggcacccctggttccccctggcacaccggtggtgaacgctctggccaagcagagggcgatgctggagaacatcatgagggcctgcgttgggctggccccagagaacaacatgatcctggagtacaagtgagccaagtggcgtgccctgcagcgcgaggttagctgctggaagggaactagaaaggcgagattagctgtgggattgtgttgggcttgtcgtgttttcttttgcgttctttcctagtcattgctgttgcgcttttgtatttgtcggacccgtaactaccagggctctgctattagcggcacggagcctgtaattgtattgtatgataatgtgatcgagggtgctacttcccctcggcattcctaaaaaaaaaaaaaaaaaaaaaaaaaaaaaaaaaaaaaaaaaaaaaaaaaaaaaaaaaaaaaaaaaaaaaaaaaaaaaaaaaaaaaaaaaaaaaaaaaaaaaaaaaaaaaaaaaaaaaaaaaaaaaaaaaacccccccaaaaaaaaaaaaaaaaaaaaaaaaaaaannnnccnnnncnaaacccccccaaaggggaaaaccccaaaaaaaccccaaacaggggggcccccggggcgccccaaaaaggggccccccccccccctaggggggggnaaaaaaaaaacgcggggccggngttataacccggggggggggggaaaaaccgggggcccccccaattatgggttttgagaaaaccccccttttttccgggtggggaaaaagaaaaaagccccccccaaaac

SEQ ID NO: 142762 - protein, 510 aa, Zea mays
MFIESFRVESPHVRYGPTEIESEYRYDTTELVHEGKDGASRWVVRPKSVKYNFRTRTAVPKLGVMLVGWGGNNGSTLTAGVIANREGISWATKDKVQQANYYGSLTQASTIRVGSYNGEEIYAPFKSLLPMVNPDDIVFGGWDISNMNLADSMTRAKVLDIDLQKQLRPYMESMVPLPGIYDPDFIAANQGSRANSVIKGTKKEQVEQIIKDIREFKKKNKVDKIVVLWTANTERYSNVCAGLNDTMENLLASVDKNEAEVSPSTLYAIACVMEGVPFINGSPQNTFVPGLIDLAIKNNCLIGGDDFKSGQTKMKSVLVDFLVGAGIKPTSIVSYNHLGNNDGMNLSAPQTFRSKEISKSNVVDDMVSSNAILYEPGEHPDHVVVIKYVPYVGDSKRAMDEYTSEIFMGGKNTIVLHNTCEDSLLAAPIILDLVLLAELSTRIQLKAEGEDKFHSFHPVATILSYLTKAPLVPPGTPVVNALAKQRAMLENIMRACVGLAPENNMILEYK

SEQ ID NO: 142763 - DNA, 1931 bp, Zea mays
  CDS (99)..(1631)
ggcacgagcagcagcctccttcctcctctcactctcgctcgcgctgcgctcgctacctcgcttcgcattccattcgaaaagaggggaggaaaggcaagatgttcatcgagagcttccgcgtcgagagcccccacgtgcggtacggcccgatggagatcgagtcggagtaccggtacgacacgacggagctggtacacgagggcaaggacggcgcctcacgctgggtcgtccgccccaagtccgtcaagtacaacttccggaccagaaccgccgtccccaagctcggggtgatgcttgtggggtggggaggcaacaacgggtccacgctgacggctggggtcattgccaacagggaggggatctcatgggcgaccaaggacaaggtgcagcaagccaactactacggctccctcacccacgcctccaccatcagagtcggcagctacaacggggaggagatctatgcgccgttcaagagcctccttcccatagtgaacccagacgacattgtgttcggaggctgggacattagcaacatgaacctggccgactccatgaccagggccaaggtgctggatattgacctgcagaagcagctcaggccctacatggagtccatggtgccacttcccggtatctatgatccggacttcatcgcggctaaccagggctctcgcgccaacagtgtcatcaagggcaccaagaaagaacaggtggagcagatcatcaaggatatcagggagtttaaggagaagaacaaagtggacaagatagttgtgttgtggactgcaaacactgaaaggtatagcaatgtgtgcgctggtctcaacgacacgatggagaatctactggcatctgtggacaagaacgaagcggaggtatcaccatcaacactatatgccattgcctgtgtcatggaaggggtgccgttcatcaatgggagcccccagaacacctttgtgcctgggctgattgatcttgctataaaaaacaactgcttgattggtggtgacgacttcaagagtggacagaccaagatgaaatctgtcttggtcgatttccttgttggtgctggaataaagcccacctcaatcgtgagctacaaccacttgggaaacaacgatggcatgaacctgtctgcccctcaaacattcaggtccaaggagatctccaagagcaacgtggtggatgacatggtctcgagcaatgccatcctctatgagcccggcgagcatcccgatcatgtcgttgtcatcaagtatgtgccgtacgtgggagacagcaagagggctatggacgagtacacctcagagatcttcatgggcggcaagaacaccatcgtgctgcacaacacctgtgaggactcgctcctcgccgcacctatcatccttgatctggtgctcttggctgagctcagcaccaggatccagctgaaagctgagggagaggacaaattccactccttccacccggtggccaccatcttgagttacttcaccaaggcacccctggttccccctggcacaccggtggtgaacgctctggccaagcagagggcgatgctggagaacatcatgagggcctgcgttgggctggccccagagaacaacatgatcttggagtacaagtgagccaagtggcgtgccctgcagcgcgaggttagctgctggaagggaactagaaaggcgagattagctgtgggattgtgttgggcttgtcgtgttttcttttgcgttctttcctagtcattgctgttgcgcttttgtatttgtcggacccgtaactaccagggctctgctattagcggcacggagcctgtaattgtattgtatgataatgtgatcgagggtgctacttcccctcggcattcctagtgttggttaaaagtcgttcgacagcaacttatcgacccaaaaaaaaaaaaaaaaaaa

SEQ ID NO: 142764 - protein, 510 aa, Zea mays
MFIESFRVESPHVRYGPMEIESEYRYDTTELVHEGKDGASRWVVRPKSVKYNFRTRTAVPKLGVMLVGWGGNNGSTLTAGVIANREGISWATKDKVQQANYYGSLTHASTIRVGSYNGEEIYAPFKSLLPIVNPDDIVFGGWDISNMNLADSMTRAKVLDIDLQKQLRPYMESMVPLPGIYDPDFIAANQGSRANSVIKGTKKEQVEQIIKDIREFKEKNKVDKIVVLWTANTERYSNVCAGLNDTMENLLASVDKNEAEVSPSTLYAIACVMEGVPFINGSPQNTFVPGLIDLAIKNNCLIGGDDFKSGQTKMKSVLVDFLVGAGIKPTSIVSYNHLGNNDGMNLSAPQTFRSKEISKSNVVDDMVSSNAILYEPGEHPDHVVVIKYVPYVGDSKRAMDEYTSEIFMGGKNTIVLHNTCEDSLLAAPIILDLVLLAELSTRIQLKAEGEDKFHSFHPVATILSYFTKAPLVPPGTPVVNALAKQRAMLENIMRACVGLAPENNMILEYK

SEQ ID NO: 142765 - DNA, 1530 bp, Oryza sativa (japonica cultivar-group)
  CDS (1)..(1530)
atgttcgtggagggcttcagggtggagagcccgcgcgtgcggtacggcgacggggagatcgagtcggagtaccgatatgacacgacggaggtggtggcgccgccgtcgccggagaaggggtgggtcgtccgccccaagtccgtcacctaccacttcaagaccaccaccaccgtccccaagctcggggtgatgctggttggatggggaggcaacaacggcaccacgctcacggctggtgtcatcgccaacagagagggaatttcatgggcgaccaaggagaaggtgcacaaggccaactactttggttccctgacacaatcatccaccatcagggttgggagctacaacggggaggagatctatgcgccttttaagagccttgtacccatggtaaacccaaacgacatcgtgttcggtgggtgggacatcagcagcatgaacctggccgacgccatgaccagggctcgggtgctggacatcgacctgcagaagcagctccggcatcacatggagtccatggtgcccctccccggcgtctacaaccctgacttcatcgccgccaaccagggctcccgcgccaacaatgtcatcaagggcaccaagaaggagcaggtcgaacaggtcaagaaggacatcagggagttcaaggagaagagcaaggtggacaaggtggtggtgctgtggacggccaacacggagcggtacagcaacgtggtggccgggatgaacgacaccatggacaacctgctggcgtcgctggacaaggacgagccggagatgtcgccgtcgacgctctacgccatcgcctgcgtcatggagggcgtccccttcatcaacggcagcccccagaacaccttcgtgcccgggctgatcgagctcgccatcaagaagaactcggtgatcggcggcgacgacttcaagagtgggcagaccaagatgaagtccgtcctcgtcgacttcctcgtcggcgccggcatcaagccgacgtcgatcgcgagctacaaccacctaggcaacaacgacggcatgaacctgtcggcgccgcagacgttccggtccaaggagatctccaagagcggcgtcgtcgacgacatggtctccagcaacgccatcctctacgagcccggcgagcaccccgaccacgtcatcgtcatcaagtatattccatacgttggggacagcaagagggccatggacgagtacacctcggagatcttcatgggagggaagaacaccatcgtgctgcacaacacctgcgaggactcgctcctcgccgcgcccatcatcctcgacctcgtcctcctcgccgagctcagcaccaggatccagctcaaagctgaagaccaggataagtaccattctttccatccagtggctaccatcctgagctacctcagcaaggctcctcttgttcccccaggcacaccagtggtgaatgcactggccaagcagagggccatgctggagaacatcctgagggcctgtgttggactggcccctgagaacaacatgatgcttgagtacaagtga

SEQ ID NO: 142766 - protein, 509 aa, Oryza sativa (japonica cultivar-group)
MFVEGFRVESPRVRYGDGEIESEYRYDTTEVVAPPSPEKGWVVRPKSVTYHFKTTTTVPKLGVMLVGWGGNNGTTLTAGVIANREGISWATKEKVHKANYFGSLTQSSTIRVGSYNGEEIYAPFKSLVPMVNPNDIVFGGWDISSMNLADAMTRARVLDIDLQKQLRHHMESMVPLPGVYNPDFIAANQGSRANNVIKGTKKEQVEQVKKDIREFKEKSKVDKVVVLWTANTERYSNVVAGMNDTMDNLLASLDKDEPEMSPSTLYAIACVMEGVPFINGSPQNTFVPGLIELAIKKNSVIGGDDFKSGQTKMKSVLVDFLVGAGIKPTSIASYNHLGNNDGMNLSAPQTFRSKEISKSGVVDDMVSSNAILYEPGEHPDHVIVIKYIPYVGDSKRAMDEYTSEIFMGGKNTIVLHNTCEDSLLAAPIILDLVLLAELSTRIQLKAEDQDKYHSFHPVATILSYLSKAPLVPPGTPVVNALAKQRAMLENILRACVGLAPENNMMLEYK

SEQ ID NO: 142767 - DNA, 1290 bp, Bacteroides thetaiotaomicron VPI-5482
  CDS (1)..(1290): transl_table=11
atgaaacaagaaattaaacccgctactggacgtcttggcgtgttggtagttggagtaggtggtgcggttgccaccacaatgattgtaggtacactagcctctcgcaagggactggcaaaaccgataggatctattacacagttagccacaatgcgcatggaaaacaacgaagaaaaactcatcaaggacgttgtgcccttgactgatttgaacgacattgttttcggtggatgggatatcttcccggacaacgcatatgaagctgctatgtatgccgaggttttgaaagaaaaagacctgaacggtgtgaaagatgaactggaagctatcaagccgatgcctgcagctttcgatcacaactgggcaaaacgtctgaatggtacacatatcaagaaggctgctacccgttgggaaatggtagaacaactccgtcaggacatccgcgactttaaggctgccaataactgcgaacgcgttgttgtactgtgggctgcaagtaccgaaatctacattccgttatcagacgaacacatgtcactcgctgctttggagaaagcaatgaaagataacaacacagaagttatctctccgagtatgtgttatgcatacgctgctatcgcagaagatgctccgtttgtgatgggtgctcctaacttgtgtgtagatactccggccatgtgggaattctctaaacagaagaatgttcctatctccggtaaagacttcaagagcggtcagacactgatgaaaaccgtattggctccgatgttcaagactcgtatgctgggtgtgaacggttggttctctaccaacatcctcggtaaccgtgacggtgaagtgctggatgatccggacaactttaagacaaaagaagttagtaagctgtctgtaatcgacaccatcttcgaaccggaaaaatatccggatctctatggagacgtttaccacaaagtacgcatcaactactatcctccccgtaaggacaacaaagaagcatgggataacatcgacatcttcggatggatgggctatccgatggaaatcaaggtaaacttcctttgccgtgactctatcctggctgctcctattgcacttgacctggtattgttcagtgacttggctatgcgtgcaggtatgtgtggcatccagacttggttgtcattcttctgcaagagcccgatgcacgatttcgaacatcagccggaacacgacctgttcacacaatggagaatggtaaaacagacattgcgtaacatgattggtgaaaaagaacctgattatttagcttaa

SEQ ID NO: 142768 - protein, 429 aa, Bacteroides thetaiotaomicron VPI-5482
MKQEIKPATGRLGVLVVGVGGAVATTMIVGTLASRKGLAKPIGSITQLATMRMENNEEKLIKDVVPLTDLNDIVFGGWDIFPDNAYEAAMYAEVLKEKDLNGVKDELEAIKPMPAAFDHNWAKRLNGTHIKKAATRWEMVEQLRQDIRDFKAANNCERVVVLWAASTEIYIPLSDEHMSLAALEKAMKDNNTEVISPSMCYAYAAIAEDAPFVMGAPNLCVDTPAMWEFSKQKNVPISGKDFKSGQTLMKTVLAPMFKTRMLGVNGWFSTNILGNRDGEVLDDPDNFKTKEVSKLSVIDTIFEPEKYPDLYGDVYHKVRINYYPPRKDNKEAWDNIDIFGWMGYPMEIKVNFLCRDSILAAPIALDLVLFSDLAMRAGMCGIQTWLSFFCKSPMHDFEHQPEHDLFTQWRMVKQTLRNMIGEKEPDYLA

SEQ ID NO: 142769 - DNA, 1659 bp, Magnaporthe grisea 70-15
  CDS (1)..(1659)
atgttcgaccctatccacggcaaaaacatgtctcctcatgccgagatggaagtcgaagccaccaacggacacggcaacggcactcatcgagttgccaccatgcaactgggttctgccaaggaggtctttgtcgtaaactcgcccaacgtggtctataccgagcatgagatccgctccaagtacacctaccgcaccaccatggtggccaagggcgatgatggcagatacattgctcagcctaagcagacggcctatgacttcaaggtggatcgcaaggtacccaaggtcggcgtgatgctggtcggatggggaggcaacaacgggtcaaccattacggccgcagtcatggccaaccgccgtgggctcttgtgggagactcgcgaaggcgttcagaagcccaactactacggatcgctgatcatgggctcaaccatgaagctcggcacggatgccaacacgctcaaggacgtcaacatccctttccacaatgtgttgcccatggttcacccgaacgacctcgtcattggtggctgggacatcagcggcatgaacttggccgatgccatggaccgggctggcgttcttgaaccttccctgaagatgcaggtgcgcaaggagatggcattgatgaagccgctgcctagcatctactatcccgactttatcgctgccaaccaggactcacgcgcggacaacgtgctaccaggctccaaggcgtgtagcggtcacgttgatcagcttcgtaaagacattcgtgacttcaaggcaaagaatgggcttgataaagtcattgtattgtggactgccaacactgaacgctacgctgccgagttggatggagtcaatgacaccgcagacaacctcctcaaatcgatcgagggtggagagctagaggtctctccctctactgttttcgcggttgccagcattctggagggtgccccgtttataaacggctccccacagaacactttcgtcaagggggttattgagctcgcgggcactcacaaagtcttcatcggcggtgatgacttcaagtcgggacagaccaagatgaagtctgcgttggtcgacttcctaatcagcgctggcattaaactgaattcgatcgcctcgtacaatcaccttggaaacaatgatggcaagaatctgagctcgtacaagcagttccgttccaaagagatctccaaatccaccgtcgttgacgacatggtggaggcgaacaatgtgctgtacaagccaggcgagcagccggaccatactgtggttatcaagtacatgccggccgttggggacagcaagcgcgcgttggatgagtactatggtgagatctttatgggtgggcgccagacaatttcgctcttcaatgtctgcgaagattcccttctggcatccccgctcattattgaccttgttctcatcaccgagatgatgtctcgaatccagtggaagacggaatcggatcccgaagatggcttcaggaacttccacagtgtgttgtcaatcctgagctacatgctgaaggcgccgctgactccgcccggcacgcccgtcgtcaacgccttggccaagcagcgcgctgctttgaccaacatcttccgggcgtgcctcggcctggaccctgaatcggacatgactctggagcataagcttctttga

SEQ ID NO: 142770 - protein, 552 aa, Magnaporthe grisea 70-15
MFDPIHGKNMSPHAEMEVEATNGHGNGTHRVATMQLGSAKEVFVVNSPNVVYTEHEIRSKYTYRTTMVAKGDDGRYIAQPKQTAYDFKVDRKVPKVGVMLVGWGGNNGSTITAAVMANRRGLLWETREGVQKPNYYGSLIMGSTMKLGTDANTLKDVNIPFHNVLPMVHPNDLVIGGWDISGMNLADAMDRAGVLEPSLKMQVRKEMALMKPLPSIYYPDFIAANQDSRADNVLPGSKACSGHVDQLRKDIRDFKAKNGLDKVIVLWTANTERYAAELDGVNDTADNLLKSIEGGELEVSPSTVFAVASILEGAPFINGSPQNTFVKGVIELAGTHKVFIGGDDFKSGQTKMKSALVDFLISAGIKLNSIASYNHLGNNDGKNLSSYKQFRSKEISKSTVVDDMVEANNVLYKPGEQPDHTVVIKYMPAVGDSKRALDEYYGEIFMGGRQTISLFNVCEDSLLASPLIIDLVLITEMMSRIQWKTESDPEDGFRNFHSVLSILSYMLKAPLTPPGTPVVNALAKQRAALTNIFRACLGLDPESDMTLEHKLL

SEQ ID NO: 142771 - DNA, 1569 bp, Nasonia vitripennis
  CDS (1)..(1569)
atgtcgtcgctcaagatccacgtgaactcgccgagagtcgagtacacggccgaggccatcctcgcggagtacgattaccagacgatgaaggtcgcccgcgcgggcgacgactcggccccggcctacgaggtcgttccggagtcgacgaagctcctcatcaaaacggacatcaaggtgccgaagctgggagttatgctggtcggctggggcggcaataacgggacgaccatcaccgcggccttgctggctaacaaactcaaactttcgtgggaaacgaaagacggcgtcaagcgcgccaactggtacggctcgctgatcgaagcgtctacggtgaggctgggcagcgacggagtcgaggacgtctacgtgccgatttcgtggatgctgccgatggtcaatcctgatgatatcgaactcgacggctgggacatctccgacatgaacctcgctgacgccatggagcgggccaaggtcttggacatcaatctgcagaagcagctcaggcctcacatgcggggcttgaagccgcggaagagcctctacttcccggacttcatagccgccaatcaggaatcgcgagccaacaatttgatctcgggaacgaagaagcagcagctggaagccatcagaaaagacatccgagatttcaaggcattgaagaagctggacaaggtcattgttttgtggaccgcgaataccgagaggttcgccgacatcttgcccggtgtcaacgatacggcggacaatttgctcaagtcaattgacgagagccacccggagatcagtcctagcactgtctttgccgttgcttcggcgctggaagcctgtacttatctgaatggttcgcctcaaaatactttcgtacctggagcaatagagcttgcggaaagattaaacacatttatcggcggggatgatttcaaatccggacaaaccaagatcaagtcggtactcgtggactttttggtatcggcaggtatcaagcccgtgtctatcgtcagctataatcacttgggcaacaacgatggttacaatctgtcagcaccacaacagttccgatcgaaggagatatcaaagagcaacgttgtcgacgatatggtccagtcgaacaaagtgctttacaaggatggagaaaagccagatcactgcgttgttattaaatacgtcccctatgtgggcgacagcaagcgagcaatggacgagtacacatcggagatcctgttgaacggtcacaacacgatcgtcgtgcacaacacctgcgaggattcgttgctcgcgagtccgataatcctggacctggtgctgctgtctgagatttgttcgcgtatgagcttcaagcgagccgaacaaccggacagcgagtacagatgcttccgtagtgttctgtcgatcctgtcgtatctcctgaaagcacccctggttccacaaggtaccccagttgtcaacgctctcttcaagcagcgctgcgcgatcgagaacgtactcaaggcctgcgtcggtatcccgcccgaaaaccacatgctactcgagcacaaagtcgacatccttcgcaagtatagacctcaataa

SEQ ID NO: 142772 - protein, 522 aa, Nasonia vitripennis
MSSLKIHVNSPRVEYTAEAILAEYDYQTMKVARAGDDSAPAYEVVPESTKLLIKTDIKVPKLGVMLVGWGGNNGTTITAALLANKLKLSWETKDGVKRANWYGSLIEASTVRLGSDGVEDVYVPISWMLPMVNPDDIELDGWDISDMNLADAMERAKVLDINLQKQLRPHMRGLKPRKSLYFPDFIAANQESRANNLISGTKKQQLEAIRKDIRDFKALKKLDKVIVLWTANTERFADILPGVNDTADNLLKSIDESHPEISPSTVFAVASALEACTYLNGSPQNTFVPGAIELAERLNTFIGGDDFKSGQTKIKSVLVDFLVSAGIKPVSIVSYNHLGNNDGYNLSAPQQFRSKEISKSNVVDDMVQSNKVLYKDGEKPDHCVVIKYVPYVGDSKRAMDEYTSEILLNGHNTIVVHNTCEDSLLASPIILDLVLLSEICSRMSFKRAEQPDSEYRCFRSVLSILSYLLKAPLVPQGTPVVNALFKQRCAIENVLKACVGIPPENHMLLEHKVDILRKYRPQ

SEQ ID NO: 142773 - DNA, 1626 bp, Gibberella zeae PH-1
  CDS (1)..(1626)
atggctcctcacgcggaagtcggcacgggctcctcaaacgggtcggtatacaacggccgaggctcctccgctacccaggacctctttaccgtcaactcacccaacgtcacctacacggatgcggagattcgctcacgatacacctaccgcaccacaaaggttgaagttgatgccagcggcaagtatgttgctactcctaacgagactctctacgacttcaaggtcgaccgcaaggttcccaaggtcggtatgatgttggtcggacttggaggcaacaacggcaccaccgttaccgctggtatcctcgccaaccgccgtcagctcgcctgggacaccaaggaaggtcctcgcgagtccaactactacggctccgttgtcatgggctcaaccctcaagctcggccatgacgccaagactcaccaggaggtcaacattcccttccacaacatccttcccatggttcatcccaatgacttggtcattggcggttgggacatcagcaagatgaacctggctcaggccatggaccgtgctcaggttcttgagcctactctcaaggcccaggtcaagaaggagatggcggaaatggttccccttccctccatctactaccctgacttcattgctgccaaccaggaggaccgtgccgacaacgtcctcgagggaaccaaggcctgctgggagcatgtcgagaagatccgccaggatattcgtgactttaaagccaagaacagccttgacaaggtcatcatcatgtggactgccaacactgagcgatatgccgacttgattgagggtatcaacgacactgctgacaaccttctcaaggctatcgagcagggacatgaggaggtttctccttctaccgtctttgccgttgcttgtatcctcgaacaggccccttttatcaacggctctccccagaacaccttcgtccctggtgccattgagcttgctgagaagcacaacgccttcattggtggcgatgacttcaagtctggccaaaccaagatgaagtccgcccttgttgacttcctcatcaacgccggtatcaagttgacctccattgccagctacaaccatcttggcaacaacgacggcaagaacctgagctcccagaagcagttccgctccaaggagatctccaagtccaacgtcgttgatgacatggtcgaggccaaccacgtcctttacaagaagggcgagcatcccgaccactgcgttgtaatcaagtacatgcctgccgtcgcagacaacaagcgtgctcttgatgagtactacgccgagattttcatgggtggccaccagaccatttcgctcttcaacatctgtgaggactctctcctcgcttctcccctgatcatcgatttggtcatcattgccgagatgatgtctcgtatccagtggaaggccgtgtcctccgacggcactgctaccaccgagtacaagagcttccacagtgtcctgagtgtcctcagctacatgctcaaggctcccctgaccccccctggcactcctgttgtcaacgctcttgccaagcagcgcgccgccctgaccaacatcttccgtgcttgcgttggtcttgagcctgagtccgacatgactcttgaacacaagcttttttag

SEQ ID NO: 142774 - protein, 541 aa, Gibberella zeae PH-1
MAPHAEVGTGSSNGSVYNGRGSSATQDLFTVNSPNVTYTDAEIRSRYTYRTTKVEVDASGKYVATPNETLYDFKVDRKVPKVGMMLVGLGGNNGTTVTAGILANRRQLAWDTKEGPRESNYYGSVVMGSTLKLGHDAKTHQEVNIPFHNILPMVHPNDLVIGGWDISKMNLAQAMDRAQVLEPTLKAQVKKEMAEMVPLPSIYYPDFIAANQEDRADNVLEGTKACWEHVEKIRQDIRDFKAKNSLDKVIIMWTANTERYADLIEGINDTADNLLKAIEQGHEEVSPSTVFAVACILEQAPFINGSPQNTFVPGAIELAEKHNAFIGGDDFKSGQTKMKSALVDFLINAGIKLTSIASYNHLGNNDGKNLSSQKQFRSKEISKSNVVDDMVEANHVLYKKGEHPDHCVVIKYMPAVADNKRALDEYYAEIFMGGHQTISLFNICEDSLLASPLIIDLVIIAEMMSRIQWKAVSSDGTATTEYKSFHSVLSVLSYMLKAPLTPPGTPVVNALAKQRAALTNIFRACVGLEPESDMTLEHKLF

SEQ ID NO: 142775 - DNA, 1590 bp, Kluyveromyces lactis NRRL Y-1140
  CDS (1)..(1590)
atgactgcaccaaccgttttcaaaccaaccgtcaaggttgctactgatgttgctgagtttagtgaaactgaattgacaactaagtatacttatcgtaatgctattgttgaaaaaagtgcagatggtgttttcaacgttgaaccggtgactcaagattatgaattcaaggttgatttaaagttgccaaaagttggtgtcatgttagttggtcttggtggtaacaacggtaccacattcttggcttcaatcttggctaataagcacaaggttaagttccaaaccaaggaaggtttgaaggaagctaattactatggttctgtgacacaatcttctactttgaaacttggtgttgacgctgagggaaatgacgtttatgctccgttcaatagtttagttccaatggtatctccaaatgacttctatgtttctggttgggatattaatggtgctgaccttggaacagcaatggcaagagctgaagttcttggtgtcgatttgcaaaataaattgcgtcaagaaatgtccgctcacaaacctttaccttctatctactatccagattttatcgctgctaaccaagatgaacgtgcagacaactgtttcaatagggatggtaaggctggacctgtgtctgtaaaggacaaatggagtcacgttgaacacatccgtaacgacattcgtcaattcaaggaaaataatggtttggacaaagtcttggtgttatggacagctaacactgaacgttatgctgacatcgtgactggtgttaacgatactgctgaaaacttgatcaatgctatcaggagtgatcatgcagaaattgctccatccactgtctttgctgtcgcatctatcttggaaaacgttccatacatcaatggttccccacagaacactttcgtcccaggtgtcattgatttagctgaaaaggaaggcgctttcatcgctggtgatgatttcaagagtggtcaaaccaagatgaagtctgtcttggcccaattcttggttgatgctggtatcagaccagtttctatcgcttcctacaaccatttgggtaacaacgatggttacaatttgagttctccacaacaattcaaatctaaagaaatctccaaggcgagtgtggtcgatgatatcattgaatccaaccaaattctctacaatgacaaactgggtaacaagatcgaccactgtatcgttatcaaatatatgccagcggtcggtgactctaaggttgccatggatgaatattacagtgaattgatgcttggtggtcataacagaatctccatccacaacgtctgtgaggattctttgttggctactccattgatcattgacttgttagtcatggctgaattctgttccagaatcaagtacaagaagattaatgacctttcaggaggttaccacagtttctaccctgtcttgactatgttgagttactggttgaaggcaccattgactagaccaggtttcaaggctattaatggcttgaataaacaacgtgctgctttggaaaacttcttgagattgttaatcggtttgccagcattggacgagttgagattcgaagaaagattggtttaa

SEQ ID NO: 142776 - protein, 529 aa, Kluyveromyces lactis NRRL Y-1140
MTAPTVFKPTVKVATDVAEFSETELTTKYTYRNAIVEKSADGVFNVEPVTQDYEFKVDLKLPKVGVMLVGLGGNNGTTFLASILANKHKVKFQTKEGLKEANYYGSVTQSSTLKLGVDAEGNDVYAPFNSLVPMVSPNDFYVSGWDINGADLGTAMARAEVLGVDLQNKLRQEMSAHKPLPSIYYPDFIAANQDERADNCFNRDGKAGPVSVKDKWSHVEHIRNDIRQFKENNGLDKVLVLWTANTERYADIVTGVNDTAENLINAIRSDHAEIAPSTVFAVASILENVPYINGSPQNTFVPGVIDLAEKEGAFIAGDDFKSGQTKMKSVLAQFLVDAGIRPVSIASYNHLGNNDGYNLSSPQQFKSKEISKASVVDDIIESNQILYNDKLGNKIDHCIVIKYMPAVGDSKVAMDEYYSELMLGGHNRISIHNVCEDSLLATPLIIDLLVMAEFCSRIKYKKINDLSGGYHSFYPVLTMLSYWLKAPLTRPGFKAINGLNKQRAALENFLRLLIGLPALDELRFEERLV

SEQ ID NO: 142777 - DNA, 1563 bp, Debaryomyces hansenii CBS767
  CDS (1)..(1563)
atgtcgaataatattaaattcaattctaataaggctactaagaaggacgatacattgtataccaagttcacatacgaaaattcaacagtcgaaactactgaagcaggtgcatttaatgtcacaccaactgcagttgactatgaatttaaagttgacttgaaaacaccaaagaccgggttaatgttggttggtttaggtggtaacaacggtactaccttggtcggttctgttttggctaacaaacacaacatttcctttgaaaccaaggaaggtgttattaagccaaattactatggttctgttacccaatcgtccactcttaaattaggtgtaggcaaggaaggtaacgacatatatgctccatttaattccgtcttaccaatggttagtccaaatgactttgttgtcggcggttgggatatcagtaagcttaacttgagtgatgccatgaatagagctcaggtgttagatgttacattacaaaaacaattatcaccatacatggaaaaaaccacacctttgccatctatctactatccagatttcattgctttgaaccaagaagatagagccgataacgtctctaatgttgattctaacggtaaggttgacactaacaacaaatggaaggatgtcgaaaaagtcagaaacgatatcaaagatttcaaggaaaagaatggattagacaaggttattgttctttggaccgctaacactgaaagatttgcagatgtggtaccaggtgtcaatgatactgcagacaatttgcttaaagccatcaaagataatgaagctgaagtttctccatccactatttttgctgttgcttgtattttggacaacgttccatacatcaatggttctcctcaaaacacctttgttccaggggctattgaattagctgaaaaatataacagtttcattggtggtgatgatttcaagagtggtcaaaccaaggttaagtcagtattggcacaatacttggttgatgccggtattagaccaatctcgattgcatcatacaatcatttaggtaacaatgatggatacaacttgtcgtctccaaagcaattcagatcaaaggaaatttccaaggcatcagttgttgatgatattattgaatctaaccaaatcttgtataataaggaaaagggtgacaagattgaccattgtattgtcatcaagtaccttccagctgttggtgattccaaggttgccatggatgaatactactcagaattaatgttgggaggacacaacaagatttctatccacaatgtttgtgaagactcgttattagccactcctttgatcattgacttggtagttatgactgaattcttatccagagttagctacaagaaggctgacgagtcaaactacgaagacttctacgctgtgttgaccttattaagttactggttaaaagcaccattggccaagccaggtttcaaagctattaatggtttaaacaagcaaagattagctgttgagaacttattgcgtttgttagtagggttaccaattaacaacgaattgagattcgaagaaaggttattatag

SEQ ID NO: 142778 - protein, 520 aa, Debaryomyces hansenii CBS767
MSNNIKFNSNKATKKDDTLYTKFTYENSTVETTEAGAFNVTPTAVDYEFKVDLKTPKTGLMLVGLGGNNGTTLVGSVLANKHNISFETKEGVIKPNYYGSVTQSSTLKLGVGKEGNDIYAPFNSVLPMVSPNDFVVGGWDISKLNLSDAMNRAQVLDVTLQKQLSPYMEKTTPLPSIYYPDFIALNQEDRADNVSNVDSNGKVDTNNKWKDVEKVRNDIKDFKEKNGLDKVIVLWTANTERFADVVPGVNDTADNLLKAIKDNEAEVSPSTIFAVACILDNVPYINGSPQNTFVPGAIELAEKYNSFIGGDDFKSGQTKVKSVLAQYLVDAGIRPISIASYNHLGNNDGYNLSSPKQFRSKEISKASVVDDIIESNQILYNKEKGDKIDHCIVIKYLPAVGDSKVAMDEYYSELMLGGHNKISIHNVCEDSLLATPLIIDLVVMTEFLSRVSYKKADESNYEDFYAVLTLLSYWLKAPLAKPGFKAINGLNKQRLAVENLLRLLVGLPINNELRFEERLL

SEQ ID NO: 142779 - DNA, 1593 bp, Yarrowia lipolytica CLIB122
  CDS (1)..(1593)
atgtccccttctgctgataccattgctggcaaccccggcgccgtcaagtccggaatcacctccgttcacgtcaacactgatcgaactcagatcaaggatggaaacctctactccacctacacctacgacaacgctaccgtgtctaagtccgccgatggcaagtacgaggtgacccccacttccactgactacgagttcaaggtcgacctgactgtccccaagaccggtctgatgcttgtcggtctcggaggaaacaacggtaccacccttgctgccgctgttgccgccaaccgacacaacatcaagttcaacaccaagaatggcgagatcgagcccaactactttggctccgtcacccaggcttccaccatcaagcttggtgttgacaaggacggtaaggacgtctatgcccctttctctgaggtcctccccatgctgcaccccaacgactttgtccttggcggctgggatatctcctctctcaacctgtccgacgccatgaagcgtgccaaggttctggagtacgacctgcagcgacaggtggccaagcacctgcagcccatcacccccatgaagtccgtctactaccccgacttcattgctgccaaccagggcgagcgagctgacaacgtcatcgagggcaccgataagtgggcccacgtcgagcacatccgaaaggatatccgggagttcaaggagaagaacggactcgacaaggtgattgttctctggaccgccaacactgagcgatacgccaacctcatcgacggtgtcaacgacaccgccgacaacctcctcaagtccatcaaggagtcccacgaggagattgccccctccaccgtgtttgccgtcgcctccattctcgagggcgtcccctacattaacggttccccccagaacacctttgttcccggctgcatcgagcttgccgagcgagagggcgcctacattggaggtgatgacttcaagtctggccagaccaagctcaagtccgtccttgcccagttcctggtcgatgccggtatcaagcctctttccgtcgcttcttacaaccatctgggtaacaacgacggtttcaacctgtctgctccccagcagttccgatccaaggagatctccaaggcctctgtcattgacgacatgatcgagtccaaccagctgctgtacaacgacaagaacggtaactctgttgaccactgcattgtcatcaagtacgtgccagctgtcggagattccaaggttgccatggatgagtaccactccgagctcatgcttggtggtcacaacaccatctccatccacaacgtttgtgaggactctctgctcgccacccccctgatcatcgatctggtcatcatggctgagttcctgtcccgagtctcctacaagaagaagggcgaggagggtgacttccagaagttccactctgtcctttccttcctgtcttactggctcaaggctcctctgacccgacctggcttcgatgccgtcaacggtcttaacaagcagcgagccgctcttgagaacctcatgcgagctctcattggactcaagcccaacaacgacatgaagctcgaggagcgatgtctttaa

SEQ ID NO: 142780 - protein, 530 aa, Yarrowia lipolytica CLIB122
MSPSADTIAGNPGAVKSGITSVHVNTDRTQIKDGNLYSTYTYDNATVSKSADGKYEVTPTSTDYEFKVDLTVPKTGLMLVGLGGNNGTTLAAAVAANRHNIKFNTKNGEIEPNYFGSVTQASTIKLGVDKDGKDVYAPFSEVLPMLHPNDFVLGGWDISSLNLSDAMKRAKVLEYDLQRQVAKHLQPITPMKSVYYPDFIAANQGERADNVIEGTDKWAHVEHIRKDIREFKEKNGLDKVIVLWTANTERYANLIDGVNDTADNLLKSIKESHEEIAPSTVFAVASILEGVPYINGSPQNTFVPGCIELAEREGAYIGGDDFKSGQTKLKSVLAQFLVDAGIKPLSVASYNHLGNNDGFNLSAPQQFRSKEISKASVIDDMIESNQLLYNDKNGNSVDHCIVIKYVPAVGDSKVAMDEYHSELMLGGHNTISIHNVCEDSLLATPLIIDLVIMAEFLSRVSYKKKGEEGDFQKFHSVLSFLSYWLKAPLTRPGFDAVNGLNKQRAALENLMRALIGLKPNNDMKLEERCL

SEQ ID NO: 142781 - DNA, 1542 bp, Apis mellifera
  CDS (1)..(1542)
atggctttgaaaattcgcgttcaatcaccgaaggtaaaatacacagaagattgtattgaagcacagtacgagtatcaaacaacgaacgttacagaagacgatacaaaatatacggtgacacctgtatcaacaaagctattaattagaacacaactgaaagttccaaaacttggattaatgttagtaggatggggtggaaataatggcacaactattactgcagcattattagcaaacaaacttaagttgacatgggacacaaagaatggcattcaaaaagcaaattggtatggttctttaattcaagcatctactatcagattaggcaaaggaaacaaagaagatatatatgttcccatgtcttggatgcttccaatggtaaatccagatgatattcaaattgatggttgggatatttcagacatgaatttagctgatgctatgcaacgtgcaaaagttttgaacattaatttacaaaaacaattagtagaacatatgatgcatatgaaaccaagaaaaagcatatattatgcagattttattgctgctaatcaggaaaaaagagcaaataatgttatttcgggtacaaaatttgaacaattagaacaaattagaaaagacattgtagaatttaaaacttcaaataagttggatcaagtaattatattatggactgctaacactgaacgattttctgaaatcattccaggtataaatgatacagcagaaaatttattaaatgctattaaaaaaagtcattcagaagttagtcctagtacagtttttgctgtagcagctgctttagaaggatgtacatatattaatggatctcctcaaaatacttttgtaccaggagcaatagaattagcagaaaaacataaaacatttattggtggtgatgattttaaatctggccaaacaaaattaaaatctgtgcttgtagactttttagtttcagctggtattaaaccagtatcaattgttagttataatcatcttggaaataatgatgggtataatttatctgctcctcaacaatttcgatcaaaagagatttcaaaaagcaatgtcgtagatgatatggtacaatcaaataaaattctttatcaatctggagaaaaaccagatcactgtgttgttattaaatatgttccatatgttggtgatagtaaacgggcgatggatgaatacacatcagaaatattactgggaggacataatacgattgtagtacataatacatgtgaagattctttattggcaagtccaattattttggatttggttttgttagcagagatttgctcacgaattactttcaaaatagcagatacaaaagatgaatttactggatttcatagtgtcctatccatactttcatacctctgtaaagcaccattagtaccacgaggaacgccgattgtaaatgcattattcagacaacgagctgcaattgaaaacattttaagagcatgtcttgcattgccacctgaaaataatatgttacttgaacacaaagttaatttcaaaaatcaattatga

SEQ ID NO: 142782 - protein, 513 aa, Apis mellifera
MALKIRVQSPKVKYTEDCIEAQYEYQTTNVTEDDTKYTVTPVSTKLLIRTQLKVPKLGLMLVGWGGNNGTTITAALLANKLKLTWDTKNGIQKANWYGSLIQASTIRLGKGNKEDIYVPMSWMLPMVNPDDIQIDGWDISDMNLADAMQRAKVLNINLQKQLVEHMMHMKPRKSIYYADFIAANQEKRANNVISGTKFEQLEQIRKDIVEFKTSNKLDQVIILWTANTERFSEIIPGINDTAENLLNAIKKSHSEVSPSTVFAVAAALEGCTYINGSPQNTFVPGAIELAEKHKTFIGGDDFKSGQTKLKSVLVDFLVSAGIKPVSIVSYNHLGNNDGYNLSAPQQFRSKEISKSNVVDDMVQSNKILYQSGEKPDHCVVIKYVPYVGDSKRAMDEYTSEILLGGHNTIVVHNTCEDSLLASPIILDLVLLAEICSRITFKIADTKDEFTGFHSVLSILSYLCKAPLVPRGTPIVNALFRQRAAIENILRACLALPPENNMLLEHKVNFKNQL

SEQ ID NO: 142783 - DNA, 1539 bp, Apis mellifera
  CDS (1)..(1539)
atggctttgaaaattcgcgttcaatcaccgaaggtaaaatacacagaagattgtattgaagcacagtacgagtatcaaacaacgaacgttacagaagacgatacaaaatatacggtgacacctgtatcaacaaagctattaattagaacacaactgaaagttccaaaacttggattaatgttagtaggatggggtggaaataatggcacaactattactgcagcattattagcaaacaaacttaagttgacatgggacacaaagaatggcattcaaaaagcaaattggtatggttctttaattcaagcatctactatcagattaggcaaaggaaacaaagaagatatatatgttcccatgtcttggatgcttccaatggtaaatccagatgatattcaaattgatggttgggatatttcagacatgaatttagctgatgctatgcaacgtgcaaaagttttgaacattaatttacaaaaacaattagtagaacatatgatgcatatgaaaccaagaaaaagcatatattatgcagattttattgctgctaatcaggaaaaaagagcaaataatgttatttcgggtacaaaatttgaacaattagaacaaattagaaaagacattgtagaatttaaaacttcaaataagttggatcaagtaattatattatggactgctaacactgaacgattttctgaaatcattccaggtataaatgatacagcagaaaatttattaaatgctattaaaaaaagtcattcagaagttagtcctagtacagtttttgctgtagcagctgctttagaaggatgtacatatattaatggatctcctcaaaatacttttgtaccaggagcaatagaattagcagaaaaacataaaacatttattggtggtgatgattttaaatctggccaaacaaaattaaaatctgtgcttgtagactttttagtttcagctggtattaaaccagtatcaattgttagttataatcatcttggaaataatgatgggtataatttatctgctcctcaacaatttcgatcaaaagagatttcaaaaagcaatgtcgtagatgatatggtacaatcaaataaaattctttatcaatctggagaaaaaccagatcactgtgttgttattaaatatgttccatatgttggtgatagtaaacgggcgatggatgaatacacatcagaaatattactgggaggacataatacgattgtagtacataatacatgtgaagattctttattggcaagtccaattattttggatttggttttgttagcagagatttgctcacgaattactttcaaaatagcagatacaaaagatgaatttactggatttcatagtgtcctatccatactttcatacctctgtaaagcaccattagtaccacgaggaacgccgattgtaaatgcattattcagacaacgagctgcaattgaaaacattttaagagcatgtcttgcattgccacctgaaaataatatgttacttgaacacaaaatgaaatttgttagtgtttga

SEQ ID NO: 142784 - protein, 512 aa, Apis mellifera
MALKIRVQSPKVKYTEDCIEAQYEYQTTNVTEDDTKYTVTPVSTKLLIRTQLKVPKLGLMLVGWGGNNGTTITAALLANKLKLTWDTKNGIQKANWYGSLIQASTIRLGKGNKEDIYVPMSWMLPMVNPDDIQIDGWDISDMNLADAMQRAKVLNINLQKQLVEHMMHMKPRKSIYYADFIAANQEKRANNVISGTKFEQLEQIRKDIVEFKTSNKLDQVIILWTANTERFSEIIPGINDTAENLLNAIKKSHSEVSPSTVFAVAAALEGCTYINGSPQNTFVPGAIELAEKHKTFIGGDDFKSGQTKLKSVLVDFLVSAGIKPVSIVSYNHLGNNDGYNLSAPQQFRSKEISKSNVVDDMVQSNKILYQSGEKPDHCVVIKYVPYVGDSKRAMDEYTSEILLGGHNTIVVHNTCEDSLLASPIILDLVLLAEICSRITFKIADTKDEFTGFHSVLSILSYLCKAPLVPRGTPIVNALFRQRAAIENILRACLALPPENNMLLEHKMKFVSV

SEQ ID NO: 142785 - DNA, 1692 bp, Ustilago maydis 521
  CDS (1)..(1692)
atggctcctgtcgctaacggaaacaccgccgccaacggccatgccgtccacgctaacggtgccaatgtgcccatcaaccccaccaacgctcgtcacgaacagcgcgagttcatccgcgtcaactcggacaaggtcaactactccaccgagaccatcgttgccgactacgagtacctcaacacccacgtggaaaaggttcaccacgacgatggcaccactgaatacgttgctacccccttccagcgccagttccagttcaagaccgagcgcaaggttccccgcaccggtctcatgatggttggctggggtggtaacaacggcaccaccatcaccgccactatcctcgccaacaagcacaacatcacttggcacaacaaggatggtctccaggtgcccaactactacggctcgctcgtccgcgcctccactatccgcctcggcaccgaccctgccacgggcaaggatgtctgggtccccttctccaacgtcctccccatggtccaccccaacgacctcgtcctcggtggttgggacatttcgggtctccccatggaccaggccatgacccgcgcaaaggtgctcgactacgacctccagcgacaggtcgccccttacatggccgagatgaagccgctcgcttccgtctactatccggactttattgctcagaaccaggagcaacgtgccgataacgttctccccggccagtccaaggcggctcacgtcgaccagatccgcgccgacattcgcgagtttaagcgccagaacaacctcgatcaggtcatcgttgtctggaccgccaacacggagcgctactcggagatcctccccggcgtcaatgacacggccgacaacctcctcaaggcggtcgagcagaaccacgacgaggtatcgccctccaccatctttgccattgcctgtatcctcgagaatgctccttacgtcaacggtgctccccagaacacctttgtccccggatgcatccagctcgccgagaagcacaaggctttcatcggtggtgacgacctcaagaccggtcagaccaaggtcaagtcggtccttgccgagttccttgtcaacgccggtatcaagccgctctcgatcgcctcgtacaaccacctgggtaacaacgacggctacaacctcagctcgcagcgtcagttcaagtccaaggagatctccaagtcttcggtcgtcgacgactgctgtgctgccaaccacttgctctacaagcctgccgttcccggcaagaccaacgccgacggcaaggctgacaagggcgagcacccggaccactgcatcgtcatcaagtaccagcccgccgtcggtgaccagaaagttgccatggacgattacacctcggagctctgcatgggtggccgcaacaggctgtacgtcaccaacctctgcgaggactcgctgcttgcctcgcctcttctgcttgacctgaccattctggccgagctcatgacgcgcatcacctacaaggccggcaccgcggacaaggagtggaactcgatgtactcggtcctctcgctcctctcgtactcgctcaaggctccgctcgtcaagccaggcacggatgttgtcaactcgctcaacaggcagcgtgccgcttgcaccaactttatgcgtgcttgcctcggtctcgctcctgaatccgatctcctactcgagaccagggtctggtaa

SEQ ID NO: 142786 - protein, 563 aa, Ustilago maydis 521
MAPVANGNTAANGHAVHANGANVPINPTNARHEQREFIRVNSDKVNYSTETIVADYEYLNTHVEKVHHDDGTTEYVATPFQRQFQFKTERKVPRTGLMMVGWGGNNGTTITATILANKHNITWHNKDGLQVPNYYGSLVRASTIRLGTDPATGKDVWVPFSNVLPMVHPNDLVLGGWDISGLPMDQAMTRAKVLDYDLQRQVAPYMAEMKPLASVYYPDFIAQNQEQRADNVLPGQSKAAHVDQIRADIREFKRQNNLDQVIVVWTANTERYSEILPGVNDTADNLLKAVEQNHDEVSPSTIFAIACILENAPYVNGAPQNTFVPGCIQLAEKHKAFIGGDDLKTGQTKVKSVLAEFLVNAGIKPLSIASYNHLGNNDGYNLSSQRQFKSKEISKSSVVDDCCAANHLLYKPAVPGKTNADGKADKGEHPDHCIVIKYQPAVGDQKVAMDDYTSELCMGGRNRLYVTNLCEDSLLASPLLLDLTILAELMTRITYKAGTADKEWNSMYSVLSLLSYSLKAPLVKPGTDVVNSLNRQRAACTNFMRACLGLAPESDLLLETRVW

SEQ ID NO: 142787 - DNA, 1677 bp, Cryptococcus neoformans var. neoformans B-3501A
  CDS (1)..(1677)
atgtctcctaccgctttggacgcacgtggtcataacgactctttctctttgcctgctcaagaccaaagcgaggttcaccccagcgcccggaggactcctgaaggtggtcttatcaaggtcgagagtgactccactgtctatgaagccgatggtatcaaagccaaattcaccgacagaggggcctcagtcatcaagggtcctgacggcaagctctctgtcaaaaagacggagaagaactttgagttctttaccaagtctaaggttggccgtgttgggcttatgctcgtcggtctaggcggtaacaacggtacaaccgtcttggcgactaatcttgccaacaagcacaacatctcttggcacaccaagaatggcatccagcagcccaactacattggttctgttgttcgagcttctaccgtccgccttggtaccgatcctgcaaccggaaaggatgtctttgtgcccatctctgacatgcttcccatggttcaccccaacgactttgtcattggtggctgggacatctcttcgctctccatggacaaggctatgctccgtgccaaggttctcgaatgggatttgcaaaggcagttgattcctttgatggaggatgtcaagccccttcccagtatttactaccccgacttcattgcggccaatcaggctgacagggccgacaatcttatcccaggcggcgacaagaaggctcatctcgagcacattcgtgctgatatccgtcgcttcaaggccgataaccatcttgacagtgtcgtcgttctctggactgccaatactgagcgttatgccgacatcattccaggggtcaatgacactgccaacaaccttctcaaggccgttgagacctctcacgaggaagtctccccctctaccatttttgccatcgcttccattctcgaaggcgtgcctttcatcaacggctctccccagaacacgtttgttcccggttgtattgagcttgctgagaagcacaaggctttcattggcggtgatgatttcaagtcaggccagaccaaggtcaaatcagttcttgccgaattcctcgtcaatgccggtattaagcccttgtcgatctcttcttacaaccacttgggtaacaatgatggtaagaacttgagctctcagaggcagttcagatccaaggagatctccaagtcaagcgtcgtcgatgatatggtcgctgccaaccacatcctctacaagactgccgaagacctcagcaaagccactggagaggtcgtcaaaaagggcgagcatcctgaccacatcgtcgttatcaagcacgtcccggctgttggtgactccaagcgcgctatcgacgagtactactccgagcttctcatgggtggccgcaacgtcatgaacattttcaacgagtgtgaagactctcttcttgccacacctcttatctttgaccttgcgatcctcgccgagcttctcactcgtgtgacttaccgtgagaacgctaccggcgagtggcagccgttgtacagtgttctctcgctcttgtcttacatgctcaaggcaccactcgtcaaacccggcgaggacgtcgtcaactctctcaacaggcagagaaacgctttggagcagttcctcaaggcttgtctcggtttggagcactcgaacgacttgttattgaatactagggtctggtag

SEQ ID NO: 142788 - protein, 558 aa, Cryptococcus neoformans var. neoformans B-3501A
MSPTALDARGHNDSFSLPAQDQSEVHPSARRTPEGGLIKVESDSTVYEADGIKAKFTDRGASVIKGPDGKLSVKKTEKNFEFFTKSKVGRVGLMLVGLGGNNGTTVLATNLANKHNISWHTKNGIQQPNYIGSVVRASTVRLGTDPATGKDVFVPISDMLPMVHPNDFVIGGWDISSLSMDKAMLRAKVLEWDLQRQLIPLMEDVKPLPSIYYPDFIAANQADRADNLIPGGDKKAHLEHIRADIRRFKADNHLDSVVVLWTANTERYADIIPGVNDTANNLLKAVETSHEEVSPSTIFAIASILEGVPFINGSPQNTFVPGCIELAEKHKAFIGGDDFKSGQTKVKSVLAEFLVNAGIKPLSISSYNHLGNNDGKNLSSQRQFRSKEISKSSVVDDMVAANHILYKTAEDLSKATGEVVKKGEHPDHIVVIKHVPAVGDSKRAIDEYYSELLMGGRNVMNIFNECEDSLLATPLIFDLAILAELLTRVTYRENATGEWQPLYSVLSLLSYMLKAPLVKPGEDVVNSLNRQRNALEQFLKACLGLEHSNDLLLNTRVW

SEQ ID NO: 142789 - DNA, 1677 bp, Strongylocentrotus purpuratus
  CDS (1)..(1677)
atgcccttcaacacaagtccttcaagtttcttcacacataatgtcatccaagcgatagtggttgaagcagagaagatccttgatctagactgtttgaaagttatccctgtggatgtccagatgaagttccgaacagagcgtaaggtccctcgtctaggcgtgatgctgcatgcggactactacggctccctcactcaggcatcgacgctaaaccttgggtcaggaccagcaggcgatcttaacattcctttcaaagacatcctacctatggtggatcccaacgatattgtatttgatggttgggacatttcttccttcaaccttgccgaggccatggagcgggcccaggtctttgactggagcctccaggagcagctccgcccccacatggcaaccctcaagccccgcccctccgtctacttccccgacttcatcgcggccaatcaggaggatcgcgccgacaatgtcctcaccggaactaagtcagagctcgtcgagaagatccgggcggatatacgtgaattcaagcagaaggtagcgtacatcaacggctcacctcagaacaccttcgtgccgggcgtcatcgagatggccgagaggagaggggtgatgatcgccggtgacgatttcaagtcgggccagaccaagattaaatccgtcctggttgacttccttgtgagtgcaggcatcaagcccgtctcgatcgtcagttacaatcacctcgggaacaacgatggcaagaacctctcggctcccaagcaattcagatcaaaagaggtagcgtacatcaacggctcacctcagaacaccttcgtgccgggcgtcatcgagatggccgagaggagaggggtgatgatcgccggtgacgacttcaagtcgggccagaccaagattaaatccgtcctggttgacttccttgtgagtgcaggcatcaagcccgtctcgatcgtcagttacaatcacctcgggaacaacgatggcaagaacctctcggctcccaagcaattcagatcaaaagagatttccaaatccaacgttgttgacgacatggtggaatcgaaccccatcctctaccctgacggcaagaagcccgaccactgcgttgtcatcaagtatgtcccgtacgttgcggacagcaagagggcgctagacgaatacacgtcggagatcatgatgggcggaaggaacaccatctcgcttcataatacctgtgaggattctctcttggcgagtcctatcatcctggatctggtcatcctcacggagctctgtcagaggatcgaattcaagtctgcgtgtcagagtgaataccaacgattccacagtgtactctcaatcctgagctacctatgtaaagcaccccttgtccctcacaacacaccgctggtcaacgcactattcaaacagagggcgtgtatggaaaacatcttcagagcttgcgtgggacttcccccacagaaccacatgctcctggagcacaagctaaccaacccctcagccatgccggagctctgcatgaacggccactccgtcaacgggaaggtcctccagaacgggaaccacgcccccgagcgtcaacccgcctccaagaaagccaagctcgcaacaacgtcgtctggcttcgtcaacggcaacggcgtgatggagaacggatcggaagttgcagccattcattaa

SEQ ID NO: 142790 - protein, 558 aa, Strongylocentrotus purpuratus
MPFNTSPSSFFTHNVIQAIVVEAEKILDLDCLKVIPVDVQMKFRTERKVPRLGVMLHADYYGSLTQASTLNLGSGPAGDLNIPFKDILPMVDPNDIVFDGWDISSFNLAEAMERAQVFDWSLQEQLRPHMATLKPRPSVYFPDFIAANQEDRADNVLTGTKSELVEKIRADIREFKQKVAYINGSPQNTFVPGVIEMAERRGVMIAGDDFKSGQTKIKSVLVDFLVSAGIKPVSIVSYNHLGNNDGKNLSAPKQFRSKEVAYINGSPQNTFVPGVIEMAERRGVMIAGDDFKSGQTKIKSVLVDFLVSAGIKPVSIVSYNHLGNNDGKNLSAPKQFRSKEISKSNVVDDMVESNPILYPDGKKPDHCVVIKYVPYVADSKRALDEYTSEIMMGGRNTISLHNTCEDSLLASPIILDLVILTELCQRIEFKSACQSEYQRFHSVLSILSYLCKAPLVPHNTPLVNALFKQRACMENIFRACVGLPPQNHMLLEHKLTNPSAMPELCMNGHSVNGKVLQNGNHAPERQPASKKAKLATTSSGFVNGNGVMENGSEVAAIH

SEQ ID NO: 142791 - DNA, 1581 bp, Tribolium castaneum
  CDS (1)..(1581)
atggaaattgttgtcaacagccccaaagtgaaatactgtgacaattacatcgaaacgcattatgactatttatacaccaaagcggaaaaaagggggaacaaaattgaggtcgcccccgtcaccgaacatctggtgatacggaccgagagcaaagtcccccgtgtgggggtgatgctagtgggctggggcgggaacaacgggagtacttttaccgcggccgttctggccaacaaggagggtttgtcttggcagacgaagaagggagtccagaaggcgaattggtatgggtctgttacccaggctagcacggttagattgggtggcgatgtctacgtaccattgggcaagttgttgccaacggtacatcccgacgatttggtgattgatgggtgggatatcagttcggccaatttggccgaagcgatggaaagggcgcaggttttggagccagggctccagcaacagctcaaggcgaaaatggcagctttgaagccgcgaccgtcgatctacgaccaggatttcattgcagcaaatcaggcatctcgcgccgacaacatcatcaaaggaaccaaactcgaacaagtgcagaaaatctgccaagacatcgagaatttcaaaaagaaaacaaacgttgacaaagtcataatcctatggacagcaaacactgaacgtttcactgaaatcgtagacggaataaacgatacttatgctaatctcaaattggcaatttcctcaaaccatccagaaatctctccatcaacactatttgcttacgctgccatttccatgaaatgtacttacatcaacggctccccacaaaacaccttcgtaccgggaatcatcgaaatggcagaaaaaaataacgtttttatcgctggagatgatttcaaatcaggacagaccaaaattaagagcgttttggtcgactttttggtcagtgcagggattaaaccgaccagtattgtaagctataatcatttagggaataatgatgggaagaatttgtccgcgcccaaacaattccgctccaaggagatatcgaaaagtaacgttgttgacgatatggtcgattctaacgacattctgtacaaaccgggggaaaaacccgatcatgtggttgtcattaagtacgtcccatatgtcggcgactctaagcgtgcgatggacgagtacacctctgaaataatgatgggaggtctcaacaccattgtggtgcacaacacttgcgaggattcgcttttggccacccctattatcctagatctgataattttggccgagttgtgctcgaggattcatctcaagaaacaaggacaaggcgaccgagagtttgtgggtttccacagtgttctctcgcttttgagttacttatgcaaggcacctttggtgcctcacaacactcctgtcgtcaatgctcttttcagacagagggcatgtattgagaacgtgatgaaagcgtgtctgggtttgccacctgattccaatatgttgcttgagcacaaagtgccgtttttaatgaaagatgaagtaagtaacgagccacataaaaagaagattaaaattcagaatggcgggcattaa

SEQ ID NO: 142792 - protein, 526 aa, Tribolium castaneum
MEIVVNSPKVKYCDNYIETHYDYLYTKAEKRGNKIEVAPVTEHLVIRTESKVPRVGVMLVGWGGNNGSTFTAAVLANKEGLSWQTKKGVQKANWYGSVTQASTVRLGGDVYVPLGKLLPTVHPDDLVIDGWDISSANLAEAMERAQVLEPGLQQQLKAKMAALKPRPSIYDQDFIAANQASRADNIIKGTKLEQVQKICQDIENFKKKTNVDKVIILWTANTERFTEIVDGINDTYANLKLAISSNHPEISPSTLFAYAAISMKCTYINGSPQNTFVPGIIEMAEKNNVFIAGDDFKSGQTKIKSVLVDFLVSAGIKPTSIVSYNHLGNNDGKNLSAPKQFRSKEISKSNVVDDMVDSNDILYKPGEKPDHVVVIKYVPYVGDSKRAMDEYTSEIMMGGLNTIVVHNTCEDSLLATPIILDLIILAELCSRIHLKKQGQGDREFVGFHSVLSLLSYLCKAPLVPHNTPVVNALFRQRACIENVMKACLGLPPDSNMLLEHKVPFLMKDEVSNEPHKKKIKIQNGGH

SEQ ID NO: 142793 - DNA, 1275 bp, Acidobacteria bacterium Ellin345
  CDS (1)..(1275): transl_table=11
atgatgccgggcatgggcgccgtggcaacgaccttcgtggccggcgtggaagcggtccgcaagggactggcaaaaccgatcggctcactgacgcagatgggcacggtgcggctgggcaagcgtactgatggccgctcgccgaagattaacgagttcgttccattggcgaagctcgacgacctggttttcacgggttgggacattttcgaagacaacatgtacgaagccgcgaacaaagccggcgtgttggaaaagagcctgcttgagcaggtgaggccgctgctgtcggagatcaagccgcgcaaggctgtcttcgataggaactatgtgaagcgtcttgacggcccgaacgtgaagaagggcaagaacaagatggagcttgccgagcagcttcggcaggacatccgcgactttaagaaagagagcggcgtcgagcggctggtaatgatgtggtgcggttcgacggagacttacatcgagcgcgggccgacacatgagtcggtggcgaaactcgagaaggcgatgcacgagaacgatgagagtattgcgccctcgatgtgctatgcctacgcagcgctgcaggagggagtgccgtttgcgaatggcgcgccgaacctgacggtggatattccggcgatgtgggagctctcgaagaagaacaatgctccgatcgcgggcaaggactttaagaccgggcagacgctgatgaagacgatcctggcaccgggcttcaaagcgagaatgctgggactgagcggctggtattcgacgaacatcctgggcaatcgcgacggcgaagtgctggatgatccgggatcgttcaagacgaaggaagagtcgaagctgtcggtgctggagcacattcttcagccggagaagtatcctgacctgtacggcaatattttccacaaggttcggattaactattatccgccgcgtggtgataataaagagggttgggacaacatcgatatcttcggatggcttgggtatccgatgcagatcaaagtcgatttcctgtgccgcgactcgattctggcagccccgatcgtgcttgatctggtgctgttcctcgatctggcgaagcgctcgtcagcgttgcgcgcacttggaattcaggagtggctgagtttctatttgaagtcgccgatgacgccggacgggctgtatccggagcatgatctgtttattcagtcgatgaagttgaagaacacgctgcggcacctgaagggcgaggatttgatcacgcatttggggctggagtattacgactga

SEQ ID NO: 142794 - protein, 424 aa, Acidobacteria bacterium Ellin345
MMPGMGAVATTFVAGVEAVRKGLAKPIGSLTQMGTVRLGKRTDGRSPKINEFVPLAKLDDLVFTGWDIFEDNMYEAANKAGVLEKSLLEQVRPLLSEIKPRKAVFDRNYVKRLDGPNVKKGKNKMELAEQLRQDIRDFKKESGVERLVMMWCGSTETYIERGPTHESVAKLEKAMHENDESIAPSMCYAYAALQEGVPFANGAPNLTVDIPAMWELSKKNNAPIAGKDFKTGQTLMKTILAPGFKARMLGLSGWYSTNILGNRDGEVLDDPGSFKTKEESKLSVLEHILQPEKYPDLYGNIFHKVRINYYPPRGDNKEGWDNIDIFGWLGYPMQIKVDFLCRDSILAAPIVLDLVLFLDLAKRSSALRALGIQEWLSFYLKSPMTPDGLYPEHDLFIQSMKLKNTLRHLKGEDLITHLGLEYYD

SEQ ID NO: 142795 - DNA, 1335 bp, Myxococcus xanthus DK 1622
  CDS (1)..(1335): transl_table=11
atggaaaacaagaggtcggtcgcgaagccggacggcaagctcgcggtcctgattccgggtctgggcgctgtgtccaccacgctgatggcgggtgtcgagctggcgcgcaagggcaagggtcaccccattgggtcgctcacgcagatgggcaccgcccgcctggggaagcggaccgacgggcgcaccgtgaagctcaacgagctggtgcctctggcggagctgaaggacgttgccttcggcgcctgggacatcatccgtgaggacgcatacgaagtggccgtgcgctcgggcgtgctcagcgacaagcacctggaggaggtgaagccgttcctccagagcatcaagccgaagcagggcgtgcacgaccctgagttcgtgcgccgcatcgaggccaaccacatcaaggccaccaagacgcaccgcgagagcatcgaagcgctgcgccaggacatccgcgacttcaagaaggagctcaacgcgacgcgcgccgtgatggtggtgtgcagcagcgtggagaccttccgtccgctgcccgagtccttcaagacgctggccgccttcgagaaggcgctggacgagaacagcccggacatcaaccccaccgcgctgtacacctacgcggccatcaaggagggcgtgcccttcgcgaacgccacgcccaacgccagcgtggacacgccggcgctccaggagatggccaagcaggagtcggtggccgtcgccggccgcgacctcaagagcggccagacgatgatgaagacggtcatcgcgcccgcgctcaaggcccgcatgctgggtctggatggctggttctccaccaacatcctgggcaaccgcgacggcgaggtgctggacgaccccgcggccttcaaggccaaggaagtcaccaagtcgagcgtgctggacaccatcctgcagcccgacctgtacccggagctgtacaagaagtacgcgcacaaggtggccatccactactacccgccccgcggcgacgcgaaggagggttgggacaacatcgacatcaccggatggctcggctatccgatgcagatcaaggtcaacttcctctgccgcgactccatcctggccgccccgctggtgctggacatcgcgctgttcctggacctggccaagcggctggagtggcgcggcatccaggagtggatgtccttctacttcaagacccccatggcgcagccgggtctgccggtggagcacgacctcttcatccagctcaccaagctgaagaacacgctgcgcgtcgtcgcgggcgaggaccccatcacccacctcgggctcgactattacggagatgacctcccgctctccaaataa

SEQ ID NO: 142796 - protein, 444 aa, Myxococcus xanthus DK 1622
MENKRSVAKPDGKLAVLIPGLGAVSTTLMAGVELARKGKGHPIGSLTQMGTARLGKRTDGRTVKLNELVPLAELKDVAFGAWDIIREDAYEVAVRSGVLSDKHLEEVKPFLQSIKPKQGVHDPEFVRRIEANHIKATKTHRESIEALRQDIRDFKKELNATRAVMVVCSSVETFRPLPESFKTLAAFEKALDENSPDINPTALYTYAAIKEGVPFANATPNASVDTPALQEMAKQESVAVAGRDLKSGQTMMKTVIAPALKARMLGLDGWFSTNILGNRDGEVLDDPAAFKAKEVTKSSVLDTILQPDLYPELYKKYAHKVAIHYYPPRGDAKEGWDNIDITGWLGYPMQIKVNFLCRDSILAAPLVLDIALFLDLAKRLEWRGIQEWMSFYFKTPMAQPGLPVEHDLFIQLTKLKNTLRVVAGEDPITHLGLDYYGDDLPLSK

SEQ ID NO: 142797 - DNA, 1332 bp, Rubrobacter xylanophilus DSM 9941
  CDS (1)..(1332): transl_table=11
atgagaaggaatgaggaggcgaggaaggaggggggcgagaagcttggggttctgctcgttggggtgggaggggcggttgccaccaccttcatggcgggcgtcgagctcataaggcggggctttgggcggcctgttgggtccctgagccagcttggcaggcttgcgctctccccggacggggaggatcggaggagcataaaggagctcttgccgcttgcctcgatggaagagcttgtgtttgggggctgggacatctttggggaggactgctacgaggctgcggtgggggctggggttttgagcaaggagcatttggggcttgtgagggacgccctcagggaggttgagatcttcgagggggtcttcgagcggcgctttgtgagctctcttgagggggatcacaccaaggaggggcagtacgagagcctctttgaggcggcctcgcttgtgcgggaggagatccgcgctttcaagagaaagagcggggcggggagggctgtgatgatcaactgcgcttcgacggaggcccacatcgagctcgaggaggagcggtggggcagggttcacagaagcgttgaggactttgagcgggcgctgaaagagaacaagagccacccggccatccccccctctgcgctctacgcctacgcggccatagaagagggggtgccctacgccaacggcacgccctcccttggggcgcacagtgcggccttgaaagagcttgccgagcacaggggcgttgccataagcggcaaggacttcaagagcggccagaccttcataaaaagcgcccttgccccggccataaaggccaggatgcttgggatggaggggtggttttcgaccaacatcctgggcaaccgggacgggctggttctggaggctccgcagaacttcaagagcaaggagctcacaaagcgctcggtgctcgatgccattctggagcccgagctctaccccgagctctatggggagctctaccacagggtggagataaactactacccgccgcggggggacgccaaggagggctgggacaacatagacatctttggctggcttggctacccgatgcagataaagctcaactttctgtgccgcgactccatactggctgcgcccatagtgcttgacctggcgctcttcatggaccttgcccagaggctctcctatgggggcgggggggttcagcggtggctctcgttctactacaagagccccatggttggggaggaggccagagagaggccggagcacgacctctttgcgcagctgctcatgctgaggggtgcgctcagggagatggccggcctctcctccgccgggtga

SEQ ID NO: 142798 - protein, 443 aa, Rubrobacter xylanophilus DSM 9941
MRRNEEARKEGGEKLGVLLVGVGGAVATTFMAGVELIRRGFGRPVGSLSQLGRLALSPDGEDRRSIKELLPLASMEELVFGGWDIFGEDCYEAAVGAGVLSKEHLGLVRDALREVEIFEGVFERRFVSSLEGDHTKEGQYESLFEAASLVREEIRAFKRKSGAGRAVMINCASTEAHIELEEERWGRVHRSVEDFERALKENKSHPAIPPSALYAYAAIEEGVPYANGTPSLGAHSAALKELAEHRGVAISGKDFKSGQTFIKSALAPAIKARMLGMEGWFSTNILGNRDGLVLEAPQNFKSKELTKRSVLDAILEPELYPELYGELYHRVEINYYPPRGDAKEGWDNIDIFGWLGYPMQIKLNFLCRDSILAAPIVLDLALFMDLAQRLSYGGGGVQRWLSFYYKSPMVGEEARERPEHDLFAQLLMLRGALREMAGLSSAG

SEQ ID NO: 142799 - DNA, 1356 bp, Rubrobacter xylanophilus DSM 9941
  CDS (1)..(1356): transl_table=11
atgagaaggaatgaggaggcgaggaaggaggggggcgagaagcttggggttctgctcgttggggtgggaggggcggttgccaccaccttcatggcgggcgtcgagctcataaggcggggctttgggcggcctgttgggtccctgagccagcttggcaggcttgcgctctccccggacggggaggatcggaggagcataaaggagctcttgccgcttgcctcgatggaagagcttgtgtttgggggctgggacatctttggggaggactgctacgaggctgcggtgggggctggggttttgagcaaggagcatttggggcttgtgagggacgccctcagggaggttgagatcttcgagggggtcttcgagcggcgctttgtgagctctcttgagggggatcacaccaaggaggggcagtacgagagcctctttgaggcggcctcgcttgtgcgggaggagatccgcgctttcaagagaaagagcggggcggggagggctgtgatgatcaactgcgcctcgacggaggcccacatcgagctcgaggaggagcggtggggcagggttcacagaagcgttgaggactttgagcgggcgctgaaagagaacaagagccacccggccatccccccctctgcgctctacgcctacgcggccatagaagagggggtgccctacgccaacggcacgccctcccttggggcgcacagtgcggccttgaaagagcttgccgagcacaggggcgttgccataagcggcaaggacttcaagagcggccagaccttcataaaaagcgcccttgccccggccataaaggccaggatgcttgggatggaggggtggttttcgaccaacatcctgggcaaccgggacgggctggttctggaggctccgcagaacttcaagagcaaggagctcacaaagcgctcggtgctcgatgccattctggagcccgagctctaccccgagctctatggggagctctaccacagggtggagataaactactacccgccgcggggggacgccaaggagggctgggacaacatagacatctttggctggcttggctacccgatgcagataaagctcaactttctgtgccgcgactccatactggctgcgcccatagtgcttgacctggcgctcttcatggaccttgcccagaggctctcctatgggggcgggggggttcagcggtggctctcgttctactacaagagccccatggttggggaggaggccagagagaggccggagcacgacctctttgcgcagctgctcatgctgaggggtgcgctcagggagatggccggcctctcctccgcttctccctgcgatccctcctccctcaagtga

SEQ ID NO: 142800 - protein, 451 aa, Rubrobacter xylanophilus DSM 9941
MRRNEEARKEGGEKLGVLLVGVGGAVATTFMAGVELIRRGFGRPVGSLSQLGRLALSPDGEDRRSIKELLPLASMEELVFGGWDIFGEDCYEAAVGAGVLSKEHLGLVRDALREVEIFEGVFERRFVSSLEGDHTKEGQYESLFEAASLVREEIRAFKRKSGAGRAVMINCASTEAHIELEEERWGRVHRSVEDFERALKENKSHPAIPPSALYAYAAIEEGVPYANGTPSLGAHSAALKELAEHRGVAISGKDFKSGQTFIKSALAPAIKARMLGMEGWFSTNILGNRDGLVLEAPQNFKSKELTKRSVLDAILEPELYPELYGELYHRVEINYYPPRGDAKEGWDNIDIFGWLGYPMQIKLNFLCRDSILAAPIVLDLALFMDLAQRLSYGGGGVQRWLSFYYKSPMVGEEARERPEHDLFAQLLMLRGALREMAGLSSASPCDPSSLK

SEQ ID NO: 142801 - DNA, 1320 bp, Solibacter usitatus Ellin6076
  CDS (1)..(1320): transl_table=11
ttgccgaataaggacaacgtccaaattgcgcctgccgaagggaaactgggagttttgattcccggaatgggcgcggtgacgacgaccttcatcgccgggctcgaagccttcaagctcgggttggggaagccaatcggatcgctcacgcagttgggcaccatccgcttgggtaagaggaccgaagggcgcaaccccgcgattaaagattttgttccgctggccaacatgtcggacatcgaagtgggctgctgggacatttttgaggacaacgcctacgaagcggccgtgaaggccggtgtgctcgagacttcgctgctcgaccaggttaagggaccgctctcggcgattcagccgatgaaagccgtcttcgaccagaacttcgtgaagcggatcaagggcccgaacgtgaagaccggcggctccaaaatggatcacgtggagatggtcatggacgacatccgcaagttcaaggaacggactggggtatcgcgaaccaccatgatctggtgcgggtccaccgaggtttatcacgaggcggccccggtgcatgccacgctgaaggatttcgagtgcgggctgcagaagaacgatccggagatttcgccgagccagatctacgcctatgcggcgctcaagagcggcgtcagctacgccaatggcgctccgcacttgaccacggatatgccggcgctgcaggaactggcgcgcacaatgaacctgccggtgtgcggcaaggattacaagagcggtcagacgttcatgaagacgctgatcgcgcctggtttgaagagccggctgctggggttaaacggctggttttcgaccaacatcctggggaatcgcgacggggaagtgcttgacgaaccgggcagtttccggtcaaaggaagtcagcaaaagctcggcgctggagcacattttacagggcgaactctaccccgacctgtacaaggagttttaccacaaggtgcggattgagtactatccgccgcgtggggacgccaaggaaggctgggacaacatcgacatcttcgggtggctgggctacccgatgcagatcaagattaatttcctgtgccgcgattcgatcttggccgcgccgctggttttggatatcgtattgttcatggacctggcgcagcgcgccgggatgcgcggcatccaggaatggctttcgttttacttcaaagcgccgatgcatgctccggagctttaccccgagcatgacatcttcatccagctcatgaagctgaaaaacaccctgcgctggatgcggggcgaggacctgatcacgcatttgggcctggaatattacgattag

SEQ ID NO: 142802 - protein, 439 aa, Solibacter usitatus Ellin6076
MPNKDNVQIAPAEGKLGVLIPGMGAVTTTFIAGLEAFKLGLGKPIGSLTQLGTIRLGKRTEGRNPAIKDFVPLANMSDIEVGCWDIFEDNAYEAAVKAGVLETSLLDQVKGPLSAIQPMKAVFDQNFVKRIKGPNVKTGGSKMDHVEMVMDDIRKFKERTGVSRTTMIWCGSTEVYHEAAPVHATLKDFECGLQKNDPEISPSQIYAYAALKSGVSYANGAPHLTTDMPALQELARTMNLPVCGKDYKSGQTFMKTLIAPGLKSRLLGLNGWFSTNILGNRDGEVLDEPGSFRSKEVSKSSALEHILQGELYPDLYKEFYHKVRIEYYPPRGDAKEGWDNIDIFGWLGYPMQIKINFLCRDSILAAPLVLDIVLFMDLAQRAGMRGIQEWLSFYFKAPMHAPELYPEHDIFIQLMKLKNTLRWMRGEDLITHLGLEYYD

SEQ ID NO: 142803 - DNA, 1848 bp, Zea mays
  CDS (69)..(1601)
aactcgcttcgcattccgttcgagcaggggagcggcagtgagaagggaagggagggaattaaggcaagatgttcatcgagagcttccgcgtcgagagcccccacgtgcggtacggcccgacggagatcgagtcggagtaccggtacgacacgacggagctggtgcacgaggccaaggacggcgcctcccgctgggtcgtccgccccaagtccgtcaagtacaacttccggaccagcaccgccgtccccaagctcggggtcatgcttgtggggtggggaggcaacaacgggtccacgctgacggctggggtcattgccaacagggaggggatctcatgggcgaccaaggacaaggtgcagcaagccaactactacggctccctcacccaggcttccaccatcagagtaggcagctacaacggggaggagatatatgcgccgttcaagagcctcctacccatggtgaacccagacgaccttgtgtttggaggctgggacatcagcagcatgaacctggcagatgccatgaccagggccaaggtgctggacattgacctgcagaagcagctcaggccctacatggagtccatggtgccacttcccggtgtctatgatccggacttcatcgccgctaaccagggctctcgtgccaacaatgtcatcaagggcaccaagaaagaacaggtggagcagataatcaaggatatcagggagtttaaggagaagaacaaagtggacaaggtagttgtgctgtggactgcaaacactgaaaggtacagcaatgtatgcgctggtctcaacgacacaatggagaatctgctggcatctgtggacaagaacgaggcggagatctcgccatcaacactatatgccattgcctgtgtcacggagggggtgccgttcatcaatgggagcccccagaacacttttgtgcctgggctgattgatcttgctatcaagaacaactgcctgatcggtggtgacgacttcaagagtgggcagaccaagatgaaatcggtcctggttgattttcttgttggtgctggaataaagcccacctcgattgtgagctacaaccacttgggaaacaacgacggcatgaacctgtctgcccctcaaacattcaggtccaaggagatctccaagagcaacgtggtggatgacatggtctcaagcaatgccattctctatgggcccggcgagcatcccgatcatgttgttgtcatcaagtacgtgccgtacgtgggagacagtaagagggctatggacgagtacacatcagagatcttcatgggcggcaagagcaccatcgtgctgcacaacacctgcgaggactcgctcctcgccgcaccgatcatcctcgatctggtgctcctggctgagctcagcaccaggatccagctaaaacctgagggaacggacaagttccactccttccacccggtggccaccatccttagctacctcaccaaggcaccactggttccgcccggcacaccggtggtgaacgctcttgcaaagcagagggcgatgctggagaacatcatgagggcctgcgttggcctggccccagagaacaacatgatcctggagtacaagtgagcgaagtggcgtggcctgcagctagatatggaggaggctgcacgaaggggactagagaggcgagattagctgtggaattgtgttggcttctcgtgttttcttttgcgttcttttcctggtcatcgctgtggcgcttttgtattttatttgttggacccgtaacactatcagggctctgctattagcgcatgaagcctgtaatggcatcgtatgataatgtgatcgagggtgctagtaagcattattt

SEQ ID NO: 142804 - protein, 510 aa, Zea mays
MFIESFRVESPHVRYGPTEIESEYRYDTTELVHEAKDGASRWVVRPKSVKYNFRTSTAVPKLGVMLVGWGGNNGSTLTAGVIANREGISWATKDKVQQANYYGSLTQASTIRVGSYNGEEIYAPFKSLLPMVNPDDLVFGGWDISSMNLADAMTRAKVLDIDLQKQLRPYMESMVPLPGVYDPDFIAANQGSRANNVIKGTKKEQVEQIIKDIREFKEKNKVDKVVVLWTANTERYSNVCAGLNDTMENLLASVDKNEAEISPSTLYAIACVTEGVPFINGSPQNTFVPGLIDLAIKNNCLIGGDDFKSGQTKMKSVLVDFLVGAGIKPTSIVSYNHLGNNDGMNLSAPQTFRSKEISKSNVVDDMVSSNAILYGPGEHPDHVVVIKYVPYVGDSKRAMDEYTSEIFMGGKSTIVLHNTCEDSLLAAPIILDLVLLAELSTRIQLKPEGTDKFHSFHPVATILSYLTKAPLVPPGTPVVNALAKQRAMLENIMRACVGLAPENNMILEYK

SEQ ID NO: 142805 - DNA, 1533 bp, Glycine max
  CDS (1)..(1533)
atgttcatcgagaattttaaggttgagtgtcctaatgtgaagtacaccgagactgagattcagtccgtgtacaactacgaaaccaccgaacttgttcacgagaacaggaatggcacctatcagtggattgtcaaacccaaatctgtcaaatacgaatttaaaaccaacatccatgttcctaaattaggggtaatgcttgtgggttggggtggaaacaacggctcaaccctcaccggtggtgttattgctaaccgagagggcatttcatgggctacaaaggacaagattcaacaagccaattactttggctccctcacccaagcctcagctatccgagttgggtccttccagggagaggaaatctatgccccattcaagagcctgcttccaatggttaaccctgacgacattgtgtttgggggatgggatatcagcaacatgaacctggctgatgccatggccagggcaaaggtgtttgacatcgatttgcagaagcagttgaggccttacatggaatccatgcttccactccccggaatctatgacccggatttcattgctgccaaccaagaggagcgtgccaacaacgtcatcaagggcacaaagcaagagcaagttcaacaaatcatcaaagacatcaaggcgtttaaggaagccaccaaagtggacaaggtggttgtactgtggactgccaacacagagaggtacagtaatttggttgtgggccttaatgacaccatggagaatctcttggctgctgtggacagaaatgaggctgagatttctccttccaccttgtatgccattgcttgtgttatggaaaatgttcctttcattaatggaagccctcagaacacttttgtaccagggctgattgatcttgccatcgcgaggaacactttgattggtggagatgacttcaagagtggtcagaccaaaatgaaatctgtgttggttgatttccttgtgggggctggtatcaagccaacatctatagtcagttacaaccatctgggaaacaatgatggtatgaatctttcggctccacaaactttccgttccaaggaaatctccaagagcaacgttgttgatgatatggtcaacagcaatgccatcctctatgagcctggtgaacatccagaccatgttgttgttattaagtatgtgccttacgtaggggacagcaagagagccatggatgagtacacttcagagatattcatgggtggaaagagcaccattgttttgcccaacacatgcgaggattccctcttagctgctcctattatcttggacttggtccttcttgctgagctcagcactagaatcgagtttaaagctgaaaatgagggaaaattccactcattccacccagttgctaccatcctcagctacctcaccaaggctcctctggttccaccgggtacaccagtggtgaatgcattgtcaaagcagcgtgcaatgctggaaaacataatgagggcttgtgttggattggccccagagaataacatgattctcgagtacaagtga

SEQ ID NO: 142806 - protein, 510 aa, Glycine max
MFIENFKVECPNVKYTETEIQSVYNYETTELVHENRNGTYQWIVKPKSVKYEFKTNIHVPKLGVMLVGWGGNNGSTLTGGVIANREGISWATKDKIQQANYFGSLTQASAIRVGSFQGEEIYAPFKSLLPMVNPDDIVFGGWDISNMNLADAMARAKVFDIDLQKQLRPYMESMLPLPGIYDPDFIAANQEERANNVIKGTKQEQVQQIIKDIKAFKEATKVDKVVVLWTANTERYSNLVVGLNDTMENLLAAVDRNEAEISPSTLYAIACVMENVPFINGSPQNTFVPGLIDLAIARNTLIGGDDFKSGQTKMKSVLVDFLVGAGIKPTSIVSYNHLGNNDGMNLSAPQTFRSKEISKSNVVDDMVNSNAILYEPGEHPDHVVVIKYVPYVGDSKRAMDEYTSEIFMGGKSTIVLPNTCEDSLLAAPIILDLVLLAELSTRIEFKAENEGKFHSFHPVATILSYLTKAPLVPPGTPVVNALSKQRAMLENIMRACVGLAPENNMILEYK

SEQ ID NO: 142807 - DNA, 1740 bp, Oryza sativa subsp
  CDS (1)..(1740)
atgttcatcgagagcttccgcgtggagagcccgcacgtgcggtacggcgcggcggagatcgagtcggactaccagtacgacacgacggagctggtgcacgagagccacgacggcgcctcccgctgggtcgtccgccccaagtccgtccgctacaacttccggaccaccaccaccgtccccaagctcggggtgatgctcgtggggtggggcggcaacaacggctcaacgctgacggctggggtcatcgccaacagggagggaatctcatgggcgaccaaggacaaggtgcagcaagccaactactatggctcactcacccaggcgtccaccatcagggtcgggagctacaacggggaggagatctacgcgcccttcaagagcctcctgcccatggtgaaccctgatgaccttgtgttcgggggctgggacattagcaacatgaacctggctgatgctatgaccagggcaaaggtacttgacattgatctgcagaagcagctcagaccttacatggagtccatggtgcctctccccggcatctatgaccccgacttcatcgccgccaaccagggatcccgcgcgaacaatgtcatcaagggcaccaagaaggagcagatggagcagatcatcaaggacatcagggagttcaaggaaaagagcaaagtggacaaggtggtggtgttgtggactgcaaacactgaaaggtacagcaatgtctgtgttgggctcaatgacacaatggagaacctcctggcgtctgtggacaagaacgaggcggagatatcaccatcgacactgtatgccattgcctgtgtcatggagggtataccgttcattaacgggagtcctcagaacacctttgtgcctgggctgatcgatcttgctattaagaacaactgcctgattggtggtgatgatttcaagagtggacagacaaagatgaagtctgtcttggttgatttcctagttggtgctggaataaagcccacctcaattgtcagctacaaccacttggggaataatgatggcatgaacctttccgcacctcaaacattccgatccaaggagatctccaagagcaatgtggtcgatgacatggtctcaagcaatgccatcctctatgagcctggcgagcatcctgatcatgttgttgtgatcaagtatgtgccgtatgttggagacagcaagagggcaatggacgagtacacctcagagatcttcatggggggtaagagcaccatcgttctgcacaacacctgtgaggactcacttcttgccgcgccgatcattcttgatctggtgctccttgccgagctcagcaccaggattcagctgaaagccgagggggaggagaagttccattccttccatccagtggctaccatcctgagctacctcaccaaggcaccccttgttcctcctggcacaccagtggtgaacgccctggcaaagcagagggcaatgcttgagaacatcatgagggcctgcgttgggctggcccccgagaacaacatgatcctggagtacaaccgtttcctccccgtcggatccgcccgcgccgtcgccgatgccgctgcctcctgcgcccggttgcctctgcggtttcccttctcttcagctctcgccacgctccgtgctccgacgtacaacgcgcagcctccggaacctggtactactgcagttgacgcgcattgccttgctgaaaagaaagtggccctcagagagaatctggttggttaa

SEQ ID NO: 142808 - protein, 579 aa, Oryza sativa subsp
MFIESFRVESPHVRYGAAEIESDYQYDTTELVHESHDGASRWVVRPKSVRYNFRTTTTVPKLGVMLVGWGGNNGSTLTAGVIANREGISWATKDKVQQANYYGSLTQASTIRVGSYNGEEIYAPFKSLLPMVNPDDLVFGGWDISNMNLADAMTRAKVLDIDLQKQLRPYMESMVPLPGIYDPDFIAANQGSRANNVIKGTKKEQMEQIIKDIREFKEKSKVDKVVVLWTANTERYSNVCVGLNDTMENLLASVDKNEAEISPSTLYAIACVMEGIPFINGSPQNTFVPGLIDLAIKNNCLIGGDDFKSGQTKMKSVLVDFLVGAGIKPTSIVSYNHLGNNDGMNLSAPQTFRSKEISKSNVVDDMVSSNAILYEPGEHPDHVVVIKYVPYVGDSKRAMDEYTSEIFMGGKSTIVLHNTCEDSLLAAPIILDLVLLAELSTRIQLKAEGEEKFHSFHPVATILSYLTKAPLVPPGTPVVNALAKQRAMLENIMRACVGLAPENNMILEYNRFLPVGSARAVADAAASCARLPLRFPFSSALATLRAPTYNAQPPEPGTTAVDAHCLAEKKVALRENLVG

SEQ ID NO: 142809 - DNA, 1730 bp, Medicago falcata
  CDS (14)..(1546)
tcaagtaaccaaaatgttcatcgagaatttcaaggtcgaaagtcctaacatgaagtacacagagactgagattcagtccgtgtacagttacgaaacaaccgaacttgttcatgagaacagaaataacacttatgagtggattgttaagcccaaaacagtcaaatatgagtttaaaacacaaacaaatgtccctaaattgggggtaatgcttgttgggtggggtggaaacaatggttcaaccctcactggtggtgttattgcaaaccgagagggtatatcttgggcaacaaaggacaagattcagcaagccaattattttggttcgctaactcaagcatcagctatcagagtggggtctttccaaggggaggaaatacatgccccattcaagagccttcttccaatggtaaaccctgaggatattgtgtggggaggatgggatatcagtaacttgaacctagctgatgccatgggcagagctagagtgtttgacatagacctacaaaaacaactaaggccctacatggaatccatggttccacttcctggtatctatgaccctgatttcattgctgctaatcaaggagatcgtgctaacaacatcattaaaggaacaaagaaagaacaacttcaacaagtcatcaaagacattaaggagtttaaggaaactaccaaggttgacaaggttgttgtactctggactgccaacactgagaggtatagtaatattgttgtgggactaaatgacaccactgaaaatcttttggcttctgtggacaagaatgaagctgagatttcaccttcaaccctttatgccttggcttgtgttcttgaaaatgttcctttcattaatggaagccctcaaaacacctttgtcccagggttgattgatctggccatcaaaaggaatagtttgattggtggagatgacttcaagagtggtcagacaaaaatcaagtctgtgttggttgatttccttgtgggagctggtatcaaaccaacatcaatagtgagttacaaccatttgggaaacaatgatggaatgaatctttctgcaccacaaaccttccgctctaaggaaatctccaagagtaacgttgttgatgatatggtcaacagcaacgccatcctctatgggcctggtgaacatccagaccatgttgttgtcattaagtatgtgccttatgtgggggacagtaagagagcaatggatgagtacacttcagagatattcatgggtggaaagaacacaattgtgatgcacaacacatgtgaagattcacttttggcagctccaattatcttggatttggtccttcttgctgaacttagcactagaatccagttcaaatctgaacatgaggacaagtttcattcattccatgctgttgcaaccatcctcagttacctctctaaggctccacttgttccaccaggtacaccagttgtgaatgcactgtcaaagcagagagctatgctggaaaacattatgagagcttgtgttggattggctccagaaaacaacatgatccttgaatacaagtgaagtgaagtaacagttcggttatataggaatttgggataactcagttcttatgtgcctaaaacttatcccatgctcctttgtttgttgttatattttgatgtgttggttagcatatgtacctaccaacatttgattgtgtcttttctcctgccggcttattttagagcattgagcaggccatttt

SEQ ID NO: 142810 - protein, 510 aa, Medicago falcata
MFIENFKVESPNMKYTETEIQSVYSYETTELVHENRNNTYEWIVKPKTVKYEFKTQTNVPKLGVMLVGWGGNNGSTLTGGVIANREGISWATKDKIQQANYFGSLTQASAIRVGSFQGEEIHAPFKSLLPMVNPEDIVWGGWDISNLNLADAMGRARVFDIDLQKQLRPYMESMVPLPGIYDPDFIAANQGDRANNIIKGTKKEQLQQVIKDIKEFKETTKVDKVVVLWTANTERYSNIVVGLNDTTENLLASVDKNEAEISPSTLYALACVLENVPFINGSPQNTFVPGLIDLAIKRNSLIGGDDFKSGQTKIKSVLVDFLVGAGIKPTSIVSYNHLGNNDGMNLSAPQTFRSKEISKSNVVDDMVNSNAILYGPGEHPDHVVVIKYVPYVGDSKRAMDEYTSEIFMGGKNTIVMHNTCEDSLLAAPIILDLVLLAELSTRIQFKSEHEDKFHSFHAVATILSYLSKAPLVPPGTPVVNALSKQRAMLENIMRACVGLAPENNMILEYK

SEQ ID NO: 142811 - DNA, 1533 bp, Xerophyta viscosa
  CDS (1)..(1533)
atgttcatcgaaagcttcaaggtcgagagtcccaacgtcaagtatttctcggaccgcatcgagtcggtctacgattaccagaccaccgagttggttcatgagaaccgcgacggttcgtaccaatgggttgtccgacccaagtcggttcgctacgagtttaagaccgatactcacgtccccaagctcggaatgatgcttgtaggctggggagggaacaatggctcgactctaaccactggaattatagctaatcgagaggggatatcgtgggttacgaaggataaggttcaacaagcgaactacttcggttcacttacccaagcttcgactattcgggttggttcgttcaatggagaagagatctacgctccattcaagagcttgcttcccatggttaacccagatgatattgtgtttggaggatgggacataagcaacatgaaccttgcagattccatggcaagggctaaggtgcttgatatcgacctccagaaacagctcaggccatacatggaatcaatggtccccttgcctggaatctacgatcctgatttcatcgccgccaatcaggaatcgcgtgccaacaatgtcatcaaaggcaccaagaaggagcaggtcgagcagatcatcaaggacattagggaattcaaggagaagacaaaggtggataaggtggtggtcctgtggaccgcgaataccgagaggtacagcgatgtgatcatcggtctcaatgatacgatggagaaccttttgggctcgctcgaaaagaacgagcatgagatttctccgtccactttatttgcgatcgcatgcatcatggagaacgttcctttcatcaatggcagccctcaaaacaccttcgttccagggctcatcgatcttgctattaagaggaacacactcattggtggcgacgacttcaagagcggacagactaagatgaaatctgtgctcgtcgatttccttgttggagctggaataaagccgacatccattgttagctacaatcacctcggcaacaatgatggaatgaacctgtctgcgccgcaaacctttcgttccaaggagatttccaagagcaatgtggtcgatgacatggtctccagcaatggcatcctctacgaacctggcgagcatcctgatcatgtaattgtgatcaagtatgtgccatacgtcggggacaacaaaagggccatggatgagtacacatcggagattttcatgggcggcaagagcacgattgtattgcataacacttgcgaggactcacttctggctgcgccgataattcttgacttggttcttctcgctgaacttagcacccggattcagcttaaagcagagggagaggataatttccagtccttccatcctgtggctacaattctaagctacctcaccaaggctcctctggtacctccgggcacgccggtggtgaatgccctgtcgaagcagcgcgcaatgctggagaacatcctcagagcttgcatcggcttggcgcctgagaataacatgatcttggaatataaatga

SEQ ID NO: 142812 - protein, 510 aa, Xerophyta viscosa
MFIESFKVESPNVKYFSDRIESVYDYQTTELVHENRDGSYQWVVRPKSVRYEFKTDTHVPKLGMMLVGWGGNNGSTLTTGIIANREGISWVTKDKVQQANYFGSLTQASTIRVGSFNGEEIYAPFKSLLPMVNPDDIVFGGWDISNMNLADSMARAKVLDIDLQKQLRPYMESMVPLPGIYDPDFIAANQESRANNVIKGTKKEQVEQIIKDIREFKEKTKVDKVVVLWTANTERYSDVIIGLNDTMENLLGSLEKNEHEISPSTLFAIACIMENVPFINGSPQNTFVPGLIDLAIKRNTLIGGDDFKSGQTKMKSVLVDFLVGAGIKPTSIVSYNHLGNNDGMNLSAPQTFRSKEISKSNVVDDMVSSNGILYEPGEHPDHVIVIKYVPYVGDNKRAMDEYTSEIFMGGKSTIVLHNTCEDSLLAAPIILDLVLLAELSTRIQLKAEGEDNFQSFHPVATILSYLTKAPLVPPGTPVVNALSKQRAMLENILRACIGLAPENNMILEYK

SEQ ID NO: 142813 - DNA, 2855 bp, Pichia pastoris
  CDS (714)..(2291)
gatcaggttcaacaatattggccaatcaagcagttgtagcaacaatatgaaggcagtgttatctgaagaagcaccagttgaaagcgacagacttttgagcaactaaagtaaccacctatttatacagctccttgcacgctctattgcttgtacactcttgagcgtacatagagatgacataagcacacgacgacaacttgattaacaccgaaaaaatggcccgggaatacctgctacttaattgggtaattgaattccgattaccaaatttggtacgttgttacagccctggttactgaaaaaggaaacattttgtcgtgattttcggcaagtctccgttgtggacccatggtcgaggtggtagcctgcatgaattgaattaattgaaacagcaaaacaacccaagtgggaactatgctgtttaaaagtggaatcctttgattaaaatatcaccgctgtaaaactgagctctgaacgattcgattggtatatatatcatgtccaaactaatccctacgagtaagtattcaaggcgcaactaggaatcatctggacgcgcctcaaatcatttgcgtacatattttaattttgttgagtcgatttgttttgtaacatatgggatcgaggagataaagctgtaaatgtataaatagggatccttttctcttcttgcctcttatcctttgtgctcaatcacttaataaactttaatcatgactattcaatacactcctaaagtccaagtcaacactgacaaggcaagatacaccgagaatgaactgcttaccgactacacctatgagaacactatagttgaaaagcaagctgacggtacttacaacgtcactccaacttccctggactttgagttcaaggttgacttgaagacaccaaagacgggtttgttgctggtaggtcttggtggtaacaatggtaccaccttggttggttccgtgttagccaacaaacacaatatatcctttgagaccaagacgggtattcagcagccaaactactatggttctgttacacaagcttctactgttaagttgggaattgacagcaatggtagagatgtctacgcccctttcaactctttgttaccattggttcaccccaatgactttgtagttggaggttgggatatcagtggccttgatttggcctcctctatgagaagatctcaagtcttgcaaccagacttggtcagaaagttggagccttacatgaaggatattgttcctctgccttctgtctactacccagatttcattgctgctaaccagaacgaaagagccgacaactgtttcaatagagaaggcaaagatggagaagtttctaccaagggtaaatggtcccacgttgagcgcattagaagtgacattgccgaattcaagcagaagaacgacttggacaaggttatcgtcctttggactgccaacactgagagatatgccgagctgatcccaggtgtcaatgacaccgctgagaacctgatcaaggctatcaaaaacgaccatgaggaagtctctgcttctacaatttttgctgttgcttgtattttggacaagattccttacatcaatggttccccacagaacacattcgtaccaggatgcatcgagttggctgaaaccgaaggttctttcatcggtggtgacgatttcaaatctggacagaccaagctcaagtctgtgctggcacaattcttggtagatgctggtattagaccagtctcaatcgcatcttacaaccatcttggaaacaatgacggttacaatttgagtgcaccacaacaattcagatccaaagaaatctccaaggcttcagtcgttgatgacatgatcgagagtaacgagattttgtacaatgagaagaacggaaataccattgaccattgcattgtcatcaagtacatgaaggccgttggtgacgacaaagttgccatggatgaataccattccgaactgatgctgggtggacacaacaccatctctatccacaatatttgcgaggactcactactggccactccattgatcattgatctggttgtaatggctgaattcctttccagagtttcttacaagaagaagggtgatgctgaatacgaatctctacactcagtcctctcattcctcagttattggttgaaggctccactgactagaccaggataccaggctattaacggattgaataaacaaagggccggattggacaatttcttgagaatgctaattggtcttccaactcagaatgagctgagatttgaggagagattacagtagttatttttgtattatgtaaggtagccaagccctgaatatcatagaggctttttaaacctatcgcccctgccgacgcttatctgagcggatctagaatctgagaccgttttgttcgctaccgcggatcgccccgcctccaatatctgctatcagttgctgtagtagtccatccagtgctagatatgataatgatacaaagaagtttttttttcccactagaattcttcactagcaaaggatgacaacaacagtgtatggaaagttaacaccgtcgtcttcggactcgtcgatggttcaccagaagtccaaattgtggtctatggacactaccccacaagatataaccgtcgtccacccatatctctctcatattgcttttagtaatacgcttaagttttaccttaatggccgtttgatggtcgtgaagaaccccaatcctgagggaacattgcttgatttcattagaactcaagcgaatcttactggaacgaaactatgctgttcagagggcggctgtggtgcatgtacagtgaccgtcgctgaattcgaccaggaaaagtcgac

SEQ ID NO: 142814 - protein, 525 aa, Pichia pastoris
MTIQYTPKVQVNTDKARYTENELLTDYTYENTIVEKQADGTYNVTPTSLDFEFKVDLKTPKTGLLLVGLGGNNGTTLVGSVLANKHNISFETKTGIQQPNYYGSVTQASTVKLGIDSNGRDVYAPFNSLLPLVHPNDFVVGGWDISGLDLASSMRRSQVLQPDLVRKLEPYMKDIVPLPSVYYPDFIAANQNERADNCFNREGKDGEVSTKGKWSHVERIRSDIAEFKQKNDLDKVIVLWTANTERYAELIPGVNDTAENLIKAIKNDHEEVSASTIFAVACILDKIPYINGSPQNTFVPGCIELAETEGSFIGGDDFKSGQTKLKSVLAQFLVDAGIRPVSIASYNHLGNNDGYNLSAPQQFRSKEISKASVVDDMIESNEILYNEKNGNTIDHCIVIKYMKAVGDDKVAMDEYHSELMLGGHNTISIHNICEDSLLATPLIIDLVVMAEFLSRVSYKKKGDAEYESLHSVLSFLSYWLKAPLTRPGYQAINGLNKQRAGLDNFLRMLIGLPTQNELRFEERLQ

SEQ ID NO: 142815 - DNA, 1587 bp, Phaeosphaeria nodorum
  CDS (1)..(1587)
atggcaccgcacgcagaagaagtagtcggccaggccaatgggttcgggaccagcaccgctcctgccaaggatctctttactgtcagctcttccaacgtggaatacaccgaggataccatcaagtccaagtacacttaccgcacgaccgacgtcacccagaacgccgagggcaagtatgtggccattcccaaggagaccctgtatgacttcaaagtcgaccgcaagatccccaagactggtgtcatgctggtcggttggggtggtaacaatggtaccactgtaactgccggtatcattgccaacaagcgtaacctcgtctgggagaccaagcagggacagcgcggcgccaactactacggatccgtcatcatgagctctaccactaaactgggagtggatagcaagaccggcaaggagatctatatccccttccatgaccttctgcccatggttcacccaaacgacctcgttgtgggtggttgggacatcagcggcatgaacctctctgaggccatggaccgcgccaaggtgctctcgccctctctcaagtccctggtccgcaaggagatgggtgctatgaagcctctgcccagcatctactacccggatttcattgccgccaaccaggaggagcgcgctgataacatccttccgggtagcaaggcttccatggcccatgttgagcagatccgcaaggatatccgtgacttcaagtctgccaatggtctggacaaggtgattgtgcagtggaccgccaacacagagcgttacgccgatatccttgagggtgtgaacgacactgccgacaacctgatgaagtccattgagactggccacgaggaagtctctccttctaccgtcttcgccgtcgcctccatccttgagggcgctcctttcatcaacggctctccccagaacacttttaagcacaacgccttcattggtggtgacgacttcaagtctggccagaccaagatgaagtcggcgcttgttgacttcctgatcaacgccggtatcaagctcacttccattgccagctacaaccatctcggcaacaatgacggcatgaacctcagctctcagaagcagttccgctccaaggagatctccaagtctaacgtggttgacgacatggtcgctgcgaacacggtgctttacaaagaaggcgagcaccctgaccactgcgtcgtcatcaagtacatgccctctgttggagacgacaagcgcgctctcgacgagtactatgctgagatcttcttggatggccaccagactatcagtctgttcaatgtctgcgaggactctctccttgcttctccattgatcattgacttggtcctcgttgctgagatcatgacccgtgtccagtggaaggcacacagtgctgaggcctccgacgacaagtactctggcttccacagcgttctcagtgttcttagctacatgctcaaggctcctcttactcccaccggcactcctgtcgtcaacgctcttgccaagcagcgcgcttgcctcaccaacatcttccgcgcctgcgtcggtcttgaacctgagaacgacatgactctagagcacaagctattctag

SEQ ID NO: 142816 - protein, 528 aa, Phaeosphaeria nodorum
MAPHAEEVVGQANGFGTSTAPAKDLFTVSSSNVEYTEDTIKSKYTYRTTDVTQNAEGKYVAIPKETLYDFKVDRKIPKTGVMLVGWGGNNGTTVTAGIIANKRNLVWETKQGQRGANYYGSVIMSSTTKLGVDSKTGKEIYIPFHDLLPMVHPNDLVVGGWDISGMNLSEAMDRAKVLSPSLKSLVRKEMGAMKPLPSIYYPDFIAANQEERADNILPGSKASMAHVEQIRKDIRDFKSANGLDKVIVQWTANTERYADILEGVNDTADNLMKSIETGHEEVSPSTVFAVASILEGAPFINGSPQNTFKHNAFIGGDDFKSGQTKMKSALVDFLINAGIKLTSIASYNHLGNNDGMNLSSQKQFRSKEISKSNVVDDMVAANTVLYKEGEHPDHCVVIKYMPSVGDDKRALDEYYAEIFLDGHQTISLFNVCEDSLLASPLIIDLVLVAEIMTRVQWKAHSAEASDDKYSGFHSVLSVLSYMLKAPLTPTGTPVVNALAKQRACLTNIFRACVGLEPENDMTLEHKLF

SEQ ID NO: 142817 - DNA, 1674 bp, Aedes aegypti
  CDS (1)..(1674)
atggcttccgcgttgaatgtagtatcgccaaatgtgcactatagtgacaaatatatcgaagtggattaccagtatcaaacgacatcagttctcaacgaaggaccatcaggttacactgtgcgcccagaaaccactgaactgagcattcgaacggaacgccagataccccgattgggtctcatgctcgttggatggggcggaaacaatggatccaccatcacagctgctctggaagccaacaaacgaggcttggaatggagaacccgtaccggagtgcaaaaggccaactggttcggttcaatcactcaggcatccaccgtcctgctgggaacggatgctaaggggcaggatgttcacattcccatgaataagttggtccccatggtcaacccggacgatatcgttgttgatgggtgggatatcagttcgatgaacattggcgaggctatgatccgtgctggtgtattggaggtcggtttacaggatcaagttcataagaagttgtcgcttatgaaacccaggccttccatatacgatcccgactttatagcagccaatcaggccgatcgggctgacaacaccatccctggaactcgatacgagcagtaccagcagatcgttaaggacattcgtgagttcaagcgaacgtctggcgtcgataaggtggtagtcttatggacggccaacacggagcggtttgcagatgttaagaagggattgaatacgacaatggccgagttggagaagtcactgaaggagaatgaatcggagatctcgccgtcgaccattttcgcaatggccgctattgctgagggttgcatctacatcaatggatcaccgcagaatacgtttgtgcctggagttgtcgagctagctgaacatcatggtgcattcatcgctggcgatgatttcaagtccggtcaaacgaagttgaaatccgtgctggtcgattttctggtttcggccggtatcaagccggtgtcgatcgtgagctacaaccatttgggaaacaacgatggaaagaatctttccgccccgcagcagttccgttcgaaagagatatccaagagtaatgtagttgacgatatggttgcttctaacaacatcttgtacaaacctgatgaacatcctgatcattgtgtcgtcatcaagtatgtgccctatgtcggtgacagcaagcgagccatggacgaatacaccagccagattatgctcggaggacacaacacgttgatcatccacaatacctgcgaggattccctgctggcgtcgccgttgatcctggatttggccatcctgggtgagctctgctcccggattcagatcaagaagaaggacgaatcctccgcgcagtacgttccgttccggtcggtcctgtctctgctcagttacctgtgcaaggcaccgctcgtcccggaaggaacccccgtggtcaactcgctattccgacagcgtaccgccatcgagaacatcctgcgagcttgcgttggactaccgccgctgagtcacatgtctctggagcatcggttcaacgttgaggtagcttccaccgaaccgccgatgaagaagggaaaaatctccaacgaaaccgtgacaaaacccgtgtcgaacggcgttcatacaaatggtacctgtaccaatggaaacggagttcacgacattgctgactattag

SEQ ID NO: 142818 - protein, 557 aa, Aedes aegypti
MASALNVVSPNVHYSDKYIEVDYQYQTTSVLNEGPSGYTVRPETTELSIRTERQIPRLGLMLVGWGGNNGSTITAALEANKRGLEWRTRTGVQKANWFGSITQASTVLLGTDAKGQDVHIPMNKLVPMVNPDDIVVDGWDISSMNIGEAMIRAGVLEVGLQDQVHKKLSLMKPRPSIYDPDFIAANQADRADNTIPGTRYEQYQQIVKDIREFKRTSGVDKVVVLWTANTERFADVKKGLNTTMAELEKSLKENESEISPSTIFAMAAIAEGCIYINGSPQNTFVPGVVELAEHHGAFIAGDDFKSGQTKLKSVLVDFLVSAGIKPVSIVSYNHLGNNDGKNLSAPQQFRSKEISKSNVVDDMVASNNILYKPDEHPDHCVVIKYVPYVGDSKRAMDEYTSQIMLGGHNTLIIHNTCEDSLLASPLILDLAILGELCSRIQIKKKDESSAQYVPFRSVLSLLSYLCKAPLVPEGTPVVNSLFRQRTAIENILRACVGLPPLSHMSLEHRFNVEVASTEPPMKKGKISNETVTKPVSNGVHTNGTCTNGNGVHDIADY

SEQ ID NO: 142819 - DNA, 1533 bp, Passiflora edulis f
  CDS (1)..(1533)
atgttcatcgacacgtttaaggttgagagtcctaacgttaagtacacagaggatgagattcactcggtgtacaactatgagaccactgagcttgttcatgagaacaggaatggtacctatcagtggactgtcaaacccaaaactgtccaatacgaattcaagaccagcattcatgtccccaaactcggggttatgctcgtggggtggggaggaaacaatggatcgtctctcaccggcggtatcatagccaaccgagagggaatctcctgggcgaccaaggacaaggtgcagcaagccaactactttggctcgctaacccaggcttcaactatccgagttgggtctttcaatggagaggagatttatgctccattcaaaagcctgctccccatggtgagccccgatgacgttgttattggaggatgggacataagtgacatgaacttggctgacgccatggccagggcaaaagtcttcgacattgatctgcagaaacaactcaggccctacatggaatccatgatcccactacccggaatatatgaccctgatttcattgctgccaaccaagggtcacgtgccaacaatgtgatcacaggctccaagaaagaacaacttcagcaagtcatcaaggacatcagggagtttaaggaaaaaaacaaggtagacaaggtggttgtgctgtggactgccaacacagagaggtacagcaatgtcgtcgtggggctaaatgacaccatggagaacctcatggctgcactggagaggaatgaatcagagatatctccatcaactttgtatgccttggcctgtgtgttggaaaatgttccttttgtgaacggaagcccccagaacacctttgttccagggttgattgatctggctatcaagaggaacagtttgattggtggggatgactttaagagtggtcagaccaaaatgaagtccgtcctggtggatttccttgttggtgctgggatcaagccaacgtcgatagtgagctacaaccatctgggcaataatgacggcatgaatctgtcagcgccgcaaactttccgttccaaggagatctccaagagcaatgttgtagacgacatggtctccagcaatggaatactctatgaacctggtgaacatcctgaccacgttgtggtcattaagtatgtgccatacgtgggggatagcaagagggctatggacgagtacacctcggagatattcatgggtggaaagagcactatagtgctacacaatacgtgtgaagactccctgctggctgcacccatcatcctggacttggttcttctcgctgagctcagtaccaggatccagctgaaagccgagggagagggaaagtttcattctttccacccggtggctaccatcctcagttacctcacaaaggctcctctggttcccccagggacgccggtagtgaatgcactttcaaagcagcgtgcaatgctggagaacatattgagagcttgtattggattggctccagagaataacatgattttggaatacaagtga

SEQ ID NO: 142820 - protein, 510 aa, Passiflora edulis f
MFIDTFKVESPNVKYTEDEIHSVYNYETTELVHENRNGTYQWTVKPKTVQYEFKTSIHVPKLGVMLVGWGGNNGSSLTGGIIANREGISWATKDKVQQANYFGSLTQASTIRVGSFNGEEIYAPFKSLLPMVSPDDVVIGGWDISDMNLADAMARAKVFDIDLQKQLRPYMESMIPLPGIYDPDFIAANQGSRANNVITGSKKEQLQQVIKDIREFKEKNKVDKVVVLWTANTERYSNVVVGLNDTMENLMAALERNESEISPSTLYALACVLENVPFVNGSPQNTFVPGLIDLAIKRNSLIGGDDFKSGQTKMKSVLVDFLVGAGIKPTSIVSYNHLGNNDGMNLSAPQTFRSKEISKSNVVDDMVSSNGILYEPGEHPDHVVVIKYVPYVGDSKRAMDEYTSEIFMGGKSTIVLHNTCEDSLLAAPIILDLVLLAELSTRIQLKAEGEGKFHSFHPVATILSYLTKAPLVPPGTPVVNALSKQRAMLENILRACIGLAPENNMILEYK

SEQ ID NO: 142821 - DNA, 1533 bp, Medicago truncatula
  CDS (1)..(1533)
atgtttatcgagaatttcaaagtcgagagtcccaatgttaagtacactgaaactgagattcaatccgtttacaattacgaaaccactgaacttgttcatgaaaatcgtaatggcacttatcagtggattgttaaacctaaaactgttaaatatgaatttaaaaccgatattcatgtccctaaattgggggtaatgcttgtgggatggggtggaaacaacggttcaacccttaccggtggtgttattgctaacagagagggaatttcatgggccacgaaagataagattcaacaagccaattactttggatccttgactcaagcttcagctattcgagttggatcttttcaaggagaggaaattcatgctcctttcaagagcctccttccaatggtcaaccccgatgacattgtttttggtggatgggatatcagtgacatgaaccttgctgatgccatggctagggccagggtttttgacattgatttgcaaaagcaattgaggccttatatggaatccatggttccacttcccggtatctatgacccggatttcattgctgctaatcaaggagaacgtgcgaataacgttatcaagggtacaaagagagaacaaatcaaccaaatcatcaaagacattaaggaatttaaggaagcaaacaaagttgacagggttgttgtactctggactgccaacacagagaggtacagtaacttagttgtaggactcaatgacaccatggagaacctttttgctgctgtggacagaaatgagtctgagatttcaccttccaccctgtttgccattgcttgtgttatggagaatgttcctttcatcaatggaagtcctcagaacacttttgttccagggcttattgatcttgccatcaagaacaactgtttgattggtggtgatgatttcaaaagtggtcagaccaaaatgaaatctgttttggtggatttccttgtaggagctggtatcaagccaacatcaatagtgagttacaatcatcttggaaacaatgatggtatgaacctctcagccccacaaaccttccgctccaaggaaatttccaagagcaacgttgttgacgatatggtcaacagcaatgccatcctctatgcacctggcgaacatcctgatcatgttgtagtcattaagtatgtgccttatgttggtgacagcaagagagctatggatgagtacacttcggaaattttcatgggtgggaagaacactattgtgttgcacaacacatgtgaggactcccttttggctgctcctattatcttggacttggttcttcttgctgagcttagcactagaattcagtttaaatctgaagctgagaacaagttccacaccttccaccctgttgctaccatcctcagttatctgaccaaggctcctctggttccaccgggcacaccagtggtgaatgcattgtcaaagcagcgagcaatgcttgaaaacatcatgagagcttgtgttggattggctccagagaacaacatgatcctcgagtacaagtga

SEQ ID NO: 142822 - protein, 510 aa, Medicago truncatula
MFIENFKVESPNVKYTETEIQSVYNYETTELVHENRNGTYQWIVKPKTVKYEFKTDIHVPKLGVMLVGWGGNNGSTLTGGVIANREGISWATKDKIQQANYFGSLTQASAIRVGSFQGEEIHAPFKSLLPMVNPDDIVFGGWDISDMNLADAMARARVFDIDLQKQLRPYMESMVPLPGIYDPDFIAANQGERANNVIKGTKREQINQIIKDIKEFKEANKVDRVVVLWTANTERYSNLVVGLNDTMENLFAAVDRNESEISPSTLFAIACVMENVPFINGSPQNTFVPGLIDLAIKNNCLIGGDDFKSGQTKMKSVLVDFLVGAGIKPTSIVSYNHLGNNDGMNLSAPQTFRSKEISKSNVVDDMVNSNAILYAPGEHPDHVVVIKYVPYVGDSKRAMDEYTSEIFMGGKNTIVLHNTCEDSLLAAPIILDLVLLAELSTRIQFKSEAENKFHTFHPVATILSYLTKAPLVPPGTPVVNALSKQRAMLENIMRACVGLAPENNMILEYK

SEQ ID NO: 142823 - DNA, 1533 bp, Glycine max
  CDS (1)..(1533)
atgttcatcgagagtttcaaggttgagagtcctaacgtgaagtacacagagactgagattcagtccgtgtacaactatgaaaccactgaacttgttcacgagaacaataatggcacttatcagtgggttgtcaagcccaaaactgtcaaatatgaatttaaaaccaacacccatgtccctaaactaggggtaatgcttgtggggtgggggggaaacaatggctcaaccctcactggtggtgttattgctaaccgagagggtatttcatgggcaacaaaggacaagattcaacaagccaattactttgggtcgctgacccaggcatcagctatcagagtggggtctttccaaggggaagaaatatatgctccattcaagagcctgcttccaatggtgaaccctgatgatgttgtgtttgggggatgggatatcagtaacttgaacctggctgatgccatggccagggccaaggtgtttgatatcgacctgcagaaacagttgaggccgtacatggaatccatggttccactccccggaatctatgacccggatttcattgctgccaaccaaggagaccgtgccactaacgtaatcaggggcacaaagaaagaacaagttcaacaaatcatcaaagacattaaggagttcaaagaaagcactaaggttgacaaggtggttgtcctgtggacagccaacacagagaggtacagcaacgtagttgtgggactaaacgacaccatggaaaacctctttgcttccttggacaggaatgaggctgagatttccccttccaccttgtatgccattgcttgtgttatggaaaatgttcctttcatcaatggaagccctcagaacacctttgtcccaggactcattgatctggccatcaaaaggaatagtttgattggaggagatgactttaagagtggtcagaccaaaatgaaatcggtgttggtggatttcctagtaggggccggcatcaagccaacatctatagtgagttacaaccatttgggaaacaatgatggcatgaatctctcagcccctcaaaccttccgctcgaaggaaatttccaagagcaatgttgttgacgatatggtcaacagcaacgccatcctctatgagcctggtgaacatccggaccatgtggttgtcattaagtatgtaccttacgttggggacagcaagagggccatggatgagtactcttctgagatattcatgggcggaaagaacacaattgtgttgcacaacacttgtgaggattcactgttagctgctcctattatcttggacttggtccttcttgctgagcttagcactcgaatcgagtttaaagctgaaaatgagggaaagttccactcattccacccagttgcgaccatcctcagttacctgaccaaggcccctctggttccaccgagtacgccagtggttaatgcactgtcaaagcagcgagctatgctggaaaacatcctaagggcttgtgttggattagctcctgagaacaacatgatcctggagtacaagtga

SEQ ID NO: 142824 - protein, 510 aa, Glycine max
MFIESFKVESPNVKYTETEIQSVYNYETTELVHENNNGTYQWVVKPKTVKYEFKTNTHVPKLGVMLVGWGGNNGSTLTGGVIANREGISWATKDKIQQANYFGSLTQASAIRVGSFQGEEIYAPFKSLLPMVNPDDVVFGGWDISNLNLADAMARAKVFDIDLQKQLRPYMESMVPLPGIYDPDFIAANQGDRATNVIRGTKKEQVQQIIKDIKEFKESTKVDKVVVLWTANTERYSNVVVGLNDTMENLFASLDRNEAEISPSTLYAIACVMENVPFINGSPQNTFVPGLIDLAIKRNSLIGGDDFKSGQTKMKSVLVDFLVGAGIKPTSIVSYNHLGNNDGMNLSAPQTFRSKEISKSNVVDDMVNSNAILYEPGEHPDHVVVIKYVPYVGDSKRAMDEYSSEIFMGGKNTIVLHNTCEDSLLAAPIILDLVLLAELSTRIEFKAENEGKFHSFHPVATILSYLTKAPLVPPSTPVVNALSKQRAMLENILRACVGLAPENNMILEYK

SEQ ID NO: 142825 - DNA, 1533 bp, Glycine max
  CDS (1)..(1533)
atgttcatcgagagtttcaaggttgagagtcctaacgtgaagtacacagagactgagattcagtccgtgtacaactatgaaaccactgaacttgttcacgagaacaagaatggcacttatcagtgggttgtcaagcccaaaactgtcaaatatgaatttaaaaccaacacccatgtccctaaactaggggtaatgcttgtggggtggggtggaaacaatggctcaaccctcaccggtggtgttattgctaaccgagagggtatttcatgggcaacaaaggacaagattcaacaagccaattactttgggtcgctgacccaggcatcagctattagagttgggtctttccaaggggaggaaatatatgccccattcaagagcctgcttccaatggtaaaccctgatgatgttgtgtttgggggatgggatatcagtaacttgaacctggcagatgccatggccagggccaaggtgtttgatatcgacctgcagaaacagttgaggccttacatggaatctatggttccactccccggaatctatgaccccgatttcattgctgccaaccaaggagaccgtgccaacaacgtgatcaagggcacaaagaaagaacaagttcaacaaatcatcaaagacattaaggagtttaaggaaagcactaaggttgacaaggtggttgtcctgtggacagccaacacagagaggtacagcaacctagttgtgggactaaacgacaccatggaaaacctctttgcttccttggacaggaacgaggctgagatttccccttccaccttgtatgccattgcttgtgttatggaaaatgttcctttcatcaatggaagccctcagaacacctttgtcccagggctgattgatctggccatcaagaggaacagtttgattggaggagatgactttaagagtggtcagaccaaaatgaaatctgtgttggtggatttccttgtgggggccggcatcaagccaacatctatagtgagttacaaccatctgggcaacaatgatggcatgaatctctcagcccctcaaaccttccgctctaaggaaatctccaagagcaatgttgttgacgatatggtcaacagcaacgccatcctctatgagcccggtgaacatccagaccatgtggttgtcattaagtacgtgccttatgtaggggacagcaagagggccatggatgagtacacttctgagatattcatgggtggaaagaacacaattgtgttgcacaacacatgtgaggattcactgttagctgctcctattatcttggacttggtccttcttgctgagctcagcactcgaatcgagtttaaagctgaaaatgagggaaaattccactcattccacccagttgcgaccatccttagttacctgaccaaggcccctctggttccaccgggtacaccagtggtgaatgcgttgtcaaagcagcgagctatgctggaaaacatcctgagggcttgtgttggattagctcctgagaacaacatgatcctagagtacaagtga

SEQ ID NO: 142826 - protein, 510 aa, Glycine max
MFIESFKVESPNVKYTETEIQSVYNYETTELVHENKNGTYQWVVKPKTVKYEFKTNTHVPKLGVMLVGWGGNNGSTLTGGVIANREGISWATKDKIQQANYFGSLTQASAIRVGSFQGEEIYAPFKSLLPMVNPDDVVFGGWDISNLNLADAMARAKVFDIDLQKQLRPYMESMVPLPGIYDPDFIAANQGDRANNVIKGTKKEQVQQIIKDIKEFKESTKVDKVVVLWTANTERYSNLVVGLNDTMENLFASLDRNEAEISPSTLYAIACVMENVPFINGSPQNTFVPGLIDLAIKRNSLIGGDDFKSGQTKMKSVLVDFLVGAGIKPTSIVSYNHLGNNDGMNLSAPQTFRSKEISKSNVVDDMVNSNAILYEPGEHPDHVVVIKYVPYVGDSKRAMDEYTSEIFMGGKNTIVLHNTCEDSLLAAPIILDLVLLAELSTRIEFKAENEGKFHSFHPVATILSYLTKAPLVPPGTPVVNALSKQRAMLENILRACVGLAPENNMILEYK

SEQ ID NO: 142827 - DNA, 1533 bp, Glycine max
  CDS (1)..(1533)
atgttcatcgagaattttaaggtagagagtcctaatgtgaagtacaccgagactgagattcagtccgtgtacaactacgaaaccaccgaacttgttcacgagaacaggaatggcacctatcagtggattgtcaaacccaaatccgtcaactaccaatttaaaaccaacacccatgttccaaaattgggggtgatgcttgtgggttggggtggaaacaacggctctaccctcaccggtggtgttattgctaacagagagggcatttcatgggctacaaaggacaagattcaacaagccaattactttggctccctcacccaagcctcagctattcgagttggatccttccagggagaggaaatctatgccccattcaagagtctgcttccaatggttaatcctgacgacattgtgtttgggggatgggatatcagcaacatgaacctggctgatgccatggccagggcaaaggtgtttgacatcgatttgcagaagcagttgaggccttacatggaatccatggttccactccccggaatctacgacccggatttcattgctgccaaccaagaggagcgtgccaacaacgtgattaagggcacaaagcaagagcaagttcagcaaatcatcaaagacatcaaggcgtttaaggaagccaccaaagtggacaaggtggttgtcctgtggactgccaacacagagaggtatagcaatttggttgtaggccttaatgacaccatggagaatctcttggctgctgtggacagaaatgaggctgagatttctccttccaccttgtatgccattgcctgtgtgatggaaaatgttcctttcattaatggaagccctcagaacacttttgtaccagggctgattgatcttgccatcgcgaggaacactttgattggtggagatgacttcaagagtggtcagaccaaaatgaaatctgtgttggttgattttcttgtgggggctggtatcaagccaacatctatagttagttacaaccatctgggaaacaatgatggtatgaatctctcggctccacaaaccttccgctccaaggaaatctccaagagcaacgttgttgacgatatggtcaacagcaatgccatcctctatgagcctggtgaacatcccgaccatgttgttgttattaagtatgtgccttacgtaggggatagcaagagagccatggatgagtacacttcagagatattcatgggtggaaagaacaccattgttttgcacaacacatgtgaggattcccttttagctgctcctattatcttggacttggtccttcttgctgagctgagcactagaatccagtttaaagctgaaaatgagggaaaattccactcattccacccagttgctaccattctcagctatctgaccaaggctcctctggttccaccgggtacaccagtggtgaatgcattgtcaaagcagcgtgcaatgctggaaaacataatgagggcttgtgttggattggccccagagaataacatgattctcgagtacaagtga

SEQ ID NO: 142828 - protein, 510 aa, Glycine max
MFIENFKVESPNVKYTETEIQSVYNYETTELVHENRNGTYQWIVKPKSVNYQFKTNTHVPKLGVMLVGWGGNNGSTLTGGVIANREGISWATKDKIQQANYFGSLTQASAIRVGSFQGEEIYAPFKSLLPMVNPDDIVFGGWDISNMNLADAMARAKVFDIDLQKQLRPYMESMVPLPGIYDPDFIAANQEERANNVIKGTKQEQVQQIIKDIKAFKEATKVDKVVVLWTANTERYSNLVVGLNDTMENLLAAVDRNEAEISPSTLYAIACVMENVPFINGSPQNTFVPGLIDLAIARNTLIGGDDFKSGQTKMKSVLVDFLVGAGIKPTSIVSYNHLGNNDGMNLSAPQTFRSKEISKSNVVDDMVNSNAILYEPGEHPDHVVVIKYVPYVGDSKRAMDEYTSEIFMGGKNTIVLHNTCEDSLLAAPIILDLVLLAELSTRIQFKAENEGKFHSFHPVATILSYLTKAPLVPPGTPVVNALSKQRAMLENIMRACVGLAPENNMILEYK

SEQ ID NO: 142829 - DNA, 1797 bp, Trifolium pratense
  CDS (53)..(1588)
gctttcttactttttctcttcaatattttcttaatttcttcaagtaaccaaaatgttcatcgagaattttaaggttgagagtcctaacgtgaagtacacagagactgagattgagtccgtgtacagttacgaaacaaccgaacttgttcatcagaagaacacaaatgacacttatgagtgggttgttaagcccaaaactgtcaaatatgaatttaaaactcaaaccaatctccctaaattaggggtaatgcttgttgggtggggtggaaacaatggttcatccctcactggtggtgttattgcaaaccgagagggtatttcatgggcaacaaaggacaatattcagcaagccaattattttggttcactgacccaagcatcagctatcagagtggggtctttccaaggggaagaaatctatgccccattcaagagccttcttccaatggtaaaccctgaggacatagtgtggggaggatgggatatcagtgacatgaacctagctgatgccatgggtagagccaaggtgtttgacatagacctacagaaacagttgaggccttacatggaatccatggttccactccctggaatctatgaccctgatttcattgctgctaatcaaggagatcgtgctaacaacatcattaaaggaacaaagaaagaacagcttcaacaagtcatcaaagacattaaggagtttaaggaagctaacaaggttgacaaggttgttgtactttggactgcaaacactgagaggtacagtaatattgttgtgggactaaatgacactatggagaatctcttggcttctgtggacaagaatgaatctgagatttctccttcaaccctatttgctttggcttgtgttcttgaaaatgttcctttcatcaatggaagccctcaaaacacctttgtcccagggttgattgatttggctatcaaaaggaacagtttgatcggcggagatgacttcaagagtggtcagacaaaaatgaagtctgtgctagttgatttccttgtgggagctggtatcaaaccaacatcaatagtgagttacaaccatttgggaaacaatgatggaatgaatctctctgcaccgcaaaccttccgctccaaggaaatctcgaagagcaacgtcgttgatgatatggttaacagcaatgcaatcctctatggacctggtgaacatccagaccatgttgttgtcattaagtatgtgccttatgtgggagacagcaagagagcaatggatgagtacacttctgagatatttatgggtggaaagaacactattgtgatgcataacacttgtgaagattctcttttggctgctccaattatcttggacttggtccttcttgctgagcttagcactagaatccagttcaaatctgaacatgaggacaagttccacacattccaccctgttgcaaccatcctcagttacctcactaaggctcctcttgttccaccaggtacaccagtagtgaatgcattatcaaagcagagatctatgctggaaaacattctgagagcttgtgttggattggcacctgagaacaacatgatccttgaatacaagtgaagtgtaccatttgaattggaagaaacttgggataactcaatatagtagtgtgtccaaagcttatcccatggtcctctatttgctgttgtgatattttgatatgtttggttagcataatgtacctaccaacatttcaccgtgttttcctgccggcttaatttcgagcactgagcaggccatcttaatatatcgaataatattcacttgtc

SEQ ID NO: 142830 - protein, 511 aa, Trifolium pratense
MFIENFKVESPNVKYTETEIESVYSYETTELVHQKNTNDTYEWVVKPKTVKYEFKTQTNLPKLGVMLVGWGGNNGSSLTGGVIANREGISWATKDNIQQANYFGSLTQASAIRVGSFQGEEIYAPFKSLLPMVNPEDIVWGGWDISDMNLADAMGRAKVFDIDLQKQLRPYMESMVPLPGIYDPDFIAANQGDRANNIIKGTKKEQLQQVIKDIKEFKEANKVDKVVVLWTANTERYSNIVVGLNDTMENLLASVDKNESEISPSTLFALACVLENVPFINGSPQNTFVPGLIDLAIKRNSLIGGDDFKSGQTKMKSVLVDFLVGAGIKPTSIVSYNHLGNNDGMNLSAPQTFRSKEISKSNVVDDMVNSNAILYGPGEHPDHVVVIKYVPYVGDSKRAMDEYTSEIFMGGKNTIVMHNTCEDSLLAAPIILDLVLLAELSTRIQFKSEHEDKFHTFHPVATILSYLTKAPLVPPGTPVVNALSKQRSMLENILRACVGLAPENNMILEYK

SEQ ID NO: 142831 - DNA, 1533 bp, Brassica rapa subsp
  CDS (1)..(1533)
atgttcattgaaagcttcaaggttgaatctccaaaagtgaagtacacggagaatgagattcattcagtgtacgactaccaaaccactgagcttgttcatgagagcaaaaacggcgcgtatcaatggaccgtgaagccaaaaaccgtgaaatatgagtttaagaccgacactcatgttcctaaacttggagtgatgctcgttggttggggaggaaacaatggttctactcttaccgctggtgttatcgccaatcgcgagggaatatcctgggctacgaaggagaaagtgcaacaagctaattatttcgggtcattaacccaagcatcctctatccgggtaggatcatttaatggggaagaaatctatgctcccttcaaaagtcttctccccatggttaatccggaagaaatagtgtttgggggatgggacataagcgatatgaacttagcagacgctatgggacgagccaaggtcctagacatcgacctccaaaagcagctgcgtccgttcatggaacacatggtccccctccctggaatctacgacccagatttcatcgcagctaaccagggatcccgtgccaaccacttgatcaaaggcaccaagaaagaacagctagaacaagtcatcaaggacatcagggatttcaaagagaaaaacaaagtggacaaggtggtggtgctatggacggccaacacagaaagatacagcaatgtggtggctggtcttaacgacacgacggagaatctcatgtcatctttggacaagaatgaggctgagatttctccttctacactctacgccattgcttgtgttcttgagaacgttcctttcatcaatggaagcccacaaaacacttttgtccccgggcttattgaattagcaatcaagagaaacagcttgatcggtggtgatgacttcaagagtggtcagaccaagatgaaatctgtcctcgtcgatttccttgtcggcgctggaatcaaaccaacctcgatagtgagctacaatcaccttggaaacaacgatggcatgaatttgtcggcgccgcagacattccggtctaaggagatttctaagagcaatgtggtcgacgacatggttgctagcaatggtattttattcgattccggtgaacaccctgaccatgttgtcgtcattaagtatgtgccatatgttggagacagcaagagagccatggacgagtacacgtcagagattttcatgggagggaagaacacaattgtgatgcacaacacttgtgaagactctctcttggctgctcccattattttggaccttgttcttctcgccgagctcaccaccaggatcgagctcaaggccgacaatgagggaaagttccattctttccatccagtggctactcttctgagttacctctccaaggcaccattggtcccacctggcacgccagttgtgaacgctttgtcgaagcagcgtgcaatgcttgagaacatactcagagcttgtgttggacttgctccagagaacaatatgattctcgagtacaagtga

SEQ ID NO: 142832 - protein, 510 aa, Brassica rapa subsp
MFIESFKVESPKVKYTENEIHSVYDYQTTELVHESKNGAYQWTVKPKTVKYEFKTDTHVPKLGVMLVGWGGNNGSTLTAGVIANREGISWATKEKVQQANYFGSLTQASSIRVGSFNGEEIYAPFKSLLPMVNPEEIVFGGWDISDMNLADAMGRAKVLDIDLQKQLRPFMEHMVPLPGIYDPDFIAANQGSRANHLIKGTKKEQLEQVIKDIRDFKEKNKVDKVVVLWTANTERYSNVVAGLNDTTENLMSSLDKNEAEISPSTLYAIACVLENVPFINGSPQNTFVPGLIELAIKRNSLIGGDDFKSGQTKMKSVLVDFLVGAGIKPTSIVSYNHLGNNDGMNLSAPQTFRSKEISKSNVVDDMVASNGILFDSGEHPDHVVVIKYVPYVGDSKRAMDEYTSEIFMGGKNTIVMHNTCEDSLLAAPIILDLVLLAELTTRIELKADNEGKFHSFHPVATLLSYLSKAPLVPPGTPVVNALSKQRAMLENILRACVGLAPENNMILEYK

SEQ ID NO: 142833 - DNA, 1736 bp, Phaseolus vulgaris
  CDS (76)..(1608)
ccttttccacattagcgcccacccctttgcttcattcttcttcaattttcattcttaatctctgaacaaacaaaaatgttcattgagaattttaaggttgagtctcctaatgttaagtactccgagactgagattcagtccgtgtataactatgaaaccaccgaacttgttcacgagaacagaaatggcgcctatcagtggattatcaaacccaaatctgtcaaatatgaatttaaaaccaacacccatgttcctaaattgggggtaatgcttgtggggtggggtggaaacaacggttcaaccctcactggtggtgttattgctaaccgagagggcatttcatgggcaacaaaggacaagattcaacaagccaattactttggctccctcacccaagcttccgctatccgagttggctcctaccagggagaggaaatctatgccccattcaagagccttcttccaatggttaaccctgacgacattgtgtttgggggatgggatatcagtaacatgaacctggctgatgccatgggtagggccaaggtgtttgacatcgatttgcagaagcagttgaggccttatatggaatccatggttccactccctggaatctatgacccagatttcattgctgccaaccaagaagagcgtgctaacaatgtgatcaagggcacaaagaaagagcaagttcaacaagtcatcaaagacattaaggagtttaaggcagccaccaaagtggacaaggtggttgtcctgtggactgccaacacagagaggtacagtaatttggttgtcggtcttaatgacaccacggagaacctcttggctgccctggacagaaatgaggctgagatttctccttccaccttgtttgccattgcttgtgttacggaaaatgttccattcatcaacggaagccctcagaacacttttgtcccagggttgattgattttgccatccagaaaaactgtttgattggaggagatgacttcaagagtggtcagaccaaaatgaaatccgtgctggtagatttccttgtgggggctggtatcaagccaacatcaatagttagttacaaccatctgggaaacaatgatggtatgaatctctctgctccacaaaccttccgttccaaggaaatctccaagagtaacgttgttgatgatatggtcaacagcaatgccatcctctatgagcctggtgaacatcccgaccatgttgttgttattaagtatgtgccttacgttgcggacagcaagagagccatggatgagtacacttcagagatattcatgggtggaaagaacaccattgtgctgcacaatacatgcgaggattctctcttggctgctcctattatattggacttggtccttcttgctgagcttagcactcgtatccagttcaaagctgaaaaggagggaaaattccactcattccacccagttgctaccattctcagctacctgaccaaggctcctctagttccaccgggcacaccagtggtgaatgcattgtcaaagcagcgtgcaatgctggaaaacattatgagagcttgtgttggattggccccagagaataacatgattcttgagtacaagtgaagcgtgggatagaagcatcacttattggggtagccagcttgaatgttttctgttaatatgtttggttatgttttcgcaagtgtagttgatttcatctgctttcgaatgctttagagcagggcatgttc

SEQ ID NO: 142834 - protein, 510 aa, Phaseolus vulgaris
MFIENFKVESPNVKYSETEIQSVYNYETTELVHENRNGAYQWIIKPKSVKYEFKTNTHVPKLGVMLVGWGGNNGSTLTGGVIANREGISWATKDKIQQANYFGSLTQASAIRVGSYQGEEIYAPFKSLLPMVNPDDIVFGGWDISNMNLADAMGRAKVFDIDLQKQLRPYMESMVPLPGIYDPDFIAANQEERANNVIKGTKKEQVQQVIKDIKEFKAATKVDKVVVLWTANTERYSNLVVGLNDTTENLLAALDRNEAEISPSTLFAIACVTENVPFINGSPQNTFVPGLIDFAIQKNCLIGGDDFKSGQTKMKSVLVDFLVGAGIKPTSIVSYNHLGNNDGMNLSAPQTFRSKEISKSNVVDDMVNSNAILYEPGEHPDHVVVIKYVPYVADSKRAMDEYTSEIFMGGKNTIVLHNTCEDSLLAAPIILDLVLLAELSTRIQFKAEKEGKFHSFHPVATILSYLTKAPLVPPGTPVVNALSKQRAMLENIMRACVGLAPENNMILEYK

SEQ ID NO: 142835 - DNA, 1533 bp, Xerophyta viscosa
  CDS (1)..(1533)
atgttcatcgagagcttccgcgtggagagcccgcacgtgcggtacggcgcggcggagatcgagtcggactaccagtacgacacgacggagctggtgcacgagagccacgacggcgcctcccgctgggtcgtccgccccaagtccgtccgctacaacttccggaccaccaccaccgtccccaagctcggggtgatgctcgtggggtggggcggcaacaacggctcaacgctgacggctggggtcatcgccaacagggagggaatctcatgggcgaccaaggacaaggtgcagcaagccaactactatggctcactcacccaggcgtccaccatcagggtcgggagctacaacggggaggagatctacgcgcccttcaagagcctcctgcccatggtgaaccctgatgaccttgtgttcgggggctgggacattagcaacatgaacctggctgatgctatgaccagggcaaaggtacttgacattgatctgcagaagcagctcagaccttacatggagtccatggtgcctctccccggcatctatgaccccgacttcatcgccgccaaccagggatcccgcgcgaacaatgtcatcaagggcaccaagaaggagcagatggagcagatcatcaaggacatcagggagttcaaggaaaagagcaaagtggacaaggtggtggtgttgtggactgcaaacactgaaaggtacagcaatgtctgtgttgggctcaatgacacaatggagaacctcctggcgtctgtggacaagaacgaggcggagatatcaccatcgacactgtatgccattgcctgtgtcatggagggtataccgttcattaacgggagtcctcagaacacctttgtgcctgggctgatcgatcttgctattaagaacaactgcctgattggtggtgatgatttcaagagtggacagacaaagatgaagtctgtcttggttgatttcctagttggtgctggaataaagcccacctcaattgtcagctacaaccacttggggaataatgatggcatgaacctttccgcacctcaaacattccgatccaaggagatctccaagagcaatgtggtcgatgacatggtctcaagcaatgccatcctctatgagcctggcgagcatcctgatcatgttgttgtgatcaagtatgtgccgtatgttggagacagcaagagggcaatggacgagtacacctcagagatcttcatggggggtaagagcaccatcgttctgcacaacacctgtgaggactcacttcttgccgcgccgatcattcttgatctggtgctccttgccgagctcagcaccaggattcagctgaaagccgagggggaggagaagttccattccttccatccagtggctaccatcctgagctacctcaccaaggcaccccttgttcctcctggcacaccagtggtgaacgccctggcaaagcagagggcaatgcttgagaacatcatgagggcctgcgttgggctggcccccgagaacaacatgatcctggagtacaagtga

SEQ ID NO: 142836 - protein, 510 aa, Xerophyta viscosa
MFIESFRVESPHVRYGAAEIESDYQYDTTELVHESHDGASRWVVRPKSVRYNFRTTTTVPKLGVMLVGWGGNNGSTLTAGVIANREGISWATKDKVQQANYYGSLTQASTIRVGSYNGEEIYAPFKSLLPMVNPDDLVFGGWDISNMNLADAMTRAKVLDIDLQKQLRPYMESMVPLPGIYDPDFIAANQGSRANNVIKGTKKEQMEQIIKDIREFKEKSKVDKVVVLWTANTERYSNVCVGLNDTMENLLASVDKNEAEISPSTLYAIACVMEGIPFINGSPQNTFVPGLIDLAIKNNCLIGGDDFKSGQTKMKSVLVDFLVGAGIKPTSIVSYNHLGNNDGMNLSAPQTFRSKEISKSNVVDDMVSSNAILYEPGEHPDHVVVIKYVPYVGDSKRAMDEYTSEIFMGGKSTIVLHNTCEDSLLAAPIILDLVLLAELSTRIQLKAEGEEKFHSFHPVATILSYLTKAPLVPPGTPVVNALAKQRAMLENIMRACVGLAPENNMILEYK

SEQ ID NO: 142837 - DNA, 1539 bp, Oryza coarctata
  CDS (1)..(1539)
atgttcatcgagagcttccgcgtggagagcccgcacgtgcggtacggcgcggcggagatcgagtcggagtaccggtacgacactacggagctggtgcacgagagccacgacggcgcctcgcgctgggtcgtccgccccaagtccgtccagtaccacttcaggaccagcaccaccgtccccaagctcggggtcatgctcgtggggtggggcggcaacaacggctcaacgctgacggctggggtcatcgccagcagggagggaatctcatgggcgaccaaggacaaggtgcagcaagccaactactatggctcactcacccaggcgtccaccatcagggtaggaagctacaacggggaggagatctacgcgcctttcaagagcctcctgcccatggtgaaccctgatgaccttgtgttcgggggctgggacattagcaacatgaacctggctgatgctatgaccagggccaaggtgctggacattgatctgcagaagcagcttaggccttacatggagtcctggtgcctctccctggcatctatgatcccgacttcatcgccgctaaccagggatcccgcgcgaacaatgtcatcaagggaaccaagaaggagcagatggggcagatcatcaaaggacatcagggagttcaaggaaaataacaaaatggacaaggcggtggtgttgtggactgcaaacactgaaaggtacaacaattgtctgtgtttgggcttaatgaccaatggaaaaccttctgcgtctgtggacaggaaccaggcggagatatcgccatcgacattgtattgccattgccttgcttcattggagggtgtccgttcaataacgggagcccttaaaaaaaaatcttggcctggaattgacgatcttgccattaaaaaaaaactgcctgatccggggggattaattcaaaaaaggggcaaaccaaaaaaaaaaaccggcttggttgatttcctcatgggtgctggaataaagcccacctcaattgtcagttacaaccacttggggaataatgatggcacgaacctttctgcgccgcaaacattccgatccaaggagatctccaaaagcagcgtggtcgatgacatggtctcaagcaatgctatcctctacgagcctggcgagcatcctgatcatgttgtcgtgattaagtatgtgccgtacgtcggagacagcaagagggccatggatgagtacacctcagagatcttcatggggggtaagaacaccatcgtgctgcacaacacctgcgaggactcgctccttgctgcaccaatcattcttgacctggtgctcctggccgagctcagcactaggattcagctgaaaggcgagggagaggagaaattccattccttccatccagtggctaccatcctgagctacctcaccaaggcgccccttgttcctcctggcacaccagtggtgaacgccctggcgaagcagagggctatgctcgagaacatcatgagggcctgcgttgggctggcccctgagaacaacatgatcctggagtacaagtaa

SEQ ID NO: 142838 - protein, 512 aa, Oryza coarctata
MFIESFRVESPHVRYGAAEIESEYRYDTTELVHESHDGASRWVVRPKSVQYHFRTSTTVPKLGVMLVGWGGNNGSTLTAGVIASREGISWATKDKVQQANYYGSLTQASTIRVGSYNGEEIYAPFKSLLPMVNPDDLVFGGWDISNMNLADAMTRAKVLDIDLQKQLRPYMESWCLSLASMIPTSSPLTRDPARTMSSREPRRSRWGRSSKDIREFKENNKMDKAVVLWTANTERYNNCLCLGLMTNGKPSASVDRNQAEISPSTLYCHCLASLEGVRSITGALKKKSWPGIDDLAIKKKLPDPGGLIQKRGKPKKKTGLVDFLMGAGIKPTSIVSYNHLGNNDGTNLSAPQTFRSKEISKSSVVDDMVSSNAILYEPGEHPDHVVVIKYVPYVGDSKRAMDEYTSEIFMGGKNTIVLHNTCEDSLLAAPIILDLVLLAELSTRIQLKGEGEEKFHSFHPVATILSYLTKAPLVPPGTPVVNALAKQRAMLENIMRACVGLAPENNMILEYK

SEQ ID NO: 142839 - DNA, 1986 bp, Suaeda salsa
  CDS (140)..(1672)
aattcggcacgaggctcacttccagcggtgttagcaagagccaagagaaaagaaagcgtcttcttcatttttttcgttagctctcataatataacaactcttcttcgttttcccctctttctttgttaaaaaattaaaaatgttcatcgaaaatttcaaggtagaaagcccaaatgttaactacactgaaaatgaaattcattcagtttacaattatgaaaccactgaattagttcacgagaatcgcaaaggctctggttatcaatggatcgtcaaacctaaaaccgtcaaataccaattcaaaactcaaactcatgttcccaaacttggggtgatgttggtgggatggggtggcaacaacggttgcacactcaccggtggtgtcatcgccaatcgcgagggtatatcatgggcaacaaaggacaaaattcaacaagctaactattttggatccctcactcaggcttcttctattcgtgttggttcttttaatggagaggagatttatgctccttttaagagccttcttcctatggtgaacccagatgatatagtgtttgggggctgggacataagtgacttgaacctagcagacgccatgacgagggcaaaggtgttggacattgatttgcaaaagcagttgagaccttacatggagcacatggttccccttcctggtatctatgaccctgatttcattgctgctaaccaagattctcgtgcaaataacatcattaagggcactaagaaggagcaagttgagcaagtcattaaggacatcagggaatttaaggagaagaacaaagtggacaaggtggtggtactctggacagcaaacacagagaggtacagtgatgtggtggtgggactcaatgacaccacagagaaccttatggcagctgttgaaaggaatgagtctgagatttctccatcgactttgtatgctattgcttgcatccaagaagatgtccctttcatcaacggtagtcctcagaacacctttgtccctggtctcattgaactggccataaagaagaattgtttgattggaggagatgacttcaagagtggtcagactaagatgaaatcagtgctcgttgacttccttgttggggctggtattaagccaacatcaattgtgagctacaaccacttgggaaacaatgatgggatgaacctttcagcacctcagaccttcaggtctaaagagatttcaaagagtaatgtggttgatgacatggttgctagcaacggtatcttgtatgagcctggtgaacaccctgatcatgttgttgtcatcaagtatgttccatatgtcggagacagcaagagagctatggatgagtacacatctgagatattcatgggtggtaagaacaccatcgttttgcacaacacctgtgaggactctctcttggccgctccaatcatcctagacttggtcctacttgccgagcttagcacccgcattgaattcaaagccgaaactgaggacaagttccacaccttccatccagtggctaccatactcagttatctaactaaagcacctctggttccaccaggtactccggtggtgaatgcgctgtcaaagcagagggcaatgttagagaaaatgagggcatgtgtaggtttagctccagagaacaacatgatccttgagtacaagtagagttgcagctgcgcaagcagcaccatcagcgtcagcagccgccaccacctcatcttaaaaggcttatgtcaaataaaggagatgataatccgaaagctgtacatctgtacatctgtgtcatgctgtttgttttttgtattagtaacttgagtggctgcacccattaatcaaatttagctttttggggtggtttgccctatttttcttttcattattcccggtttttttcccctatattactaatgtttctcaggttcttcaactcttctttttttcccctggtagtggtgatctgtgtatttgctggtgtaagg

SEQ ID NO: 142840 - protein, 510 aa, Suaeda salsa
MFIENFKVESPNVNYTENEIHSVYNYETTELVHENRKGSGYQWIVKPKTVKYQFKTQTHVPKLGVMLVGWGGNNGCTLTGGVIANREGISWATKDKIQQANYFGSLTQASSIRVGSFNGEEIYAPFKSLLPMVNPDDIVFGGWDISDLNLADAMTRAKVLDIDLQKQLRPYMEHMVPLPGIYDPDFIAANQDSRANNIIKGTKKEQVEQVIKDIREFKEKNKVDKVVVLWTANTERYSDVVVGLNDTTENLMAAVERNESEISPSTLYAIACIQEDVPFINGSPQNTFVPGLIELAIKKNCLIGGDDFKSGQTKMKSVLVDFLVGAGIKPTSIVSYNHLGNNDGMNLSAPQTFRSKEISKSNVVDDMVASNGILYEPGEHPDHVVVIKYVPYVGDSKRAMDEYTSEIFMGGKNTIVLHNTCEDSLLAAPIILDLVLLAELSTRIEFKAETEDKFHTFHPVATILSYLTKAPLVPPGTPVVNALSKQRAMLEKMRACVGLAPENNMILEYK

SEQ ID NO: 142841 - DNA, 1739 bp, Glycine max
  CDS (11)..(1543)
gtgaaaaataatgttcatcgagaattttaaggttgagtgtcctaatgtgaagtacaccgagactgagattcagtccgtgtacaactacgaaaccaccgaacttgttcacgagaacaggaatggcacctatcagtggattgtcaaacccaaatctgtcaaatacgaatttaaaaccaacatccatgttcctaaattaggggtaatgcttgtgggttggggtggaaacaacggctcaaccctcaccggtggtgttattgctaaccgagagggcatttcatgggctacaaaggacaagattcaacaagccaattactttggctccctcacccaagcctcagctatccgagttgggtccttccagggagaggaaatctatgccccattcaagagcctgcttccaatggttaaccctgacgacattgtgtttgggggatgggatatcagcaacatgaacctggctgatgccatggccagggcaaaggtgtttgacatcgatttgcagaagcagttgaggccttacatggaatccatgcttccactccccggaatctatgacccggatttcattgctgccaaccaagaggagcgtgccaacaacgtcatcaagggcacaaagcaagagcaagttcaacaaatcatcaaagacatcaaggcgtttaaggaagccaccaaagtggacaaggtggttgtactgtggactgccaacacagagaggtacagtaatttggttgtgggccttaatgacaccatggagaatctcttggctgctgtggacagaaatgaggctgagatttctccttccaccttgtatgccattgcttgtgttatggaaaatgttcctttcattaatggaagccctcagaacacttttgtaccagggctgattgatcttgccatcgcgaggaacactttgattggtggagatgacttcaagagtggtcagaccaaaatgaaatctgtgttggttgatttccttgtgggggctggtatcaagccaacatctatagtcagttacaaccatctgggaaacaatgatggtatgaatctttcggctccacaaactttccgttccaaggaaatctccaagagcaacgttgttgatgatatggtcaacagcaatgccatcctctatgagcctggtgaacatccagaccatgttgttgttattaagtatgtgccttacgtaggggacagcaagagagccatggatgagtacacttcagagatattcatgggtggaaagagcaccattgttttgcacaacacatgcgaggattccctcttagctgctcctattatcttggacttggtccttcttgctgagctcagcactagaatcgagtttaaagctgaaaatgagggaaaattccactcattccacccagttgctaccatcctcagctacctcaccaaggctcctctggttccaccgggtacaccagtggtgaatgcattgtcaaagcagcgtgcaatgctggaaaacataatgagggcttgtgttggattggccccagagaataacatgattctcgagtacaagtgaagcatgggaccgaagaataatatagttggggtagcctagctgaatgttttatgttaataatatgtttgcttataattttgcaagtgtaattgaatgcatcagcttcattaatgctttagagcggggcatattctgtttactaggaacatgaatgaatgtagtataattttgtgtaaaaaaaaaaaaaaaaaaaaaa

SEQ ID NO: 142842 - protein, 510 aa, Glycine max
MFIENFKVECPNVKYTETEIQSVYNYETTELVHENRNGTYQWIVKPKSVKYEFKTNIHVPKLGVMLVGWGGNNGSTLTGGVIANREGISWATKDKIQQANYFGSLTQASAIRVGSFQGEEIYAPFKSLLPMVNPDDIVFGGWDISNMNLADAMARAKVFDIDLQKQLRPYMESMLPLPGIYDPDFIAANQEERANNVIKGTKQEQVQQIIKDIKAFKEATKVDKVVVLWTANTERYSNLVVGLNDTMENLLAAVDRNEAEISPSTLYAIACVMENVPFINGSPQNTFVPGLIDLAIARNTLIGGDDFKSGQTKMKSVLVDFLVGAGIKPTSIVSYNHLGNNDGMNLSAPQTFRSKEISKSNVVDDMVNSNAILYEPGEHPDHVVVIKYVPYVGDSKRAMDEYTSEIFMGGKSTIVLHNTCEDSLLAAPIILDLVLLAELSTRIEFKAENEGKFHSFHPVATILSYLTKAPLVPPGTPVVNALSKQRAMLENIMRACVGLAPENNMILEYK

SEQ ID NO: 142843 - DNA, 1791 bp, Glycine max
  CDS (62)..(1594)
ataggattctcttctttattccttttgtaatttcattcattcttaatctttgtgaaaaataatgttcatcgagaattttaaggttgagtgtcctaatgtgaagtacaccgagactgagattcagtccgtgtacaactacgaaaccaccgaacttgttcacgagaacaggaatggcacctatcagtggattgtcaaacccaaatctgtcaaatacgaatttaaaaccaacatccatgttcctaaattaggggtaatgcttgtgggttggggtggaaacaacggctcaaccctcaccggtggtgttattgctaaccgagagggcatttcatgggctacaaaggacaagattcaacaagccaattactttggctccctcacccaagcctcagctatccgagttgggtccttccagggagaggaaatctatgccccattcaagagcctgcttccaatggttaaccctgacgacattgtgtttgggggatgggatatcagcaacatgaacctggctgatgccatggccagggcaaaggtgtttgacatcgatttgcagaagcagtggaggccttacatggaatccatgcttccactccccggaatctatgacccggatttcattgctgccaaccaagaggagcgtgccaacaacgtcatcaagggcacaaagcaagagcaagttcaacaaatcatcaaagacatcaaggcgtttaaggaagccaccaaagtggacaaggtggttgtactgtggactgccaacacagagaggtacagtaatttggttgtgggccttaatgacaccatggagaatctcttggctgctgtggacagaaatgaggctgagatttctccttccaccttgtatgccattgcttgtgttatggaaaatgttcctttcattaatggaagccctcagaacacttttgtaccagggctgattgatcttgccatcgcgaggaacactttgattggtggagatgatttcaagagtggtcagaccaaaatgaaatctgtgttggttgatttccttgtgggggctggtatcaagccaacatctatagtcagttacaaccatctgggaaacaatgatggtatgaatctttcggctccacaaactttccgttccaaggaaatctccaagagcaacgttgttgatgatatggtcaacagcaatgccatcctctatgagcctggtgaacatccagaccatgttgttgttattaagtatgtgccttacgtaggggacagcaagagagccatggatgagtacacttcagagatattcatgggtggaaagagcaccattgttttgcacaacacatgcgaggattccctcttagctgctcctattatcttggacttggtccttcttgctgagctcagcactagaatcgagtttaaagctgaaaatgagggaaaattccactcattccacccagttgctaccatactcagctacctcaccaaggctcctctggttccaccgggtacaccgggtgtgaatgcattgtcaaagcagcgtgcaatgctggaaaacataatgagggcttgtgttggattggccccagagaataacatgattctcgagtacaagtgaagcatgggaccgaagaataatatagttggggtagcctagctgaatgttttatgttaataatatgtttgcttataattttgcaagtgtaattgaatgcatcagcttcattaatgctttagagcggggcatattctgtttactaggaacatgaatgaatgtagtataattttgtgtaaaaaaaaaaaaaaaaaaaaaaa

SEQ ID NO: 142844 - protein, 510 aa, Glycine max
MFIENFKVECPNVKYTETEIQSVYNYETTELVHENRNGTYQWIVKPKSVKYEFKTNIHVPKLGVMLVGWGGNNGSTLTGGVIANREGISWATKDKIQQANYFGSLTQASAIRVGSFQGEEIYAPFKSLLPMVNPDDIVFGGWDISNMNLADAMARAKVFDIDLQKQWRPYMESMLPLPGIYDPDFIAANQEERANNVIKGTKQEQVQQIIKDIKAFKEATKVDKVVVLWTANTERYSNLVVGLNDTMENLLAAVDRNEAEISPSTLYAIACVMENVPFINGSPQNTFVPGLIDLAIARNTLIGGDDFKSGQTKMKSVLVDFLVGAGIKPTSIVSYNHLGNNDGMNLSAPQTFRSKEISKSNVVDDMVNSNAILYEPGEHPDHVVVIKYVPYVGDSKRAMDEYTSEIFMGGKSTIVLHNTCEDSLLAAPIILDLVLLAELSTRIEFKAENEGKFHSFHPVATILSYLTKAPLVPPGTPGVNALSKQRAMLENIMRACVGLAPENNMILEYK

SEQ ID NO: 142845 - DNA, 1845 bp, Avicennia marina
  CDS (27)..(1556)
cttgtgttgaaaagaagagaggaaatatgttcatcgagagcttcaaggttgacagcccaaacgttaagtacacagacagtgagattcactccgtctacaactatgaaactgcagagcttgttcacgagaacagaaacggtacctatcagtggatcgtgaagcccaaaactgttaaatatgagttcaggaccgacacccatgtcccgaaattaggtgttatgcttgttgggtggggaggcaacaatggttcaactctgacaggtggtgtcattgcaaatcgggagggtatttcatgggcaacgaaagacaaggtgcaacaggccaactattttgggtccctaactcaggcttctgcaattagggttgggtccttcaatggagaagagatctatgctccattcaagagcttactccctatggtcaaccctgatgacataatttttgggggatgggacatcagtaacatgaatctggctgatgccatgggcatgggccaagggttagacattgatctccaaaagcagctgaggccctacatggagcacatggtcccactccctgggatctactaccctgacttcattgctgccaatcagggctcacgtgccaacaacgtgatcaaaggaaccaagaaggagcaagttcaacaagtcatcaaagacattaaggagtttaaggagaaaactaaggtggaaagggtagtggtggggacagccaacaccgagagatacagcaatgttgttgtgggcttaaatgatacagcggaaagccttatggcctcgttggaaaggaatgaggctgagatatctccttcaaccttatatgccatagcttgcgtgcttgaagatgtcccttttatcaatggcagcccacaaaacactttcgttccagggctgattgagttagccatccaaaggaactgtttgattggtggagatgatttcaagagtggtcaaaccaagatgaaatcggtgctagttgatttccttgttggggctggtattaagccaacttcgatagtgagctataaccatttgggaaataatgatggaatgaatctatcagccccgcaaactttccggtcaaaggagatctccaaaagcaatgtggtagacgacatggtcgccagcaacagcatcctctacgagccgggagagcaccctgatcatgttgttgtcatcaagtatgtgcctgatgtgggagacagcaagagagcgatggacgagtacacatcggagatattcatgggaggtaaaagcacaatagtgatgcacaacacttgtgaggattctctcctggctgctccaatcatcctggatttggtcctccttgcggaactcagcacccgcattcagctcaaggccgagggagagggcaaattccactccttccatcccgtggccaccatcctcagctacctgaccaaagccccccttgtgcctccgggaacaccagttgtgaatgccctctcaaagcaaagggcaatgcttgagaacatcctaagggcttgtgttggattggccccagaaaacaacatgattttggaatacaagtgagttgtctgggcagattggtttcagaaaatgagcattaggaccagactcgtttactctttgcttttggtttttctatgaatttaataaatagtatttattacgtgtttttaatgtattattgtggccaagatcttcctcttcttttccttttcccaatctaatttgatgcagctatggcaaaagtgtattttatccgcttggactccctcagagcatatatagccatcatcttcttggagatatatggattatcatgtattggctaaaaaaaaaaaaaaaaaaaaaaaaa

SEQ ID NO: 142846 - protein, 509 aa, Avicennia marina
MFIESFKVDSPNVKYTDSEIHSVYNYETAELVHENRNGTYQWIVKPKTVKYEFRTDTHVPKLGVMLVGWGGNNGSTLTGGVIANREGISWATKDKVQQANYFGSLTQASAIRVGSFNGEEIYAPFKSLLPMVNPDDIIFGGWDISNMNLADAMGMGQGLDIDLQKQLRPYMEHMVPLPGIYYPDFIAANQGSRANNVIKGTKKEQVQQVIKDIKEFKEKTKVERVVVGTANTERYSNVVVGLNDTAESLMASLERNEAEISPSTLYAIACVLEDVPFINGSPQNTFVPGLIELAIQRNCLIGGDDFKSGQTKMKSVLVDFLVGAGIKPTSIVSYNHLGNNDGMNLSAPQTFRSKEISKSNVVDDMVASNSILYEPGEHPDHVVVIKYVPDVGDSKRAMDEYTSEIFMGGKSTIVMHNTCEDSLLAAPIILDLVLLAELSTRIQLKAEGEGKFHSFHPVATILSYLTKAPLVPPGTPVVNALSKQRAMLENILRACVGLAPENNMILEYK

SEQ ID NO: 142847 - DNA, 1936 bp, Avena sativa
  CDS (62)..(1594)
acgcgggagattcacaactccaattcatcaccccaccagaccggccagccagccagccaagatgttcatcgagagcttccgggtggagagcccgaacgtgcggtacggcgccggcgagatcgagtcggagtaccgctacgacaccacggagctggtgcacgagagccacaacggcgcatccaagtgggtcgtccgccccaagtccgtcaactaccacttcaagaccgacaccaacgtccccaagctcggggtgatgcttgtgggctggggcggcaacaatggctccacgctcatggctggcgtcatcgcaaacagggaggggatctcttgggcaaccaaggacaaggtgcagcaggccaactactttggctccctcacccaggcctccaccatcagggtcgggagctacaacggagaggagatctatgctcccttcaagagcctcctgcccatggtgagcccagatgacattgtgttcgggggctgggacatcagcagcatgaacatggctgatgcaatgaccagggccaaggtgctcgacatcgaccttcagaagcagctcaggccgtacatggagtccattgttccacttcctggcatctatgacccagacttcatcgctgcaaaccaggggtcccgggccaacaacgtcatcaagggcaccaaaaaggagcagatggagcaggttattaaggatataagggagttcaaggagaagaacaaagtggacaaggtagttgtgctgtggactgcaaacactgagaggtacagtggagtctctgtcgggctaaatgacacgatggagaacctcttggcctctgtggacaagaacgaggcggagatctctccgtctacactgtatgccatcgcctgcgtcatggagggcgtaccgttcatcaacgggagccctcagaacaccttcgtgccagggctgatcgatcttgcaatcaagaacaattgcttgattggtggcgatgacttcaagagtgggcagactaagatgaagtctgtcttggtcgacttcctcgttggtgctggaatcaagcccacctcgattgtcagctataatcacctgggcaacaacgacggcatgaacctctcggcgccacagacattccggtccaaggagatttccaagagcaatgtggtggatgacatggtcgcaagcaacaacatcctttacgagcccggggagcaccctgaccatgtcgtcgtcatcaagtatgtgccgtatgtcggggacagcaaaagggccatggacgaatacacctctgagatcttcatgggcggcaagaacaccatcgtattgcacaatacttgcgaggattcacttcttgcggcacctatcatccttgatctggtgctcctggctgagctcagcaccaggatccagttgaaagccgagggggaggagaagttccactccttccacccggttgcaaccatcctgagctacctcaccaaggcgccccttgttcctcctggcacaccggtggtgaatgctctggccaagcagagggcgatgctcgagaacatcatgagggcctgcgtcggcctggcgcccgagaacaacatgatcctcgagtacaagtgaagaggatcggagggcagagtcgccgcgctcatggtaacaagtgcgaatggatggacgagagggtaggaggaaggcgagattggctgtggaattatttggcttgtcttgtgtttcttttccgaattctttcccttgttaagttacctttctgtgcttgcgagaaactctgtagtgtccgcctgtccgggctctgcaactagcagatgctgcttatggtggtttgtcggataatggtggtgttagcttagttagtctctgttagtaactttggtacttgaactttcagttaaggatgacctgtgctccgtgttttacaaaaaaaaaaaaaaaaaaaaaaaaaaa

SEQ ID NO: 142848 - protein, 510 aa, Avena sativa
MFIESFRVESPNVRYGAGEIESEYRYDTTELVHESHNGASKWVVRPKSVNYHFKTDTNVPKLGVMLVGWGGNNGSTLMAGVIANREGISWATKDKVQQANYFGSLTQASTIRVGSYNGEEIYAPFKSLLPMVSPDDIVFGGWDISSMNMADAMTRAKVLDIDLQKQLRPYMESIVPLPGIYDPDFIAANQGSRANNVIKGTKKEQMEQVIKDIREFKEKNKVDKVVVLWTANTERYSGVSVGLNDTMENLLASVDKNEAEISPSTLYAIACVMEGVPFINGSPQNTFVPGLIDLAIKNNCLIGGDDFKSGQTKMKSVLVDFLVGAGIKPTSIVSYNHLGNNDGMNLSAPQTFRSKEISKSNVVDDMVASNNILYEPGEHPDHVVVIKYVPYVGDSKRAMDEYTSEIFMGGKNTIVLHNTCEDSLLAAPIILDLVLLAELSTRIQLKAEGEEKFHSFHPVATILSYLTKAPLVPPGTPVVNALAKQRAMLENIMRACVGLAPENNMILEYK

SEQ ID NO: 142849 - DNA, 1567 bp, Arabidopsis thaliana
  CDS (1)..(1536)
atgtttattgagagcttcaaagttgagagcccgaacgtgaagtacacagagaatgagattcactctgtgtacgattacgagacgacggaggttgttcatgagaagaccgtcaatggcacttaccaatggattgtgaagccaaagactgtcaaatacgatttcaaaaccgatattcgtgtccccaaattaggggttatgcttgtgggtttgggaggaaacaatggatcaactctcaccgctggtgtgattgcgaacaaagaaggaatctcgtgggcaacgaaggacaaagtgcaacaagcgaattacttcgggtcactaactcaagcttcatcgattcgtgtcggatcttttaacggtgaagagatctatgctcctttcaagagtctccttccaatggtgaatccggatgatgttgtgtttggaggatgggatataagtgacatgaacttagcagatgccatggctagagccagggttcttgatatcgacttgcagaaacagctcaggccttacatggagaacattgtgccactccctgggatcttcgatcctgatttcatagctgctaatcaagggtcacgtgctaaccacgtgatcaaaggtaccaagaaggaacaagtcgaccacatcatcaaggacatgagggagtttaaggagaagaataaggtggataaggttgtggttctctggacggctaacacagagcgttatagcaatgtggtcgttgggatgaacgatacaatggagaatctcatggagtctgtggatagggatgaggctgagatctctccttcaacactttatgcgattgcttgtgttcttgagggaatcccgttcatcaatggaagccctcaaaacacctttgttccaggtctaattgatatggcgatcaggaacaatgttttgatcggtggagatgatttcaagagtggtcaaaccaagatgaaatctgtcttggttgatttcctagttggcgcaggaatcaagcctacttcaattgtgagctacaatcacttgggaaacaacgatggaatgaatctctcagctccacagactttcagatctaaggagatctccaaaagcaatgtcgtggacgatatggttgctagcaatggtatcctctttgagcctggggaacacccggaccatgttgttgtcatcaagtatgtaccgtatgttgcggatagtaagcgagccatggacgagtacacatcagagatattcatgggagggaagaacacaattgtgatgcacaatacctgcgaggactctctcttagctgctccaatcatcttggatcttgttctcctcgcggagctcagcaccaggatccagttcaaatccgagggagaggggaagtttcactctttccatcctgtggccaccatactcagctacctcaccaaggcaccacttgtaccgccgggaactccggtgattaacgcactgtcgaagcagcgggctatgctggagaatattatgagggcgtgcgttggactggctccggagaacaacatgatcatggaattcaagtgaacatgaagaagcatgaatctaagacctttaa

SEQ ID NO: 142850 - protein, 511 aa, Arabidopsis thaliana
MFIESFKVESPNVKYTENEIHSVYDYETTEVVHEKTVNGTYQWIVKPKTVKYDFKTDIRVPKLGVMLVGLGGNNGSTLTAGVIANKEGISWATKDKVQQANYFGSLTQASSIRVGSFNGEEIYAPFKSLLPMVNPDDVVFGGWDISDMNLADAMARARVLDIDLQKQLRPYMENIVPLPGIFDPDFIAANQGSRANHVIKGTKKEQVDHIIKDMREFKEKNKVDKVVVLWTANTERYSNVVVGMNDTMENLMESVDRDEAEISPSTLYAIACVLEGIPFINGSPQNTFVPGLIDMAIRNNVLIGGDDFKSGQTKMKSVLVDFLVGAGIKPTSIVSYNHLGNNDGMNLSAPQTFRSKEISKSNVVDDMVASNGILFEPGEHPDHVVVIKYVPYVADSKRAMDEYTSEIFMGGKNTIVMHNTCEDSLLAAPIILDLVLLAELSTRIQFKSEGEGKFHSFHPVATILSYLTKAPLVPPGTPVINALSKQRAMLENIMRACVGLAPENNMIMEFK

SEQ ID NO: 142851 - DNA, 1781 bp, Brassica napus
  CDS (57)..(1589)
aaaccacacaaactcgattcaattaaaaaccgagaaaacaaaagtctgtttaaaagatgttcatcgagagcttcaaagtcgagagcccgaacgtgaagtacacggagaatgagattcattcggtgtacgattacgagaccacggaggtcgttcacgagaacgtcaacggtgcttaccagtggatcgtgaagcccaaggttgtcaaatacgatttcaaaaccgacactcgtgtccccaaattaggggttatgcttgttggttggggaggaaacaatggatcaaccctcaccgctggtgtaattgccaataaagaaggaatctcgtgggcgaccaaggacaaggtgcaacaagcgaactacttcgggtcgttaacacaagcatcgtctattcgtgtcggatcctttaacggtgaagagatgtatgcccctttcaagagtctcgttccaatggtgaatccggatgatgttgtgtttggaggatgggacataagcgatatgaatttagcagacgcgatgggtagagccaaggttcttgacattgatctgcagaaacagctcaggccttacatggagaacattgtcccactccctgggatctacgaccctgatttcatcgctgccaatcaaggctcacgtgccaacaacgtgatcaaaggtaccaagaaggaacaagtcgaccaaatcatcaaggacatgagggagtttaaggagaagaacaaggtggataaggttgtggttctgtggacggctaacacagagcgttacagcaatgtgatcgtggggctaaacgacactatggagaatcttatgaactctgtggatagggatgagtctgagatctctccttccacgctttatgctattgcatgtgttcttgaaggtattcctttcatcaatggaagccctcagaacacctttgttccgggtcttattgatttggctatcaagaacaatgttttgatcggtggagatgacttcaagagtggtcaaaccaagatgaaatctgtcttggttgatttccttgttggtgcaggcatcaagcctacttcaattgtgagctacaatcacctagggaacaacgatggaatgaacctctcagctccacagacattcagatctaaggagatctccaaaagtaatgtggttgacgatatggttgctagcaacggtatcctcttcgagcccggggaacatccagaccatgtagttgtcatcaagtatgtaccgtatgttgcagatagcaagcgagccatggatgagtatacatcagagatattcatgggaggcaagaacacaattgtgatgcacaatacctgcgaggactctctcttagctgctccaatcatcttggatcttgttctcctcgctgaaatcagcaccaggattcagttcaaatccgagaaagaggggaagtttcattctttccatcctgtggccaccaaacttagctatctcaccaaggcaccgctcgtgccgccgggaacaccggtggttaatgcgctgtcgaagcagcgggctatgctggagaatattcttagggcgtgtgttgggctggcgccggagaacaatatgatcttggaatacaagtgaacacgaagcgtttaagagtctttaattagccccaaatataagacttctgtttcttgtttttttttaataaatgttttaaaatatgaatgcttgtgttttcagagatcaaagagcttttagattgatctttgtagggtgtgaagttaccggtgtttctagtaatccagatgggctagtataaaaaaaaaaaaa

SEQ ID NO: 142852 - protein, 510 aa, Brassica napus
MFIESFKVESPNVKYTENEIHSVYDYETTEVVHENVNGAYQWIVKPKVVKYDFKTDTRVPKLGVMLVGWGGNNGSTLTAGVIANKEGISWATKDKVQQANYFGSLTQASSIRVGSFNGEEMYAPFKSLVPMVNPDDVVFGGWDISDMNLADAMGRAKVLDIDLQKQLRPYMENIVPLPGIYDPDFIAANQGSRANNVIKGTKKEQVDQIIKDMREFKEKNKVDKVVVLWTANTERYSNVIVGLNDTMENLMNSVDRDESEISPSTLYAIACVLEGIPFINGSPQNTFVPGLIDLAIKNNVLIGGDDFKSGQTKMKSVLVDFLVGAGIKPTSIVSYNHLGNNDGMNLSAPQTFRSKEISKSNVVDDMVASNGILFEPGEHPDHVVVIKYVPYVADSKRAMDEYTSEIFMGGKNTIVMHNTCEDSLLAAPIILDLVLLAEISTRIQFKSEKEGKFHSFHPVATKLSYLTKAPLVPPGTPVVNALSKQRAMLENILRACVGLAPENNMILEYK

SEQ ID NO: 142853 - DNA, 1563 bp, Candida albicans
  CDS (1)..(1563): transl_table=12
atgtccacaccaattgaattcaaatcgtccaattctgtcactaaggacgatcatttatataccaaatttacttatgaaaactctgttgttgaaaaagatgctaatggtaaattcatcgttacaccaactgctagtgactatgaattcaaagttgatttaaaagtccctaaggttggtttattgttagtcggtattggcggtaacaacggtactacattgttaggtgccacattagcaaacaaacacaatatttcttttgaaaacaaagaaggtgttgttaaaccaaattactatggttctgttactcaagcatccactgtcaaaatcggtgttgataaagaaactggtgaggatgtttacgttccatttaactccattgttccaatggttaacccaaatgatttggttgttgatggttgggatattagtggtttgccattagaccaagcaatgaagagagctaaagtcttggatgttactttacaaaagcagttgtatccatacttggagaacaagaaacctttggaatcaatctactaccctgatttcattgctttgaaccaaagtgaacgtgccaacaatgtttttaaccaagtcaatggtgaagttaaaactgataataaatgggccgacgttgaaaaaatcagaaaagatatcagagatttcaaggccaaaaacgaattagataaagttattattttatggactgctaatactgaaagatatgctgatgttttgccaaatgtcaatgacactgctgacaacttgatcaagagtattaaagaatcacacgaagaaattgctccaagtactgtctttgccgttgcttctatcttggaaaaagttccatatattaatggttcaccacaaaacacatttgttcccggtgttattgagttagctgaaaaatacgactcattcattggtggtgatgatttcaagtcaggtcaaacaaaaattaaatcagtgttagctcaattcttggtcgatgctggtatcaaaccactttctattgcttcttataatcacttgggtaacaatgacggttacaatttatcatcaccaaaacaatttagatctaaggaaatttccaaacaatctgttgttgatgatattattgaatccaacgaattattgtacaacaaggaatctggtgacaaagttgatcactgtatcgtcattaaatacttgccagctgttggtgattctaaagttgccatggatgaatactattcagaattaatgttgggtggtcacaacaaaataagtattcacaatgtttgtgaagattcattgcttgctacaccattgattattgacttggtggtggctactgaatttgcaactagagttcaagtcaaaggtcctggtaaatctgattatgatgaattgtatcctgttgctagtttattgtcttactggctcaaggctccattagcaagaccaggattcaaacctatcaacggattaaacaaacaacgtcaacaattagtcaacttgctttcagtgttggttggtttaccaattgacaacgaattaagatttgaaagaattctcaaataa

SEQ ID NO: 142854 - protein, 520 aa, Candida albicans
MSTPIEFKSSNSVTKDDHLYTKFTYENSVVEKDANGKFIVTPTASDYEFKVDLKVPKVGLLLVGIGGNNGTTLLGATLANKHNISFENKEGVVKPNYYGSVTQASTVKIGVDKETGEDVYVPFNSIVPMVNPNDLVVDGWDISGLPLDQAMKRAKVLDVTLQKQLYPYLENKKPLESIYYPDFIALNQSERANNVFNQVNGEVKTDNKWADVEKIRKDIRDFKAKNELDKVIILWTANTERYADVLPNVNDTADNLIKSIKESHEEIAPSTVFAVASILEKVPYINGSPQNTFVPGVIELAEKYDSFIGGDDFKSGQTKIKSVLAQFLVDAGIKPLSIASYNHLGNNDGYNLSSPKQFRSKEISKQSVVDDIIESNELLYNKESGDKVDHCIVIKYLPAVGDSKVAMDEYYSELMLGGHNKISIHNVCEDSLLATPLIIDLVVATEFATRVQVKGPGKSDYDELYPVASLLSYWLKAPLARPGFKPINGLNKQRQQLVNLLSVLVGLPIDNELRFERILK

SEQ ID NO: 142855 - DNA, 1617 bp, Candida glabrata
  CDS (1)..(1617)
atgactgtgaataaaggtattagcattcgcgtaaacaacgtcggtgacaaggtctcctacaaggagaacgagttgttgaccaactacacttaccacacgaatgtggtacacactaacagcgacaagacacagtttgaagtgactcccttggacaagaactaccaattcaaagtggacttgaacaagccggagagactgggtgtcatgctcgtgggtcttggtggtaacaacgggtccaccatgatggctgctgtgctggctaacaagcacaatgtgtgcttccgtactcgtgacaaagagggtctaactgagccaaattactacggttctttgactcaatcatcaacgatcaagctgggtgtcgactctaagggtaaagacgtctacgtgcctttcaactctttggtgccaatggttaacccaaacgattttgtggtctcaggttgggatatcaacggagccaccatggatcaagccatggagcgtgctagtgtccttgaagttgacttgagaaacaagttggctccaatgatgaaagatcacaaacccttgaagtccgtctattatccagatttcatcgctgctaaccaggatgagcgtgctgataactgtttgaacgtcgacccacaaaccggcaaagttaccaccaccggtaagtgggaacacttgaaccacatcagaaacgatatcagaactttcaaacaacagaacgacctggacaaagtaattattctatggaccgctaacaccgaaaggtacgtcgagatattgcctggtgtcaatgacaccatggaaaacttgctcgaagctatcaaaaacgatcacactgaaattgcaccatctactatctttgctgctgcttccatccttgaacattgtccttacattaacggttccccacagaacacttttgttccgggtctgattgaacttgctgaaaagaacgactcgttgatcgctggtgatgacttcaagtccggccaaactaagatgaaatctgtcttggctcaatttctagtcgatgccggtatcagacccgtctcaattgcttcttacaaccacttgggtaacaacgatggttacaacctttcctcaccacaacagttcaggtccaaggagatctcaaaggcttcggtggtagacgatatcattgaatcaaacccaattctatacaatgacaaactaggtaacaagatcgaccactgtatcgttatcaagtacatgcacgccgtaggtgactcaaaagttgctatggatgaatactacagtgaactgatgctaggtggccacaacagaatctccatccacaatgtctgtgaagactctttgctagctacaccattgatcatcgatttgattgtcatgaccgagttctgctccagagtcacatacagaaacgtagacggccaggatggtgcagaggctaagggtgatttcgaaaacttctacccagtgctgtcgttcctaagttactggctgaaggccccattgacaaagccaggctaccaaccaatcaacggtttgaacaagcagagaacagcgctagaaaacttcctaaggttgttgatcggccttcctgccattgacgaactgagattcgaagaaagattgaaatag

SEQ ID NO: 142856 - protein, 538 aa, Candida glabrata
MTVNKGISIRVNNVGDKVSYKENELLTNYTYHTNVVHTNSDKTQFEVTPLDKNYQFKVDLNKPERLGVMLVGLGGNNGSTMMAAVLANKHNVCFRTRDKEGLTEPNYYGSLTQSSTIKLGVDSKGKDVYVPFNSLVPMVNPNDFVVSGWDINGATMDQAMERASVLEVDLRNKLAPMMKDHKPLKSVYYPDFIAANQDERADNCLNVDPQTGKVTTTGKWEHLNHIRNDIRTFKQQNDLDKVIILWTANTERYVEILPGVNDTMENLLEAIKNDHTEIAPSTIFAAASILEHCPYINGSPQNTFVPGLIELAEKNDSLIAGDDFKSGQTKMKSVLAQFLVDAGIRPVSIASYNHLGNNDGYNLSSPQQFRSKEISKASVVDDIIESNPILYNDKLGNKIDHCIVIKYMHAVGDSKVAMDEYYSELMLGGHNRISIHNVCEDSLLATPLIIDLIVMTEFCSRVTYRNVDGQDGAEAKGDFENFYPVLSFLSYWLKAPLTKPGYQPINGLNKQRTALENFLRLLIGLPAIDELRFEERLK

SEQ ID NO: 142857 - DNA, 1978 bp, Citrus paradisi
  CDS (188)..(1711)
cggcacgagagcaagacgaaacagctcttcttccaataaatctcaaaagcatttgtttggttttatttaaagcaattttctcagcaaactcttcttctaataaattttaaagcatttgtttggtttttatttaaagcaattttctcagcgaagttttcaattttttctctaaaattttcctgggaaaatgtttatcgaaaatttcaaggttgagagcccaaatgtgaagtacacagatcatgagattcactctgtgtacgattatgaaaccactgagcttgttcatgagaacagaaatggcacttatcagtggattgtcaagcccaaaactgtcaaatatgagttcaaaaccgatgttcatgtccctaaacttggggttatgcttgtgggttggggtggaaacaacggctcaactctcacgggtggtgttatcgcgaatcgagagggaatctgctgggccacaaaggacactgtgcagcaagccaattattttggttcacttacccaagcatcagcaattagagttgggtcttacaatggagaggagatttatgctccattcaagagcattctccctatggtgaacccagatgacattgtgtttggaggatgggacattagtgacatgaacttggctgatgccatggccagggctagagtgtttgatattgatcttcaaaagcaacttaggccttacatggaatcaatggtcccacttcctggaatctatgaccctgatttcattgctgccaatcaagggtcgcgtgccaacaacgtgatcaaaggaaccaagaaagaacaaatgctacaaatcatcaaagatattagagagtttaaggagaaaaacaaggtggatagggttgttgtactgtggactgctaacactgagaggtacagtaatgtgattgtcgggctaaatgacacagtggagagccttcttgcttcactggacaaaaacgaagctgagatttctccttccaccttgtatgctattgcttgtgttcttgaaaatatccctttcatcaatggaagcccccaaaacacctttgtaccagggcttattgacttggctattaggaggaactgtttgattggtggagatgacttcaagagtgggcagactaagatgaaatctgttttggttgatttccttgttggggcaggaatcaagccaacatcaattgttagctacaaccacttgggaaacaatgatggaatgaatctttcagctcctcaaaccttccgctccaaggagatttccaaaagtaatgttgttgatgacatggtctccagcaatgtattctttatgggcctggtgaacacccgaccacgttggatcaagtatgtgccatatgttgcgatcgagagagccatggatgagtacacatcagaaattttcatgggtggcaagagcaccattgtgctgcacaacacgtgtgaggactctcttttggctgctccaatcattctagatttggttctgctggctgaactcagcaccaggatccagctcaaagctgaaggagagggcaaattccactctttccaccctgtggctacaattctcagctacctcaccaaggctcctctggtccctccaggcacaccagtggtgaatgcgctgtcgaagcagcgtgcaatgcttgagaacattctgagggcttgcgttggcttggctcctgagaacaacatgattttggaatacaagtgaagaacttgcaggggagaaaagtggaagaaccggtattccctttctctgtcaccaatcaaagctgtggtggtccatttaattactgattgtaatgtcttgtgtcatgaaattgtggttaatattcgtgtcctgtatgtttgctcttttatttttttaatgaaggtgctggagtgtagcccattgcctttgtagctcatttcggagcatgcaatctcttgtattgcaagtagataatatatggaagttcataaataactgtattgcggc

SEQ ID NO: 142858 - protein, 507 aa, Citrus paradisi
MFIENFKVESPNVKYTDHEIHSVYDYETTELVHENRNGTYQWIVKPKTVKYEFKTDVHVPKLGVMLVGWGGNNGSTLTGGVIANREGICWATKDTVQQANYFGSLTQASAIRVGSYNGEEIYAPFKSILPMVNPDDIVFGGWDISDMNLADAMARARVFDIDLQKQLRPYMESMVPLPGIYDPDFIAANQGSRANNVIKGTKKEQMLQIIKDIREFKEKNKVDRVVVLWTANTERYSNVIVGLNDTVESLLASLDKNEAEISPSTLYAIACVLENIPFINGSPQNTFVPGLIDLAIRRNCLIGGDDFKSGQTKMKSVLVDFLVGAGIKPTSIVSYNHLGNNDGMNLSAPQTFRSKEISKSNVVDDMVSSNVFFMGLVNTRPRWIKYVPYVAIERAMDEYTSEIFMGGKSTIVLHNTCEDSLLAAPIILDLVLLAELSTRIQLKAEGEGKFHSFHPVATILSYLTKAPLVPPGTPVVNALSKQRAMLENILRACVGLAPENNMILEYK

SEQ ID NO: 142859 - DNA, 1698 bp, Drosophila melanogaster
  CDS (1)..(1698)
atgaagcccaccaataactcaaccctggaggtaatctcgccgaaagtgcaggtggacgatgagttcatcaccaccgactacgattaccagacatcccatgtgaagcgcaccgccgatggacagctccaggtgcacccccagacgacgtcgctgaagatacggacgggtcgccatgtgcccaagctgggcgtgatgctggtgggatggggtggcaacaacggatccacgctgaccgccgccctggaggccaatcgtcgccagctgaagtggcgcaagcggacgggcgtccaggaggccaactggtatggttccattacacaggcgtccaccgtcttcattggatccgatgaggacggcggtgacgtgtacgtgcccatgaaggagctgctgcccatggtggagcccgacaacattatcgtggatggctgggatatcagtggcctgcatttgggcgacgccatgcgcagggccgaggtcctagacgtggctctgcaggatcagatctacgatcagttggctcagttgcgcccacgtccatccatctacgaccccgacttcatcgcggccaatcagtcggatcgggctgacaacgtgatccgtggcactcgtctggagcagtacgagcaaatccggaaggacatccgcgacttccgcgagcgcagtggcgtcgattcggtcatcgtcctctggactgccaacacggagcgcttcgcggatgtccagcctggtctgaacaccaccagccaggagctcatcgcctccctggaggccaaccactcggaggtgtcaccctccacgatcttcgcaatggccagcatcgccgaggggtgcacctacatcaacggctctccgcagaacacctttgtgcccggactgatccagctggccgaggagaagaatgttttcattgccggcgatgacttcaagtccggtcagaccaagatcaagagcgtgttggtagatttcctggtgggagctggtatcaagccggtgtccattgccagttacaaccatctgggcaacaacgatggcaagaacttgtccgctcctcaacagttccgctccaaggagatttccaagagcaacgtggtggacgacatggttgcctccaacaggctgttgtacggacccgatgagcaccccgaccacgtcgtggtaatcaagtacgtgccctatgtgggcgacagcaagcgggccatggatgagtacacatcggagatcatgatgggcggccacaacaccctggtgatccacaacacctgcgaggactcgctgctggccacaccgctcattctggacctggttatcctcggcgagctgagcactcgcatccagctgcgcaatgcggagaaggaatccgccccgtgggttcccttcaagccagtgctttccctgctgagctatctgtgcaaggctccactggtgccccagggctcccaggtggtcaactcgctcttccgccagcgcgccgccatagagaatatcctgcgtggctgcattggtctgccgcccatctcacacatgaccctggagcagcggttcgacttttctaccattacaaatgagccgcctctaaagagggtcaagatcctgggccagccctgctccgtggaatcggtcaccaatggaaagaagctccatgccaatggacactccaatgggtccgccaagctggccactaacggcaatggtcactga

SEQ ID NO: 142860 - protein, 565 aa, Drosophila melanogaster
MKPTNNSTLEVISPKVQVDDEFITTDYDYQTSHVKRTADGQLQVHPQTTSLKIRTGRHVPKLGVMLVGWGGNNGSTLTAALEANRRQLKWRKRTGVQEANWYGSITQASTVFIGSDEDGGDVYVPMKELLPMVEPDNIIVDGWDISGLHLGDAMRRAEVLDVALQDQIYDQLAQLRPRPSIYDPDFIAANQSDRADNVIRGTRLEQYEQIRKDIRDFRERSGVDSVIVLWTANTERFADVQPGLNTTSQELIASLEANHSEVSPSTIFAMASIAEGCTYINGSPQNTFVPGLIQLAEEKNVFIAGDDFKSGQTKIKSVLVDFLVGAGIKPVSIASYNHLGNNDGKNLSAPQQFRSKEISKSNVVDDMVASNRLLYGPDEHPDHVVVIKYVPYVGDSKRAMDEYTSEIMMGGHNTLVIHNTCEDSLLATPLILDLVILGELSTRIQLRNAEKESAPWVPFKPVLSLLSYLCKAPLVPQGSQVVNSLFRQRAAIENILRGCIGLPPISHMTLEQRFDFSTITNEPPLKRVKILGQPCSVESVTNGKKLHANGHSNGSAKLATNGNGH

SEQ ID NO: 142861 - DNA, 2152 bp, Hordeum vulgare
  CDS (143)..(1675)
atcacgtcactcctacacacactcgagagcattctctctcctctcgtctcctccaacactctctgtgtgagagatcgatcgagaggcaacactctccgtgagagagagagatcgagaggcagcagggagggagggagccaagatgttcatcgagagcttccgcgtggagagcccgaaggtgcggtacggcgcgggggagatcgagtccgagtaccgctacgacaccacggagctggtgcacgagagccacgacggcgcctccaagtgggtcgtccgccccaagtccgtcaactaccacttcaagaccaacaccaccgtccccaagctcggggtgatgctcgtggggtggggcggcaacaatggctccacactcatggctggggtcatcgccaacagggaggggatctcatgggcgacaaaggacaaggtgcagcaggccaactactttgggtccctcacccaggcctccaccatcagggtcgggagctacaacggagaggagatctatgcgcccttcaagagcctccttcccatggtgaatccggatgaccttgtgttcgggggctgggacattagcagcatgaacctggctgatgctatgaccagggccaaggtgctggacattgacctgcagaagcagctcaggccctatatggagtccatgtgcccgctccctggcatctatgacccggacttcatcgcagccaaccagggctcccgggctaacaatgtcatcaagggcacaaagaaagagcagatggagcaggtcatcaaagatataagggagttcaaggagaagaacaaggtagacaaggtagtggtgctctggacggcaaacactgaaaggtacagcaacgtctctgttgggcttaatgacacgactgagaacctcttggcgtctgtggacaagaacgaggctgagatatctccatcaacactgtatgccattgcctgtgtcatggagggtgtgccgttcatcaatgggagccctcagaacacctttgtgcctggactgattgatcttgctattaagaatgactgcctgattggtggcgatgatttcaagagtggccagaccaagatgaagtctgtcttggtcgacttccttgttggtgctggaatcaagcccacctcaattgtcagctacaaccatctggggaacaacgacgggatgaacctatccgcaccgcaaacatttcgttccaaggagatctcaaagagcaacgtggtggatgacatggtctcaagcaatgctatcctctatgagcccggggaacatcctgaccacgtcgtcgtgatcaagtacgtgccatacgttggagacagcaagagggccatggacgagtatacctcggagatcttcatggggggcaagagcaccatcgtgctgcacaacacctgcgaggactcgctcctccgcgcgccgatcattcttgatttggtgctcctggccgagctcagcaccaggattcagctgaaagccgagggagaggacaagctccattccttccatccggttgccaccatcctgagctacctcaccaaggcgcccctggtccctccaggcacaccggtggtgaacgcgctggcgaagcagagggcgatgctggagaacatcatgagggcgtgcgtcggcctggcgcccgagaacaacatgatcctggagtacaagtgaggagcacggccgacggaggacccgttacgttacgtacgtagcaagcggcgaggggcgacgggggagaagggcggggaggaagaaggaggcgagatcggccgtggaaccatttggcggttttgtctttggtttcctctgcgattctttccctggttaagctttacccttgtgtgttgtgtgtgtgtatgtccttgcgagactggttcggctctctgtccgggctctgctactactgtctggtgttgggtgatgtggagggaggagggcgcgtgttagcttaagttagcccgctccctctctgttcgtgttctgtaagttaactatatagtactggagtagtatggaagttgcgttcggtttaccgtcgtgttgtgtgctctgcttgttccggtcgtcaggacgcagccagtagtgcttggacgatgcaagccgaaaatcaagtaaatagcataaactaccgcaaaaaaaaaaaaaaaa

SEQ ID NO: 142862 - protein, 510 aa, Hordeum vulgare
MFIESFRVESPKVRYGAGEIESEYRYDTTELVHESHDGASKWVVRPKSVNYHFKTNTTVPKLGVMLVGWGGNNGSTLMAGVIANREGISWATKDKVQQANYFGSLTQASTIRVGSYNGEEIYAPFKSLLPMVNPDDLVFGGWDISSMNLADAMTRAKVLDIDLQKQLRPYMESMCPLPGIYDPDFIAANQGSRANNVIKGTKKEQMEQVIKDIREFKEKNKVDKVVVLWTANTERYSNVSVGLNDTTENLLASVDKNEAEISPSTLYAIACVMEGVPFINGSPQNTFVPGLIDLAIKNDCLIGGDDFKSGQTKMKSVLVDFLVGAGIKPTSIVSYNHLGNNDGMNLSAPQTFRSKEISKSNVVDDMVSSNAILYEPGEHPDHVVVIKYVPYVGDSKRAMDEYTSEIFMGGKSTIVLHNTCEDSLLRAPIILDLVLLAELSTRIQLKAEGEDKLHSFHPVATILSYLTKAPLVPPGTPVVNALAKQRAMLENIMRACVGLAPENNMILEYK

SEQ ID NO: 142863 - DNA, 1535 bp, Zea mays
  CDS (1)..(1533)
atgttcatcgagagcttccgcgtcgagagcccccacgtgcggtacggcccgatggagatcgagtcggagtaccggtacgacacgacggagctggtacacgagggcaaggacggcgcctcacgctgggtcgtccgccccaagtccgtcaagtacaacttccggaccagaaccgccgtccccaagctcggggtgatgcttgtggggtggggaggcaacaacgggtccacgctgacggctggggtcattgccaacagggaggggatctcatgggcgaccaaggacaaggtgcagcaagccaactactacggctccctcacccaggcctccaccatcagagtcggcagctacaacggggaggagatctatgcgccgttcaagagcctccttcccatggtgaacccagacgacattgtgttcggaggctgggacattagcaacatgaacctggccgactccatgaccagggccaaggtgctggatattgacctgcagaagcagctcaggccctacatggagtccatggtgccacttcccggtatctatgatccggacttcatcgcggctaaccagggctctcgcgccaacagtgtcatcaagggcaccaagaaagaacaggtggagcagatcatcaaggatatcagggagtttaaggagaagaacaaagtggacaagatagttgtgttgtggactgcaaacactgaaaggtatagcaatgtgtgcgctggtctcaacgacacgatggagaatctactggcatctgtggacaagaacgaggcggaggtatcaccatcaacactatatgccattgcctgtgtcatggagggggtgccgttcatcaatgggagcccccagaacacctttgtgcctgggctgattgatcttgctataaaaaacaactgcttgattggtggtgacgacttcaagagtggacagaccaagatgaaatctgtcttggtcgatttccttgttggtgctggaataaagcccacctcaatcgtgagctacaaccacttgggaaacaacgatggcatgaacctgtctgcccctcaagcattcaggtccaaggagatctccaagagcaacgtggtggatgacatggtctcgagcaatgccatcctctatgagcccggcgagcatcccgatcatgtcgttgtcatcaagtatgtgccgtacgtgggagacagcaagagggctatggacgagtacacctcagagatcttcatgggcggcaagaacaccatcgtgctgcacaacacctgtgaggactcgctcctcgccgcacctatcatccttgatctggtgctcttggctgagctcagcaccaggatccagctgaaagctgagggagaggacaaattccactccttccacccggtggccaccatcctgagctacctcaccaaggcacccctggttccccctggcacaccggtggtgaacgctctggccaagcagagggcgatgctggagaacatcatgagggcctgcgttgggctggccccagagaacaacatgatcctggagtacaagtgagc

SEQ ID NO: 142864 - protein, 510 aa, Zea mays
MFIESFRVESPHVRYGPMEIESEYRYDTTELVHEGKDGASRWVVRPKSVKYNFRTRTAVPKLGVMLVGWGGNNGSTLTAGVIANREGISWATKDKVQQANYYGSLTQASTIRVGSYNGEEIYAPFKSLLPMVNPDDIVFGGWDISNMNLADSMTRAKVLDIDLQKQLRPYMESMVPLPGIYDPDFIAANQGSRANSVIKGTKKEQVEQIIKDIREFKEKNKVDKIVVLWTANTERYSNVCAGLNDTMENLLASVDKNEAEVSPSTLYAIACVMEGVPFINGSPQNTFVPGLIDLAIKNNCLIGGDDFKSGQTKMKSVLVDFLVGAGIKPTSIVSYNHLGNNDGMNLSAPQAFRSKEISKSNVVDDMVSSNAILYEPGEHPDHVVVIKYVPYVGDSKRAMDEYTSEIFMGGKNTIVLHNTCEDSLLAAPIILDLVLLAELSTRIQLKAEGEDKFHSFHPVATILSYLTKAPLVPPGTPVVNALAKQRAMLENIMRACVGLAPENNMILEYK

SEQ ID NO: 142865 - DNA, 2053 bp, Mesembryanthemum crystallinum
  CDS (182)..(1720)
ctcactcttctcatcaaactcattccaagtgccagcggtgagaagaaggagaagaagagaagtagtccaggagagagaaagagagagaaagagagagaaatagttcgagtgagttggcaaccaccctttttttcattttttgaaaaagatccgaaaaaaaggagagagagagagagagaaaatgtttattgagagcttcaaagtagagagcccaaacgtgaagtacacagagaatgagattgaatcggtgtacaactacgacaccaccgagttggttcatgagaatcgcaaagatgctggtggttatcaatggatcgttaagcccaagaccgttcagtatcacttcaagactgacactcgtgtccccaaactcggggtgatgctggttggatggggtggaaataacggctccaccctcacaggtggtgtgatcgccaaccgcgagggaatatcttgggcaaccaaggacaagatccagcaagcgaactattttggttcgttgacccaggcttcttcaattcgggtcgggtcttttaatggagaggagatttatgctcctttcaagagcttgctccctatggtgaacccagatgacgtagtgtttgggggttgggacataagcgacatgaacctggctgatgcaatgaccagggctagggtctttgacattgatcttcaaaagcagctcaggccttacatggagcacatggttcccctccctggtatttacgaccctgatttcatcgctgcgaaccaaggctcccgagccaacaacgtcattaagggcaccaagaaggaacaagttgagcgagtcattaaagacattagggagttcaaggagaagaacaaagtggacaaggtggtggtgctatggactggcaacacagagaggtacagcaatgtggtggtcgggctcaacgacaccatggagaacctgttggcatctctggagaaaaacgagtcggagatttctccatccacttcgtatgccttggcatgtatcgaagaaaatattcccttcatcaatggtagccctcagaacacctttgtgccagggctcattgatctggctatcaagaagaacagtttgattggtggtgatgacttcaagagtggtcagaccaagatgaaatctgtcctcgtcgacttcctcgttggggctggtattaagccaacatccatagtgagctacaaccacttggggaacaatgatgggatgaacctgtcagcacctcaaactttcaggtccaaggagatttctaagagcaacgtggtcgatgacatggttgccagcaacggcatcctctatgagccgggcgaacaccctgatcatgttgtggtcatcaagtatgtgccatatgtgggagacagcaagagagccatggatgagtacacttcggaaatatttatggggggaacgaacactattgtcatgcacaacacctgtgaggactctctcttggctgcccccatcatcctggacttggtcctccttgctgaactaagcacccgcattcagctgaaggctgaggaagaggacaagttccactccttccatccggtcgctaccatcctgagttacctcaccaaggcccctcttgttccaccaggcactccagtggtaaatgcactttcgaagcagagggctatgctggagaacatactgagggcttgtgttggtttggctcctgagaacaacatgatcctcgaatacaagtgaggatgaagtcacaagagccacaccacaaggcaaccctatccgagctgttttatctttgcgtttgctattgttgtggcgttgtactagaaactgatgaaatcaaaaaaaggcagcacccaaaatcaatagcttttgcggtgaatttagtttctcgaacctgtctttgtttatttcgttcttttaagtactggcaattgtggtcgtagatgaaggtgcaggcctctggtgttttgtaatatgtaaattcgctggccttagtgcgattcaagagcaggcagttttttcctgcttagcttaatctaagtgattaatgaagtttctgttgttgcaatc

SEQ ID NO: 142866 - protein, 512 aa, Mesembryanthemum crystallinum
MFIESFKVESPNVKYTENEIESVYNYDTTELVHENRKDAGGYQWIVKPKTVQYHFKTDTRVPKLGVMLVGWGGNNGSTLTGGVIANREGISWATKDKIQQANYFGSLTQASSIRVGSFNGEEIYAPFKSLLPMVNPDDVVFGGWDISDMNLADAMTRARVFDIDLQKQLRPYMEHMVPLPGIYDPDFIAANQGSRANNVIKGTKKEQVERVIKDIREFKEKNKVDKVVVLWTGNTERYSNVVVGLNDTMENLLASLEKNESEISPSTSYALACIEENIPFINGSPQNTFVPGLIDLAIKKNSLIGGDDFKSGQTKMKSVLVDFLVGAGIKPTSIVSYNHLGNNDGMNLSAPQTFRSKEISKSNVVDDMVASNGILYEPGEHPDHVVVIKYVPYVGDSKRAMDEYTSEIFMGGTNTIVMHNTCEDSLLAAPIILDLVLLAELSTRIQLKAEEEDKFHSFHPVATILSYLTKAPLVPPGTPVVNALSKQRAMLENILRACVGLAPENNMILEYK

SEQ ID NO: 142867 - DNA, 1931 bp, Nicotiana paniculata
  CDS (92)..(1624)
cttagccttaaagtatactcatagcgtgttcttctctttgtttgttacaaaacctctttccccttcgatactttagaaaagtttcctcaaaatgtttattgagaattttaaggttgagagccccaacgttaagtacaccgaaagtgaaattcactctgtctatgattatcaaaccactgagttagttcatgatgagaaaaatgggacatatcaatggaccgtcaagcctaagactgtcaaatatgagttcaagactgatgttcatgttcccaaattaggggttatgcttgttggatggggtggaaacaatggttcaaccttgaccggtggtgttattgctaacagagaaggaatttcatgggccaccaaagataaggtgcaacaagccaattactttggctctcttactcaggcttctactattcgagttgggtctttcaatggagaagagatctatgctccatttaaaagcctccttccaatggtcaatccagatgacgtagtgtttggaggatgggacatcagcgacatgaatttagcagatgccatggccagggctaaggtatttgatattgatctacaaaagcagttgaggccctacatggaatctatggtcccactccctggtatctatgaccctgatttcattgctgctaaccaagggtcacgtgccaacaacgtgatcaaaggaaccaagaaagaacaaattgatcaaatcattaaggatattagggagtttaaggaaaagaacaaagtggacaaggtggtagtattgtggactgctaacactgaaagatacagtaatgtggttgttggacttaatgacactatggaaaacctctttgcttctgtggacagaaatgaagctgaaatatctccttccactttgtatgctattgcctgcattcttgaaaatgtgccttttattaatggaagcccccagaacacctttgtcccaggcctcattgatttggccatcaagaagaacacattgattggtggtgatgactttaagagtggtcaaaccaaaatgaagtcagtgctggttgatttccttgttggagctggtattaagccaacatcaattgtgagctacaaccatttgggtaacaatgatggaatgaatctgtctgcccctcaaactttccggtcaaaggagatctcgaaaagtaatgttgttgatgacatggtttcaagcaatgccatcctttatgagcctggagagcaccctgaccatgttgttgtgattaagtatgtgccatatgtgggagacagcaagagggcaatggatgagtacacatctgagattttcatggggggaaagaacaccattgttttgcacaatacttgtgaggattcacttttagctgctccaattatattggatttggtccttcttgctgaactcagtacccgcattcagctcaaagctgaaggagagggtaagttccactccttccaccccgtggctactatcctcagctaccttaccaaggctcctctggtaccaccaggtacaccagtggtgaatgcactctcaaagcagagggcaatgcttgagaacatattgagggcttgtgttggacttgcaccagagaacaacatgattctggaatacaaatgaagatccatttccctaagaagggaaaggactcaagaagctgtacggcagaagaaccataatggtctttcttttctttagtatttgtaatcttcatctttcattagtactatgattagctaaatgtcggcaacccttcgaggtatagctgttttgtaatggcaggccaagttgaatgtcattataatttctttgttgtctttgtatgttagccttctatttacaaggttgtatccgtgttgctctttctcatttagagctagcaacgcttttctctaatggaaatacaatgtgtagtcctttagacgtt

SEQ ID NO: 142868 - protein, 510 aa, Nicotiana paniculata
MFIENFKVESPNVKYTESEIHSVYDYQTTELVHDEKNGTYQWTVKPKTVKYEFKTDVHVPKLGVMLVGWGGNNGSTLTGGVIANREGISWATKDKVQQANYFGSLTQASTIRVGSFNGEEIYAPFKSLLPMVNPDDVVFGGWDISDMNLADAMARAKVFDIDLQKQLRPYMESMVPLPGIYDPDFIAANQGSRANNVIKGTKKEQIDQIIKDIREFKEKNKVDKVVVLWTANTERYSNVVVGLNDTMENLFASVDRNEAEISPSTLYAIACILENVPFINGSPQNTFVPGLIDLAIKKNTLIGGDDFKSGQTKMKSVLVDFLVGAGIKPTSIVSYNHLGNNDGMNLSAPQTFRSKEISKSNVVDDMVSSNAILYEPGEHPDHVVVIKYVPYVGDSKRAMDEYTSEIFMGGKNTIVLHNTCEDSLLAAPIILDLVLLAELSTRIQLKAEGEGKFHSFHPVATILSYLTKAPLVPPGTPVVNALSKQRAMLENILRACVGLAPENNMILEYK

SEQ ID NO: 142869 - DNA, 1871 bp, Phaseolus vulgaris
  CDS (87)..(1622)
aaaccagcgggcgccagtgtgagtaatttagcaaaaccgatccaaattccgagaaagacaaccacttttccttttcctctgcaaaaatgtttattgagagcttcaaagttgagagcccgaacgtgaagtacacagagaatgagattcactctgtgtacgattacgagacgacggaggttgttcatgagaagaccgtcaatggcacttaccaatggattgtgaagccaaagactgtcaaatacgatttcaaaaccgatattcgtgtccccaaattaggggttatgcttgtgggtttgggaggaaacaatggatcaactctcaccgctggcgtgattgcgaacaaagaaggaatctcgtgggcaacgaaggacaaagtgcaacaagcgaattacttcgggtcactaactcaagcttcatcgattcgtgtcggatcttttaacggtgaagagatctatgctcctttcaagagtctccttccaatggtgaatccggatgatgttgtgtttggaggatgggatataagtgacatgaacttagcagatgccatggctagagccagggttcttgatatcgacttgcagaaacagctcaggccttacatggagaacattgtgccactccctgggatcttcgatcctgatttcatagctgctaatcaagggtcacgtgctaaccacgtgatcaaaggtaccaagaaggaacaagtcgaccacatcatcaaggacatgagggagtttaaggagaagaataaggtggataaggttgtggttctctggacggctaacacagagcgttatagcaatgaggtcgttgggatgaacgatacaatggaggatctcatggagtctgtggatagggatgaggctgagatctctccttcaacactttatgcgattgcttgtgttcttgagggaatcccgttcatcaatggaagccctcaacacacctttgttccaggtctaattgatatggcgatcaggaacaatgttttgatcggtggagatgatttcaagagtggtcaaaccaagatgaaatctgtcttgggtgatttcctagttggcgcaggaatcaagcctacttcaattgtgagctacaatcacttgggcaacaacgatggaatgaatctctcagctccacagactttcagatctaaggagatctcgaaaagcaatgtcgtggacgatatggtcgctagcaatggtatcctctttgagcctggggaacacccggaccatgttgttgtcatcaagtatgtaccgtatgttgcggatagtaagcgagccatggacgagtacacatcagagatattcatgggagggaagaacacaattgtgatgcacaatacctgcgaggactctctcttagctgctccaatcatcttggatcttgttctcctcgcggagctcagcaccaggatccagttcaaatccgagggagagggaaagtttcactctttccatcctgtggccaccatactcagctacctcaccaaggcaccacttgtaccgccaggaactccggtgattaacgcactgtcgaagcagcgggctatgctggagaatattatgagggcgtgcgttggactggctccggagaacaacatgatcatggaattcaagtgaacatgaagaagcatgaatctaagacctttaattagctcataatttaagagtctttaatttgttcgttgtttggtttttatataatgtttttaaattatgaaagcttgtgtttctgagagaccaaagagcttttagtttggtctctgtagggtgtgaagtaacttgtatttgtagtaatccggatgggttggtatattttgcaaaaaaaaaaaaaaaaaaaaaaaaaaaaaaaaaaaaaaaaaaaaccct

SEQ ID NO: 142870 - protein, 511 aa, Phaseolus vulgaris
MFIESFKVESPNVKYTENEIHSVYDYETTEVVHEKTVNGTYQWIVKPKTVKYDFKTDIRVPKLGVMLVGLGGNNGSTLTAGVIANKEGISWATKDKVQQANYFGSLTQASSIRVGSFNGEEIYAPFKSLLPMVNPDDVVFGGWDISDMNLADAMARARVLDIDLQKQLRPYMENIVPLPGIFDPDFIAANQGSRANHVIKGTKKEQVDHIIKDMREFKEKNKVDKVVVLWTANTERYSNEVVGMNDTMEDLMESVDRDEAEISPSTLYAIACVLEGIPFINGSPQHTFVPGLIDMAIRNNVLIGGDDFKSGQTKMKSVLGDFLVGAGIKPTSIVSYNHLGNNDGMNLSAPQTFRSKEISKSNVVDDMVASNGILFEPGEHPDHVVVIKYVPYVADSKRAMDEYTSEIFMGGKNTIVMHNTCEDSLLAAPIILDLVLLAELSTRIQFKSEGEGKFHSFHPVATILSYLTKAPLVPPGTPVINALSKQRAMLENIMRACVGLAPENNMIMEFK

SEQ ID NO: 142871 - DNA, 1845 bp, Sesamum indicum
  CDS (51)..(1583)
cggcacgagctcctctttcctctcaaacacagcaaaagaaagaaacgaaaatgttcatcgagagcttcaaggttgagagccccaatgtcaagtacaccgagggtgagattcactctgtctacaactacgagactacagagcttgttcatgagagcagaaacggcacctaccaatggattgtcaagcccaagactgtcaaatacgagttcaaaactgatactcatgtccccaaattaggggtcatgcttgttggatggggagggaacaatggttcaactctcactggcggtgtcattgcaaacagggaagggatttcatgggcaacaaaggataaggtgcaacaggccaattattttgggtcactgacacaggcatcctcaatcagagttggttccttcaatggagaagagatctatgcccccttcaaaagccttcttcccatggtcaacccagatgacgtagtgtttgggggatgggacatcagcaatatgaatttggctgatgccatgggcagggccaaggtgttagatattgatctccagaagcagctcaggccctacatggagcacatggtcccactccctggaatctacgatcctgatttcatagccgccaatcagggatcacgtgccaacaacgtgattaaaggaaccaagaaagaacaagttcaacagatcatcaaagacatgagggactttaaggagcaaaataaggtggacaaggtcgtagtgctgtggacagccaacacagaaagatacagtaatgttgtcgttgggctaaacgatacagccgaaagcctgatggcctcggtagagaggaatgaggccgagatatctccttcaaccttgtatgccatagcttgtgtttttgaaaatgttccgttcattaatggcagcccacaaaatacttttgttccagggttgattgatttggcgattcagaggaacagtttgattggtggagatgatttcaagagcggtcaaaccaagatgaaatcagtgctagttgatttccttgttggagctggtatcaagccaacgtcgattgtgagctataatcatctgggaaacaacgacgggatgaatctatcagcaccccaaactttccggtccaaagagatttctaaaagcaatgtggtagacgacatggttgccagcaacggcatcctttatgagcctggtgaacaccccgaccatattgttgtcatcaagtatgtaccgtatgtgggggacagcaagagagcaatggacgagtacacttcggagatattcatgggagggaaaagtaccatagttctgcacaacacgtgtgaggactctcttctggctgctcccatcatcctggatttggtcctcctagctgaactcagcactcgtattcagctcaaagccgagggagagggcaaattccattcgttccacccggtggcaaccatcctcagctacctaaccaaagcccctcttgtacctccaggcacaccggtcgtcaacgcactgtctaagcagcgtgccatgctcgagaacatcttgagggcttgtgttggattggctccagaaaacaatatgattttggaatacaagtgaaaagaaaaaaaacattgtgggaattggacaaacgggcaaggacaggacacccgtgctgttgttcttgcttagcttttggtattttcttgtaagcgtagtactgggagttagtgtttttccttttttgatgtagttgcaataatggattgaagtgtattttactgttaagtagttgctatgcataaattttatttgtttaagtaaaataaatgatgtgataataaaagaatacaaattcatcttaaaaaaaaaaaaaaaaaaa

SEQ ID NO: 142872 - protein, 510 aa, Sesamum indicum
MFIESFKVESPNVKYTEGEIHSVYNYETTELVHESRNGTYQWIVKPKTVKYEFKTDTHVPKLGVMLVGWGGNNGSTLTGGVIANREGISWATKDKVQQANYFGSLTQASSIRVGSFNGEEIYAPFKSLLPMVNPDDVVFGGWDISNMNLADAMGRAKVLDIDLQKQLRPYMEHMVPLPGIYDPDFIAANQGSRANNVIKGTKKEQVQQIIKDMRDFKEQNKVDKVVVLWTANTERYSNVVVGLNDTAESLMASVERNEAEISPSTLYAIACVFENVPFINGSPQNTFVPGLIDLAIQRNSLIGGDDFKSGQTKMKSVLVDFLVGAGIKPTSIVSYNHLGNNDGMNLSAPQTFRSKEISKSNVVDDMVASNGILYEPGEHPDHIVVIKYVPYVGDSKRAMDEYTSEIFMGGKSTIVLHNTCEDSLLAAPIILDLVLLAELSTRIQLKAEGEGKFHSFHPVATILSYLTKAPLVPPGTPVVNALSKQRAMLENILRACVGLAPENNMILEYK

SEQ ID NO: 142873 - DNA, 1842 bp, Spirodela polyrrhiza
  CDS (105)..(1637)
gaagcctccttcttcatcatcttcttcttcttctttctgcaactcaactccttcctcttcgcgcaggtagtttagagaagtttagagagagagagagggagaggatgttcatcgagaagttccgggtggagagcccgaacgtgaagtatggggatggagagatcgagtctgtgtacagttacgagacgacggagctggtccacgaggtgaggaacggctcctaccagtgggtcgtcaagcccaagtccgtgcagtatcagttcaagaccgacacccgtgtccccaggctcggagtgatgctggttggatggggcgggaacaacgggtcgaccctgacggcgggagtcattgcgaatcgagaggggatctcgtgggtgaccaaggagaaggtccagcaggccaactacttcggctccctcacacaatcttcctccatccgggtgggctccttcaacggggaggagatctacgcccctttcaagagcctccttcccatggtgaacccagatgagatagtgttcggggggtgggacatcagtgacatgaacctggcagacgccatggggagggccaaggtgctggacatcgacctgcagaagcagctgcggccctacatggaaagcatggtgcccctcccaggcatctacaatccggacttcattgccgccaaccagggctcccgggccaacaacgtcatcaagggccccaagaagcagcaggtccagcgcatcatcgacgacatcagggagttcaaggagagggagaaggtggagaaggtggtggtgctgtggacggccaacacggagcgctacagcgacctggtcgtcggcctcaacgacaccatggagaacctcctggcggcggtggagagggacgaggcggagatctctccctcctcgctctacgccctcgcctgcatcatggagggcgtccccttcgtcaacggcagcccccagaacaccttcgtccccggtctgatcgagatggccatcaagaggaacagcctcatcggaggggacgacttcaagagcgggcagaccaagatgaagtccgtcctggtcgatttcctcgtcggcgcggggatcaagccgacgtcgatcgtcagctacaaccatctcggcaacaacgatgggatgaacctctccgctccgcagaccttccggtccaaggagatctccaagagcaacgtagttgacgacatggtctccagcaatggaatcctctacgagcccggcgagcaccctgatcacgtcatcgtgatcaagtacgtgccgtacgtcggggacagcaagagggctatggacgagtatacctctgagatctttatgggcgggaagagcaccatcatactccacaacacctgcgaggactcgctcttggcggcgcccatcatacttgatctcgtcctcctggcggagctgagcacaaggatccagctcaaagctgaaggggagagcaagttccactccttccacccagtagcctccattctgagctatctctccaaggcgccactggtgccaccagggacgccggtggtgaacgccttgtccaagcagagggcgatgctggagaacatcctgagggcctgcgtcggcctggccccggagaacaacatgatcttggagtacaagtgacctagattgggactgatgacaacaagaagtgtagtaggaaggaatgatcgcttcctttttctcttcttccctttctttcaggtttctcttttctctaatacaatggcgtggcatgaatcttttccctatgtttcagtccttggaagcatggttcaagcccattatttggacaacatatctcaactggggttgaatccaatcaaaa

SEQ ID NO: 142874 - protein, 510 aa, Spirodela polyrrhiza
MFIEKFRVESPNVKYGDGEIESVYSYETTELVHEVRNGSYQWVVKPKSVQYQFKTDTRVPRLGVMLVGWGGNNGSTLTAGVIANREGISWVTKEKVQQANYFGSLTQSSSIRVGSFNGEEIYAPFKSLLPMVNPDEIVFGGWDISDMNLADAMGRAKVLDIDLQKQLRPYMESMVPLPGIYNPDFIAANQGSRANNVIKGPKKQQVQRIIDDIREFKEREKVEKVVVLWTANTERYSDLVVGLNDTMENLLAAVERDEAEISPSSLYALACIMEGVPFVNGSPQNTFVPGLIEMAIKRNSLIGGDDFKSGQTKMKSVLVDFLVGAGIKPTSIVSYNHLGNNDGMNLSAPQTFRSKEISKSNVVDDMVSSNGILYEPGEHPDHVIVIKYVPYVGDSKRAMDEYTSEIFMGGKSTIILHNTCEDSLLAAPIILDLVLLAELSTRIQLKAEGESKFHSFHPVASILSYLSKAPLVPPGTPVVNALSKQRAMLENILRACVGLAPENNMILEYK

SEQ ID NO: 142875 - DNA, 1959 bp, Nicotiana tabacum
  CDS (94)..(1626)
cttagccttaagtatactcatagcgtgttcttctctttgtttgttacaattacaaaacctttcccctttgatcctttctaaagtttcctcaaaatgtttattgagaactttaaggttgagagccccaacgttaagtacaccgaaagtgagattcactctgtctatgattatcaaaccactgagttagttcatgaggagaaaaatgggacttaccaatggactgtcaagcctaagactgtcaaatatgagttcaagactgatgttcatgttcccaaattaggggttatgcttgttggatggggtggaaacaatggttcaaccttgaccggtggtgttattgctaacagagaaggaatttcatgggccaccaaagataaggtgcaacaagccaattactttggctctcttactcaggcttctactattcgagttgggtctttcaatggagaagagatctatgctccatttaaaagcctccttccaatggtcaatccagatgacgtagtgtttggaggatgggacatcagcggcatgaatttggcagatgccatggcaagggctaaggtatttgatattgatctacaaaagcagttgaggccctacatggaatctatggtcccactacctggtatctatgatcctgatttcattgctgctaaccaagggtcacgtgccaacaacgtgatcaaaggaaccaagaaagaacaaattgatcaaatcattaaggatattagggagtttaaggagaagaacaaagtggacaaggtggtagtcttgtggactgctaacactgaaagatacagtaatgtggttgttggacttaatgatactatggaaaatctctttgcttctgtggacagaaatgaagctgaaatatctccttccactttgtatgctattgcctgcattcttgaaaatgtgccttttattaatggaagcccacagaacacctttgtgccaggcctcattgatttggccatcaagaggaacacactgattggtggtgatgactttaagagtggtcaaaccaaaatgaagtcagtgctggttgatttccttgttggagctggtattaagccaacatcaattgtgagctacaaccatttgggtaacaatgatggaatgaatctgtctgcccctcaaactttccgctcaaaggagatctcgaaaagtaatgttgttgatgacatggtttcaagcaatgccattctttatgagcctggagagcaccctgaccatgttgttgtgattaagtatgtgccatatgtgggagacagcaaaagggcaatggatgagtacacatctgagattttcatgggaggaaagaacaccattgttttgcacaatacttgtgaggattctcttttggctgctccaattatcttggatttggtccttcttgctgaactcagtacccgcattcagctcaaagctgaaggagagggtaagttccactccttccaccccgtggctactatcctcagctaccttaccaaggctcctctggtaccaccaggtacaccagtggtgaatgcactctcaaagcagagggcaatgcttgagaacatattgagggcttgtgttggacttgcaccagagaacaacatgattctggaatacaaatgaagatcggaaaggactcaagaagctgtacggcagaagaaccataattgtcttactcaagaagctgtgcagcagatgaaccataattgtctttcttttctttagtatttgtaatctttatctttcattagtactatgatattagctaaatgttggcagcccttcgaggtatagctgttttttaatggcaggccaagttgaatgtcatcataatttctttgttgtctttgtatgttggccttctatttacaatgttgtatccgtgttgctcttgctcatttagagatagcaacgcttttctcaattggaaatacaatgtgtagtcctttagacgtc

SEQ ID NO: 142876 - protein, 510 aa, Nicotiana tabacum
MFIENFKVESPNVKYTESEIHSVYDYQTTELVHEEKNGTYQWTVKPKTVKYEFKTDVHVPKLGVMLVGWGGNNGSTLTGGVIANREGISWATKDKVQQANYFGSLTQASTIRVGSFNGEEIYAPFKSLLPMVNPDDVVFGGWDISGMNLADAMARAKVFDIDLQKQLRPYMESMVPLPGIYDPDFIAANQGSRANNVIKGTKKEQIDQIIKDIREFKEKNKVDKVVVLWTANTERYSNVVVGLNDTMENLFASVDRNEAEISPSTLYAIACILENVPFINGSPQNTFVPGLIDLAIKRNTLIGGDDFKSGQTKMKSVLVDFLVGAGIKPTSIVSYNHLGNNDGMNLSAPQTFRSKEISKSNVVDDMVSSNAILYEPGEHPDHVVVIKYVPYVGDSKRAMDEYTSEIFMGGKNTIVLHNTCEDSLLAAPIILDLVLLAELSTRIQLKAEGEGKFHSFHPVATILSYLTKAPLVPPGTPVVNALSKQRAMLENILRACVGLAPENNMILEYK

SEQ ID NO: 142877 - DNA, 1538 bp, Triticum aestivum
  CDS (1)..(1533)
atgttcatcgagagcttcaaagttgagagcccaaacgtgaagtacacagagaacgagatccattctgtgtacgattacgaaaccacggaggtcgtccatgagaaccgtaacggcacttaccaatgggtcgtcaagcccaaaaccgtcaaatacgatttcaaaacagacactcgcgtccccaagctaggcgttatgctcgttggatggggaggaaacaatggatcaaccttaaccgctggagtgatcgccaacaaagaagggatctcgtgggcgactaaagacaaagtgcaacaagcaaactactttggctccctcactcaagcttcttcgatccgggtgggatcttacaatggtgaagagatctacgctcctttcaagagcctcctccccatggtgaaccctgacgatgttgtgtttggtggttgggacataagcgacatgaacttagcagacgctatggctagagcaagagtccttgacattgatctccagaaacagctcaggccgtacatggagcacatggtcccactccctggtatctacgaccctgacttcatcgctgcgaatcaagggtcacgtgctaatagcgtgatcaaaggtaccaagaaagaacaagtcgaccagatcatcaaagacatgagggagtttaaggagaagaacaaggtggataagctggttgttctgtggacagccaacacagagcgttacagcgatgtggtcgtagggcttaacgacacgatggagaatctattggcttctgttgagaagaacgagtctgagatctcgccttctacgctatatgcgattgcttgtgttcttgaaggcattcctttcattaatgggagtccgcagaacacgtttgttcctggactcatcgagctggctatatcgaagaactgtttgatcggtggggatgacttcaagagtggtcagactaagatgaagtctgttttggttgatttccttgtcggagctggcatcaagcctacttcgattgtgagctataatcatttgggaaacaatgacggcatgaacctctcagcgcctcagacttttagatctaaggagatctcaaagagcaatgttgttgacgacatggtggctagtaacggtatcctctttgagcctggtgaacatcctgaccatgttgtcgtcatcaagtatgttccttatgttggggatagtaagagagccatggacgagtacacctcggagatattcatgggagggaagaatacgattgttatgcataacacttgtgaggattctcttttggctgctccaatcatcttggatcttgttcttctcgctgagctcagcaccagaatccaattcaaagctgaaggggaggggaagtttcattctttccacccagtagcaaccatactcagttacctcacaaaggcacctcttgtaccagccgggacacctgtggtgaacgctctatctaagcagagggctatgctggagaacatcctcagggcctgcgttgggcttgcgccagagaacaacatgatcttggaatacaagtgaacacg

SEQ ID NO: 142878 - protein, 510 aa, Triticum aestivum
MFIESFKVESPNVKYTENEIHSVYDYETTEVVHENRNGTYQWVVKPKTVKYDFKTDTRVPKLGVMLVGWGGNNGSTLTAGVIANKEGISWATKDKVQQANYFGSLTQASSIRVGSYNGEEIYAPFKSLLPMVNPDDVVFGGWDISDMNLADAMARARVLDIDLQKQLRPYMEHMVPLPGIYDPDFIAANQGSRANSVIKGTKKEQVDQIIKDMREFKEKNKVDKLVVLWTANTERYSDVVVGLNDTMENLLASVEKNESEISPSTLYAIACVLEGIPFINGSPQNTFVPGLIELAISKNCLIGGDDFKSGQTKMKSVLVDFLVGAGIKPTSIVSYNHLGNNDGMNLSAPQTFRSKEISKSNVVDDMVASNGILFEPGEHPDHVVVIKYVPYVGDSKRAMDEYTSEIFMGGKNTIVMHNTCEDSLLAAPIILDLVLLAELSTRIQFKAEGEGKFHSFHPVATILSYLTKAPLVPAGTPVVNALSKQRAMLENILRACVGLAPENNMILEYK

SEQ ID NO: 142879 - DNA, 2238 bp, Saccharomyces cerevisiae
  CDS (241)..(1842)
gtgaaaagtattgtctattttatcttcatccttctttcccagaatattgaacttatttaattcacatggagcagagaaagcgcacctctgcgttggcggcaatgttaatttgagacgtatataaattggagctttcgtcacctttttttggcttgttctgttgtcgggttcctaatgttagttttatccttgatttattctgtttcattcccttttttttccagtgaaaaagaagtaacaatgacagaagataatattgctccaatcacctccgttaaagtagttaccgacaagtgcacgtacaaggacaacgagctgctcaccaagtacagctacgaaaatgctgtagttacgaagacagctagtggccgcttcgatgtaacgcccactgttcaagactacgtgttcaaacttgacttgaaaaagccggaaaaactaggaattatgctcattgggttaggtggcaacaatggctccactttagtggcctcggtattggcgaataagcacaatgtggagtttcaaactaaggaaggcgttaagcaaccaaactacttcggctccatgactcaatgttctaccttgaaactgggtatcgatgcggaggggaatgacgtttatgctccttttaactctctgttgcccatggttagcccaaacgactttgtcgtctctggttgggacatcaataacgcagatctatacgaagctatgcagagaagtcaagttctcgaatatgatctgcaacaacgcttgaaggcgaagatgtccttggtgaagcctcttccttccatttactaccctgatttcattgcagctaatcaagatgagagagccaataactgcatcaatttggatgaaaaaggcaacgtaaccacgaggggtaagtggacccatctgcaacgcatcagacgcgatatccagaatttcaaagaagaaaacgcccttgataaagtaatcgttctttggactgcaaatactgagaggtacgtagaagtatctcctggtgttaatgacaccatggaaaacctcttgcagtctattaagaatgaccatgaagagattgctccttccacgatctttgcagcagcatctatcttggaaggtgtcccctatattaatggttcaccgcagaatacttttgttcccggcttggttcagctggctgagcatgagggtacattcattgcgggagacgatctcaagtcgggacaaaccaagttgaagtctgttctggcccagttcttagtggatgcaggtattaaaccggtctccattgcatcctataaccatttaggcaataatgacggttataacttatctgctccaaaacaatttaggtctaaggagatttccaaaagttctgtcatagatgacatcatcgcgtctaatgatatcttgtacaatgataaactgggtaaaaaagttgaccactgcattgtcatcaaatatatgaagcccgtcggggactcaaaagtggcaatggacgagtattacagtgagttgatgttaggtggccataaccggatttccattcacaatgtttgcgaagattctttactggctacgcccttgatcatcgatcttttagtcatgactgagttttgtacaagagtgtcctataagaaggtggacccagttaaagaagatgctggcaaattcgagaacttttatccagttttaaccttcttgagttactggttaaaagctccattaacaagaccaggatttcacccggtgaatggcttaaacaagcaaagaaccgccttagaaaattttttaagattgttgattggattgccttctcaaaacgaactaagattcgaagagagattgttgtaatctcatttcaacgactctctttttctttttccgcctacctataaaaaaacaagacattcaccattatcctattatcccttccatcaatacatatacttaacataacgtttataaaaattcaactatcaacagtctttatattttttttttttcttttgaactattgcctctttgtcacttcgtcttaaaggggcgttttttatttttttttttttttttcagttgaggtagatgcgagaaagtgctgtatttattcaagggccacctcagtaaagagaagaaaagagagaaaaaaaaaaagaaggtggtgtatgtgcgaccactcaacaaggcccagtgaagttaatatataacgataaaaggaggaggacgagaaagaagaagctgaaaaacaca

SEQ ID NO: 142880 - protein, 533 aa, Saccharomyces cerevisiae
MTEDNIAPITSVKVVTDKCTYKDNELLTKYSYENAVVTKTASGRFDVTPTVQDYVFKLDLKKPEKLGIMLIGLGGNNGSTLVASVLANKHNVEFQTKEGVKQPNYFGSMTQCSTLKLGIDAEGNDVYAPFNSLLPMVSPNDFVVSGWDINNADLYEAMQRSQVLEYDLQQRLKAKMSLVKPLPSIYYPDFIAANQDERANNCINLDEKGNVTTRGKWTHLQRIRRDIQNFKEENALDKVIVLWTANTERYVEVSPGVNDTMENLLQSIKNDHEEIAPSTIFAAASILEGVPYINGSPQNTFVPGLVQLAEHEGTFIAGDDLKSGQTKLKSVLAQFLVDAGIKPVSIASYNHLGNNDGYNLSAPKQFRSKEISKSSVIDDIIASNDILYNDKLGKKVDHCIVIKYMKPVGDSKVAMDEYYSELMLGGHNRISIHNVCEDSLLATPLIIDLLVMTEFCTRVSYKKVDPVKEDAGKFENFYPVLTFLSYWLKAPLTRPGFHPVNGLNKQRTALENFLRLLIGLPSQNELRFEERLL

SEQ ID NO: 142881 - DNA, 1533 bp, Arabidopsis thaliana
  CDS (1)..(1533)
atgttcatcgagagcttcaaagtagagagtccaaatgtcaaatacacagagaatgagatcaattcggtgtacgattacgaaacaacagaggtcgtccacgagaatcgtaacggtacatatcaatgggtcgtgaagccaaagactgtcaaatacgatttcaaaacagacactcgtgtccccaaattaggggttatgcttgttggttggggaggaaacaatggatcaacactaaccgctggtgtcattgctaacaaagaaggaatatcgtgggcgactaaagacaaagtgcaacaagctaattactttggttcacttactcaagcttcatcgattcgtgttggctcttacaatggtgaagagatctatgctcctttcaagagtcttcttccaatggtgaatccagaggatgttgtgtttggtggttgggatataagtgacatgaatttagcagacgctatggctagagctagagttcttgatattgatctgcagaaacaacttagaccttacatggagaacatgatcccacttcctggtatctatgaccctgatttcatcgctgctaatcaaggttcacgtgctaatagcgtgatcaaaggtaccaagaaggaacaagttgatcacatcatcaaggacatgagggagtttaaggagaagaacaaagtggataagttggttgtgttatggactgcaaacacagagcgttatagcaatgtgattgtaggacttaacgatacgacggagaatctattggcttctgttgaaaaggacgagtctgagatctcgccgtctacgttgtatgcgattgcttgtgttcttgaaggcattcctttcatcaatgggagtcctcagaatacttttgtccccggtcttatcgaattggctatatcgaagaattgtttgattggtggggatgatttcaagagtggtcagactaagatgaaatccgttttggttgatttccttgttggagctggcattaagcctacttcgattgtgagctataatcatttgggaaacaacgacgggatgaacctctcagcgccacagactttccgctctaaggagatttcaaagagcaatgttgtagacgacatggtagctagtaatggcatcctctttgagcctggtgaacaccctgaccatgtcgttgtcatcaagtatgtgccatatgttgcggatagtaaaagagcaatggatgagtacacgtctgagatattcatgggagggaggaacactatagtgttgcataacacttgtgaggactctctcttggctgcaccaattatcttggatcttgtccttctcgctgaactcagcaccagaatccaatttaaagctgaaggagaggggaagtttcactctttccacccggtagctaccatactcagttacctcacaaaggcacctcttgtaccgcccggaacaccggtggttaacgctctgtcgaagcagcgggcaatgctggaaaacattcttagggcatgtgttgggcttgcgccagagaacaacatgatcatggagtacaagtga

SEQ ID NO: 142882 - protein, 510 aa, Arabidopsis thaliana
MFIESFKVESPNVKYTENEINSVYDYETTEVVHENRNGTYQWVVKPKTVKYDFKTDTRVPKLGVMLVGWGGNNGSTLTAGVIANKEGISWATKDKVQQANYFGSLTQASSIRVGSYNGEEIYAPFKSLLPMVNPEDVVFGGWDISDMNLADAMARARVLDIDLQKQLRPYMENMIPLPGIYDPDFIAANQGSRANSVIKGTKKEQVDHIIKDMREFKEKNKVDKLVVLWTANTERYSNVIVGLNDTTENLLASVEKDESEISPSTLYAIACVLEGIPFINGSPQNTFVPGLIELAISKNCLIGGDDFKSGQTKMKSVLVDFLVGAGIKPTSIVSYNHLGNNDGMNLSAPQTFRSKEISKSNVVDDMVASNGILFEPGEHPDHVVVIKYVPYVADSKRAMDEYTSEIFMGGRNTIVLHNTCEDSLLAAPIILDLVLLAELSTRIQFKAEGEGKFHSFHPVATILSYLTKAPLVPPGTPVVNALSKQRAMLENILRACVGLAPENNMIMEYK

SEQ ID NO: 142883 - DNA, 1533 bp, Brassica napus
  CDS (1)..(1533)
atgttcatcgagagctttaaggtagagagcccgaacgtggagtacacagagaatgagatccattccgtgtacgattacgaaaccacagaggtcgtccatgagaaccgtaacggttcttatcaatggatcgtcaagcccaaaaccatcaaatacgatttcaaaacagacactcgtgtccccaaactaggggttatgcttgttggttggggaggaaacaatggatcgactctaaccgctggtgtgatcgctaacaaagaagggatctcgtgggcgactaaagacggagtgcaacaagcaaactactttggctcgctcactcaagcgtcttcgattcgtgtcggatcttacaacggcgaagagatctacgctccattcaagagtcttctcccgatggtgaatccggacgatgttgtgtttggtggttgggacataagcgacatgaacttagcagacgctatggctagagccagagtccttgacatcgatctccagaaacagctcaggccttacatggagcacatggtcccgctccctggtatctacgaccctgacttcatcgctgccaatcaagggtcacgtgctaatagcgtgatcaaaggcacaaagaaagaacaagttgatcacatcatcaaggacatgagggagtttaaggagaagaacaaagtggataagctagttgtgttatggacagccaacacagagcgttacagcgatgtggttgtagggcttaatgatacgatggagaatctattggcttctgttgagaagaacgaggctgagatctctccctccacgctttatgcaattgcttgtgttcttgaaggcattccttttatcaacgggagtcctcagaatacttttgtcccggggcttatcgagctggctatatcgaggaactgcttgattggtggggatgacttcaagagtggtcagactaagatgaaatctgttttggtagattttctggttggagctgggatcaagcctacttcgattgtgagctataatcacttgggaaacaacgatgggatgaacctctcagcgccgcagactttcaggtccaaggagatttcaaagagtaatgttgttgatgacatggtggctagtaatggcatcctctttgagcctggtgaacatcctgaccatgttgttgtcatcaagtatgtaccatatgttgcggatagtaagagagccatggatgagtacacctcggaaatattcatgggagggaagaatacaattgtaatgcacaacacttgtgaggattctctgttggctgctccaatcatcttggatcttgttcttctcgcggaactcagcactagaatccaattcagagccaaaggagaggggaagtatcactctttccacccagtagcaaccatactcagttacctcacaaaggcacctcttgtaccccctgggacgccggtggtaaacgctctatcgaagcagagggctatgctggaaaacattcttaggggctgcgttgggcttgcgccagagaacaacatgatcttggagtacaagtga

SEQ ID NO: 142884 - protein, 510 aa, Brassica napus
MFIESFKVESPNVEYTENEIHSVYDYETTEVVHENRNGSYQWIVKPKTIKYDFKTDTRVPKLGVMLVGWGGNNGSTLTAGVIANKEGISWATKDGVQQANYFGSLTQASSIRVGSYNGEEIYAPFKSLLPMVNPDDVVFGGWDISDMNLADAMARARVLDIDLQKQLRPYMEHMVPLPGIYDPDFIAANQGSRANSVIKGTKKEQVDHIIKDMREFKEKNKVDKLVVLWTANTERYSDVVVGLNDTMENLLASVEKNEAEISPSTLYAIACVLEGIPFINGSPQNTFVPGLIELAISRNCLIGGDDFKSGQTKMKSVLVDFLVGAGIKPTSIVSYNHLGNNDGMNLSAPQTFRSKEISKSNVVDDMVASNGILFEPGEHPDHVVVIKYVPYVADSKRAMDEYTSEIFMGGKNTIVMHNTCEDSLLAAPIILDLVLLAELSTRIQFRAKGEGKYHSFHPVATILSYLTKAPLVPPGTPVVNALSKQRAMLENILRGCVGLAPENNMILEYK

SEQ ID NO: 142885 - DNA, 1533 bp, Brassica napus
  CDS (1)..(1533)
atgttcatcgagagcttcaaggtagagagcccaaacgtgaagtacacagagaacgagatccattctgtgtacgattacgaaaccaccgaggtcgtccatgagaaccgtaacggtacttaccaatgggtcgtcaagcccaaaaccgtcaaatacgatttcaaaacagacactcgtgtccccaagttaggcgtcatgctcgttggatgggaagaaaacaacggatcaaccttaaccgccggtgtgatcgccaacaaagaagggatctcttgggcgactaaagacaaagtgcaacaagcaaactactttggctccctcactcaagcttcttcgattcgggtcggatcttacaatggtgaagagatctacgctcctttcaagagtctcctccccatggtgaaccctgacgatgttgtgtttggtggttgggacataagcgacatgaacttagcagacgccatggctagagccagagttcttgacattgatctccagaaacagctcaggccttacatggagcacatggtcccactccctgggatatacgaccctgacttcatcgctgcgaatcaagggtcacgtgctaatagcgtgatcaaaggtactaagaaagaacaagtcgaccagatcatcaaggacatgagggagtttaaggagaagaacaaggtggataagctagttgtcttgtggacagccaacacagagcgttacagcgatgtggtcgtggggcttaacgacacgatggagaatctattggcttctgttgagaagaacgagtctgagatctcgccttctacgctttatgctatagcttgtgttctcgaaggcattcctttcattaatgggagtccgcagaacacgtttgttcctggactcatcgagctggctataacgaagaactgtttgatcggtggggatgatttcaagagtggtcagactaagatgaagtctgttttggttgatttccttgtcggagctggtattaagcctacttcgattgtgagctataatcatttgggaaacaatgatggcatgaacctctcggcgccgcagactttcagatccaaggagatctcaaagagtaatgtggtggacgacatggtggctagtaacggtatcctctttgagcctggtgaacaccctgaccatgttgttgtcatcaagtatgtgccttatgttggggatagtaagagagccatggacgagtacacctcagagatattcatgggagggaagaatacaattgttatgcataacacttgtgaggattctcttttggctgctccaatcatcttggatcttgttcttctcgctgagctcagcaccagaatccaattcaaagctgaaggaggggggaagtttcactctttccacccagtagctaccatactcagttacctcacaaaggcacctcttgtaccacccgggacacctgtggtgaacgctttatccaagcagagggctatgctggagaacatcctcagggcctgcgttgggcttgcgccagagaacaacatgatcttggagtacaagtga

SEQ ID NO: 142886 - protein, 510 aa, Brassica napus
MFIESFKVESPNVKYTENEIHSVYDYETTEVVHENRNGTYQWVVKPKTVKYDFKTDTRVPKLGVMLVGWEENNGSTLTAGVIANKEGISWATKDKVQQANYFGSLTQASSIRVGSYNGEEIYAPFKSLLPMVNPDDVVFGGWDISDMNLADAMARARVLDIDLQKQLRPYMEHMVPLPGIYDPDFIAANQGSRANSVIKGTKKEQVDQIIKDMREFKEKNKVDKLVVLWTANTERYSDVVVGLNDTMENLLASVEKNESEISPSTLYAIACVLEGIPFINGSPQNTFVPGLIELAITKNCLIGGDDFKSGQTKMKSVLVDFLVGAGIKPTSIVSYNHLGNNDGMNLSAPQTFRSKEISKSNVVDDMVASNGILFEPGEHPDHVVVIKYVPYVGDSKRAMDEYTSEIFMGGKNTIVMHNTCEDSLLAAPIILDLVLLAELSTRIQFKAEGGGKFHSFHPVATILSYLTKAPLVPPGTPVVNALSKQRAMLENILRACVGLAPENNMILEYK

SEQ ID NO: 142887 - DNA, 1533 bp, Glycine max
  CDS (1)..(1533)
atgttcatcgagagtttcaaggttgagagtcctaacgtgaagtacacagagactgagattcagtccgtgtacaactatgaaaccactgaacttgttcacgagaacaataatggcacttatcagtgggttgtcaagcccaaaactgtcaaatatgaatttaaaaccaacacccatgtccctaaactaggggtaatgcttgtggggtgggggggaaacaatggctcaaccctcactggtggtgttattgctaaccgagagggtatttcatgggcaacaaaggacaagattcaacaagccaattactttgggtcgctgacccaggcatcagctatcagagtggggtctttccaaggggaagaaatatatgctccattcaagagcctgcttccaatggtgaaccctgatgatgttgtgtttgggggatgggatatcagtaacttgaacctggctgatgccatggccagggccaaggtgtttgatatcgacctgcagaaacagttgaggccgtacatggaatccatggttccactccccggaatctatgacccggatttcattgctgccaaccaaggagaccgtgccactaacgtaatcaggggcacaaagaaagaacaagttcaacaaatcatcaaagacattaaggagttcaaagaaagcactaaggttgacaaggtggttgtcctgtggacagccaacacagagaggtacagcaacgtagttgtgggactaaacgacaccatggaaaacctctttgcttccttggacaggaatgaggctgagatttccccttccaccttgtatgccattgcttgtgttatggaaaatgttcctttcatcaatggaagccctcagaacacctttgtcccaggactcattgatctggccatcaaaaggaatagtttgattggaggagatgactttaagagtggtcagaccaaaatgaaatcggtgttggtggatttcctagtaggggccggcatcaagccaacatctatagtgagttacaaccatttgggaaacaatgatggcatgaatctctcagcccctcaaaccttccgctcgaagaaaatttccaagagcaatgttgttgacgatatggtcaacagcaacgccatcctctatgagcctggtgaacatccggaccatgtggttgtcattaagtatgtaccttacgttggggacagcaagagggccatggatgagtactcttctgagatattcatgggcggaaagaacacaattgtgttgcacaacacttgtgaggattcactgttagctgctcctattatcttggacttggtccttcttgctgagcttagcactcgaatcgagtttaaagctgaaaatgagggaaagttccactcattccacccagttgcgaccatcctcagttacctgaccaaggcccctctggttccaccgagtacgccagtggttaatgcactgtcaaagcagcgagctatgctggaaaacatcctaagggcttgtgttggattagctcctgagaacaacatgatcctggagtacaagtga

SEQ ID NO: 142888 - protein, 510 aa, Glycine max
MFIESFKVESPNVKYTETEIQSVYNYETTELVHENNNGTYQWVVKPKTVKYEFKTNTHVPKLGVMLVGWGGNNGSTLTGGVIANREGISWATKDKIQQANYFGSLTQASAIRVGSFQGEEIYAPFKSLLPMVNPDDVVFGGWDISNLNLADAMARAKVFDIDLQKQLRPYMESMVPLPGIYDPDFIAANQGDRATNVIRGTKKEQVQQIIKDIKEFKESTKVDKVVVLWTANTERYSNVVVGLNDTMENLFASLDRNEAEISPSTLYAIACVMENVPFINGSPQNTFVPGLIDLAIKRNSLIGGDDFKSGQTKMKSVLVDFLVGAGIKPTSIVSYNHLGNNDGMNLSAPQTFRSKKISKSNVVDDMVNSNAILYEPGEHPDHVVVIKYVPYVGDSKRAMDEYSSEIFMGGKNTIVLHNTCEDSLLAAPIILDLVLLAELSTRIEFKAENEGKFHSFHPVATILSYLTKAPLVPPSTPVVNALSKQRAMLENILRACVGLAPENNMILEYK

SEQ ID NO: 142889 - DNA, 1533 bp, Glycine max
  CDS (1)..(1533)
atgttcatcgagaattttaaggttgagtgtcctaatgtgaagtacaccgagactgaggttcagtccgtgtacaactacgaaaccaccgaacttgttcacgagaacaggaatggcacctatcagtggattgtcaaacccaaatctgtcaaatacgaatttaaaaccaacatccatgttcctaaattaggggtaatgcttgtgggttggggtggaaacaacggctcaaccctcaccggtggtgttattgctaaccgagagggcatttcatgggctacaaaggacaagattcaacaagccaattactttggctccctcacccaagcctcagctatccgagttgggtccttccagggagaggaaatctatgccccattcaagagcctgcttccaatggttaaccctgacgacattgtgtttgggggatgggatatcagcaacatgaacctggctgatgccatggccagggcaaaggtgtttgacatcgatttgcagaagcagttgaggccttacatggaatccatgcttccactccccggaatctatgacccggatttcattgctgccaaccaagaggagcgtgccaacaacgtcatcaagggcacaaagcaagagcaagttcaacaaatcatcaaagacatcaaggcgtttaaggaagccaccaaagtggacaaggtggttgtactgtggactgccaacacagagaggtacagtaatttggttgtgggccttaatgacaccatggagaatctcttggctgctgtggacagaaatgaggctgagatttctccttccaccttgtatgccattgcttgtgttatggaaaatgttcctttcattaatggaagccctcagaacacttttgtaccagggctgattgatcttgccatcgcgaggaacactttgattggtggagatgacttcaagagtggtcagaccaaaatgaaatctgtgttggttgatttccttgtgggggctggtatcaagccaacatctatagtcagttacaaccatctgggaaacaatgatggtatgaatctttcggctccacaaactttccgttccaaggaaatctccaagagcaacgttgttgatgatatggtcaacagcaatgccatcctctatgagcctggtgaacatccagaccatgttgttgttattaagtatgtgccttacgtaggggacagcaagagagccatggatgagtacacttcagagatattcatgggtggaaagagcaccattgttttgcacaacacatgcgaggattccctcttagctgctcctattatcttggacttggtccttcttgctgagctcagcactagaatcgagtttaaagctgaaaatgagggaaaattccactcattccacccagttgctaccatcctcagctacctcaccaaggctcctctggttccaccgggtacaccagtggtgaatgcattgtcaaagcagcgtgcaatgctggaaaacataatgagggcttgtgttggattggccccagagaataacatgattctcgagtacaagtga

SEQ ID NO: 142890 - protein, 510 aa, Glycine max
MFIENFKVECPNVKYTETEVQSVYNYETTELVHENRNGTYQWIVKPKSVKYEFKTNIHVPKLGVMLVGWGGNNGSTLTGGVIANREGISWATKDKIQQANYFGSLTQASAIRVGSFQGEEIYAPFKSLLPMVNPDDIVFGGWDISNMNLADAMARAKVFDIDLQKQLRPYMESMLPLPGIYDPDFIAANQEERANNVIKGTKQEQVQQIIKDIKAFKEATKVDKVVVLWTANTERYSNLVVGLNDTMENLLAAVDRNEAEISPSTLYAIACVMENVPFINGSPQNTFVPGLIDLAIARNTLIGGDDFKSGQTKMKSVLVDFLVGAGIKPTSIVSYNHLGNNDGMNLSAPQTFRSKEISKSNVVDDMVNSNAILYEPGEHPDHVVVIKYVPYVGDSKRAMDEYTSEIFMGGKSTIVLHNTCEDSLLAAPIILDLVLLAELSTRIEFKAENEGKFHSFHPVATILSYLTKAPLVPPGTPVVNALSKQRAMLENIMRACVGLAPENNMILEYK

SEQ ID NO: 142891 - DNA, 1533 bp, Glycine max
  CDS (1)..(1533)
atgttcatcgagaattttaaggtagagagtcctaatgtgaagcacaccgagactgagattcagtccgtgcacaactacgaaaccaccgaacttgttcacgagaacaggaatggcacctatcagtggattgtcaaacccaaatccgtcaactaccaatttaaaaccaacacccatgttccaaaattgggggtgatgcttgtgggttggggtggaaacaacggctctaccctcaccggtggtgttattgctaacagagagggcatttcatgggctacaaaggacaagattcaacaagccaattactttggctccctcacccaagcctcagctattcgagttggatccttccagggagaggaaatctatgccccattcaagagtctgcttccaatggttaatcctgacgacattgtgtttgggggatgggatatcagcaacatgaacctggctgatgccatggccagggcaaaggtgtttgacatcgatttgcagaagcagttgaggccttacatggaatccatggttccactccccggaatctacgacccggatttcattgctgccaaccaagaggagcgtgccaacaacgtgattaagggcacaaagcaagagcaagttcagcaaatcatcaaagacatcaaggcgtttaaggaagccaccaaagtggacaaggtggttgtcctgtggactgccaacacagagaggtatagcaatttggttgtaggccttaatgacaccatggagaatctcttggctgctgtggacagaaatgaggctgagatttctccttccaccttgtatgccattgcctgtgtgatggaaaatgttcctttcattaatggaagccctcagaacacttttgtaccagggctgattgatcttgccatcgcgaggaacactttgattggtggagatgacttcaagagtggtcagaccaaaatgaaatctgtgttggttgattttcttgtgggggctggtatcaagccaacatctatagttagttacaaccatctgggaaacaatgatggtatgaatctctcggctccacaaaccttccgctccaaggaaatctccaagagcaacgttgttgacgatatggtcaacagcaatgccatcctctatgagcctggtgaacatcccgaccatgttgttgttattaagtatgtgccttacgtaggggatagcaagagagccatggatgagtacacttcagagatattcatgggtggaaagaacaccattgttttgcacaacacatgtgaggattcccttttagctgctcctattatcttggacttggtccttcttgctgagctgagcactagaatccagtttaaagctgaaaatgagggaaaattccactcattccacccagttgctaccattctcagctatctgaccaaggctcctctggttccaccgggtacaccagtggtgaatgcattgtcaaagcagcgtgcaatgctggaaaacataatgagggcttgtgttggattggccccagagaataacatgattctcgagtacaagtga

SEQ ID NO: 142892 - protein, 510 aa, Glycine max
MFIENFKVESPNVKHTETEIQSVHNYETTELVHENRNGTYQWIVKPKSVNYQFKTNTHVPKLGVMLVGWGGNNGSTLTGGVIANREGISWATKDKIQQANYFGSLTQASAIRVGSFQGEEIYAPFKSLLPMVNPDDIVFGGWDISNMNLADAMARAKVFDIDLQKQLRPYMESMVPLPGIYDPDFIAANQEERANNVIKGTKQEQVQQIIKDIKAFKEATKVDKVVVLWTANTERYSNLVVGLNDTMENLLAAVDRNEAEISPSTLYAIACVMENVPFINGSPQNTFVPGLIDLAIARNTLIGGDDFKSGQTKMKSVLVDFLVGAGIKPTSIVSYNHLGNNDGMNLSAPQTFRSKEISKSNVVDDMVNSNAILYEPGEHPDHVVVIKYVPYVGDSKRAMDEYTSEIFMGGKNTIVLHNTCEDSLLAAPIILDLVLLAELSTRIQFKAENEGKFHSFHPVATILSYLTKAPLVPPGTPVVNALSKQRAMLENIMRACVGLAPENNMILEYK

SEQ ID NO: 142893 - DNA, 1533 bp, Zea mays
  CDS (1)..(1533)
atgttcatcgagagcttccgcgtcgagagcccccacgtgcggtacggcccgatggagatcgagtcggagtaccggtacgacacgacggagctggtacacgagggcaaggacggcgcctcacgctgggtcgtccgccccaagtccgtcaagtacaacttccggaccagaaccgccgtccccaagctcggggtgatgcttgtggggtggggaggcaacaacgggtccacgctgacggctggggtcattgccaacagggaggggatctcatgggcgaccaaggacaaggtgcagcaagccaactactacggctccctcacccaggcctccaccatcagagtcggcagctacaacggggaggagatctatgcgccgttcaagagcctccttcccatagtgaacccagacgacattgtgttcggaggctgggacattagcaacatgaacctggccgactccatgaccagggccaaggtgctggatattgacctgcagaagcagctcaggccctacatggagtccatggtgccacttcccggtatctatgatccggacttcatcgcggctaaccagggctctcgcgccaacagtgtcatcaagggcaccaagaaagaacaggtggagcagatcatcaaggatatcagggagtttaaggagaagaacaaagtggacaagatagttgtgttgtggactgcaaacactgaaaggtatagcaatgtgtgcgctggtctcaacgacacgatggagaatctactggcatctgtggacaagaacgaggcggaggtatcaccatcaacactatatgccattgcctgtgtcatggagggggtgccgttcatcaatgggagcccccagaacacctttgtgcctgggctgattgatcttgctataaaaaacaactgcttgattggtggtgacgacttcaagagtggacagaccaagatgaaatctgtcttggtcgatttccttgttggtgctggaataaagcccacctcaatcgtgagctacaaccacttgggaaacaacgatggcatgaacctgtctgcccctcaaacattcaggtccaaggagatctccaagagcaacgtggtggatgacatggtctcgagcaatgccatcctctatgagcccggcgagcatcccgatcatgtcgttgtcatcaagtatgtgccgtacgtgggagacagcaagagggctatggacgagtacacctcagagatcttcatgggcggcaagaacaccatcgtgctgcacaacacctgtgaggactcgctcctcgccgcacctatcatccttgatctggtgctcttggctgagctcagcaccaggatccagctgaaagctgagggagaggacaaattccactccttccacccggtggccaccatcctgagctacctcaccaaggcacccctggttccccctggcacaccggtggtgaacgctctggccaagcagagggcgatgctggagaacatcatgagggcctgcgttgggctggccccagagaacaacatgatcctggagtacaagtga

SEQ ID NO: 142894 - protein, 510 aa, Zea mays
MFIESFRVESPHVRYGPMEIESEYRYDTTELVHEGKDGASRWVVRPKSVKYNFRTRTAVPKLGVMLVGWGGNNGSTLTAGVIANREGISWATKDKVQQANYYGSLTQASTIRVGSYNGEEIYAPFKSLLPIVNPDDIVFGGWDISNMNLADSMTRAKVLDIDLQKQLRPYMESMVPLPGIYDPDFIAANQGSRANSVIKGTKKEQVEQIIKDIREFKEKNKVDKIVVLWTANTERYSNVCAGLNDTMENLLASVDKNEAEVSPSTLYAIACVMEGVPFINGSPQNTFVPGLIDLAIKNNCLIGGDDFKSGQTKMKSVLVDFLVGAGIKPTSIVSYNHLGNNDGMNLSAPQTFRSKEISKSNVVDDMVSSNAILYEPGEHPDHVVVIKYVPYVGDSKRAMDEYTSEIFMGGKNTIVLHNTCEDSLLAAPIILDLVLLAELSTRIQLKAEGEDKFHSFHPVATILSYLTKAPLVPPGTPVVNALAKQRAMLENIMRACVGLAPENNMILEYK

SEQ ID NO: 142895 - DNA, 1533 bp, Helianthus annuus
  CDS (1)..(1533)
atgtttatcgagagctttaaggttgaaagccccaatgtcaagtacagtgaggatgaaattcactctttgtacaattacgacaccacggagcttgttcacgaggagaaaaacggtgcttatcaatgggttgttaagccaaaaactgttaaatacgagtttaaaacccaaactaatgttcctaagctaggggttatgcttgttggatggggaggcaacaatgggtctaccctaactgcgggtgttatcgccaatcgggagggaatctcttgggcaactaaagaaaaggtgcaacaagccaactactttggttctctgactcaagcatcaaccataagagttgggtcatttaatggagaggagatctatgcccctttcaagagcctcctccctatggtgaacccagatgacatagtgtttgggggatgggacataagcagcatgaacttggctgattccatggccagagccaaggtgttggacattgatctccagaagcagttaaggccttacatggagtccatggtcccactccctggtgtctttgacccggacttcatcgcagccaaccaaggcgagcgtgctgacaatgtcatcaagggaaccaaaaacgaacagatccaaaagatcattaaggacatcagggagtttaaggaggctaacaaggtagacaaagtggtggtactctggactgcaaacaccgaaagatacagcaatgtaatggtcgggcttaatgacacaatggaaagcctgtttgcatcattggacagaaatgaggcagagatttcaccatccaccttgtatgctattgcttgcattcttgaaaatgtgcctttcattaatggcagcccacaaaacacttttgtaccaggggttattgatttggctatcaagagaaacagcttgattggtggtgatgactttaaaagtggtcaaaccaagatgaagtctgttcttgttgacttccttgttggagctggcattaagccaacatcaattgtgagctacaatcacttgggaaacaacgacggaatgaacctctcggccccacagacattcagatccaaggagatctccaagagcaatgttgttgatgacatggtttcaagcaacgccatcttgtacgagcccggggagcatcccgaccatgtggtcgtcatcaagtacgtgccatacgtcggagacagcaagagagcaatggacgagtacacgtctgagatattcatgggcggtaaaagcacaatcgtcctacacaacacatgtgaggactctctgttggccgctccaatcatcttggacttggtcctccttgctgagctcagtacccgcatccaacttaaagctgaaaccgagggtaagttccattcgttccatccggtggctacgattctgagctaccttacaaaggcccctctggtgccgccgggtacaccagtggtgaatgcgctagcgaagcagagggcgatgctcgagaacataatgagggcatgtgttggattggcaccagaaaacaacatgatcttggagtacaagtga

SEQ ID NO: 142896 - protein, 510 aa, Helianthus annuus
MFIESFKVESPNVKYSEDEIHSLYNYDTTELVHEEKNGAYQWVVKPKTVKYEFKTQTNVPKLGVMLVGWGGNNGSTLTAGVIANREGISWATKEKVQQANYFGSLTQASTIRVGSFNGEEIYAPFKSLLPMVNPDDIVFGGWDISSMNLADSMARAKVLDIDLQKQLRPYMESMVPLPGVFDPDFIAANQGERADNVIKGTKNEQIQKIIKDIREFKEANKVDKVVVLWTANTERYSNVMVGLNDTMESLFASLDRNEAEISPSTLYAIACILENVPFINGSPQNTFVPGVIDLAIKRNSLIGGDDFKSGQTKMKSVLVDFLVGAGIKPTSIVSYNHLGNNDGMNLSAPQTFRSKEISKSNVVDDMVSSNAILYEPGEHPDHVVVIKYVPYVGDSKRAMDEYTSEIFMGGKSTIVLHNTCEDSLLAAPIILDLVLLAELSTRIQLKAETEGKFHSFHPVATILSYLTKAPLVPPGTPVVNALAKQRAMLENIMRACVGLAPENNMILEYK

SEQ ID NO: 142897 - DNA, 1533 bp, Brassica napus
  CDS (1)..(1533)
atgttcatcgagagcttcaaagtcgagagcccgaacgtgaagtacacggagaatgagattcattcggtgtacgattacgagaccacggaggtcgttcacgagaacgtcaacggtgcttaccagtggatcgtgaagcccaaggttgtcaaatacgatttcaaaaccgacactcgtgtccccaaattaggggttatgcttgttggttggggaggaaacaatggatcaaccctcaccgctggtgtaattgccaataaagaaggaatctcgtgggcgaccaaggacaaggtgcaacaagcgaactacttcgggtcgttaacacaagcatcgtctattcgtgtcggatcctttaacggtgaagagatctatgcccctttcaagagtctcgttccaatggtgaatccggatgatgttgtgtttggaggatgggacataagcgatatgaatttagcagacgcgatgggtagagccaaggttcttgacattgatctgcagaaacagctcaggccttacatggagaacattgtcccactccctgggatctacgaccctgatttcatcgctgccaatcaaggctcacgtgccaacaacgtgatcaaaggtaccaagaaggaacaagtcgaccaaatcatcaaggacatgagggagtttaaggagaagaacaaggtggataaggttgtggttctgtggacggctaacacagagcgttacagcaatgtgatcgtggggctaaacgacacgatggagaatcttatgaactccgtggatagggatgagtccgagatctctccttccacgctttatgctattgcatgtgttcttgaaggtattcctttcatcaatggaagccctcagaacacctttgttccgggtcttattgatttggctatcaagaacaatgttttgatcggtggagatgacttcaagagtggtcaaaccaaaatgaaatccgtcttggttgatttccttgttggtgcaggcatcaagcctacttcaatagtgagctacaatcacctagggaacaacgatggaatgaacctctcagctccacagacattcagatctaaggagatctccaaaagcaatgtggtggacgatatggttgctagcaacggtatcctcttcgagcccggggaacatccagaccatgtagttgtcatcaagtatgtaccgtatgttgcagatagcaagcgagccatggatgagtatacatcagagatattcatgggaggcaagaacacaattgtgatgcacaatacctgcgaggactctctcttagctgctccaattatcttggatcttgttctcctcgctgaactcagcaccaggattcagttcaaatccgagaaagaggggaagtttcattctttccatcctgtggccaccatacttagctatctcaccaaggcaccgctcgtgccgccgggaacaccggtggttaatgcgctgtcgaagcagcgggctatgctggagaatattcttagggcgtgtgttgggctggcgccggagaacaatatgatcttggaatacaagtga

SEQ ID NO: 142898 - protein, 510 aa, Brassica napus
MFIESFKVESPNVKYTENEIHSVYDYETTEVVHENVNGAYQWIVKPKVVKYDFKTDTRVPKLGVMLVGWGGNNGSTLTAGVIANKEGISWATKDKVQQANYFGSLTQASSIRVGSFNGEEIYAPFKSLVPMVNPDDVVFGGWDISDMNLADAMGRAKVLDIDLQKQLRPYMENIVPLPGIYDPDFIAANQGSRANNVIKGTKKEQVDQIIKDMREFKEKNKVDKVVVLWTANTERYSNVIVGLNDTMENLMNSVDRDESEISPSTLYAIACVLEGIPFINGSPQNTFVPGLIDLAIKNNVLIGGDDFKSGQTKMKSVLVDFLVGAGIKPTSIVSYNHLGNNDGMNLSAPQTFRSKEISKSNVVDDMVASNGILFEPGEHPDHVVVIKYVPYVADSKRAMDEYTSEIFMGGKNTIVMHNTCEDSLLAAPIILDLVLLAELSTRIQFKSEKEGKFHSFHPVATILSYLTKAPLVPPGTPVVNALSKQRAMLENILRACVGLAPENNMILEYK

SEQ ID NO: 142899 - DNA, 1533 bp, Brassica napus
  CDS (1)..(1533)
atgttcatcgagagctttaaggtagagagtccgaacgtgaagtacacagagaatgagatccattctgtgtacgattacgaaaccacagaggtcgtccacgagaaccgtaacggttcttatcaatggatcgtcaagcccaaaaccgtccaatacgatttcaaaacagacactcgtgtccccaagctaggggttatgcttgttggttggggaggaaacaatggatcgactctaaccgctggtgtgatcgctaacaaagaagggatctcgtgggcgactaaggacggagtgcaacaagcgaactactttggctcactcacgcaagcgtcttcgattcgtgtcggatcttacaacggcgaagagatctacgctcctttcaagagtcttctcccaatggtgaatccagacgacgttgtgtttggtggttgggacattagcgacatgaacttagcagacgctatggctagagctagagtccttgacatcgatctccagaaacagcttaggccttacatggagcacatggtcccgctccctggtatctacgaccctgacttcatcgctgcgaatcaagggtcacgtgctaatagcgtgatcaaaggtacaaagaaagaacaagttgatcacatcatcaaggacatgagggagtttaaggagaagaacaaagtggataaggtagttgtgttatggacagccaacacagagcgttacagcgatgtggttgtagggcttaatgatacgatggagaatctattggcttctgttgagaagaacgaggctgagatctctccctccacgctttatgcaattgcttgtgttcttgaaggcattccttttatcaacgggagtcctcagaatacttttgtcccggggcttatcgagctggctatatcgaggaactgcttgattggtggggatgacttcaagagtggtcagactaagatgaaatctgttttggtagattttctggttggagctgggatcaagcctacttcgattgtgagctataatcacttgggaaacaacgatgggatgaacctctcagcgccgcagactttcaggtccaaggagatttcaaagagtaatgttgttgatgacatggtggctagtaatggcatcctctttgagcctggtgaacatcctgaccatgttgttgtcatcaagtatgtaccatatgttgcggatagtaagagagccatggatgagtacacctcggaaatattcatgggagggaagaatacaattgtaatgcacaacacttgtgaggattctctgttggctgctccaatcatcttggatcttgttcttctcgcggaactcagcactagaatccaattcagagccaaaggagaggggaagtatcactctttccacccagtagcaaccatactcagttacctcacaaaggcacctcttgtaccccctgggacgccggtggtaaacgctctatcgaagcagagggctatgctggaaaacattcttagggcctgcgttgggcttgccccagagaacaacatgatcttggagtacaagtga

SEQ ID NO: 142900 - protein, 510 aa, Brassica napus
MFIESFKVESPNVKYTENEIHSVYDYETTEVVHENRNGSYQWIVKPKTVQYDFKTDTRVPKLGVMLVGWGGNNGSTLTAGVIANKEGISWATKDGVQQANYFGSLTQASSIRVGSYNGEEIYAPFKSLLPMVNPDDVVFGGWDISDMNLADAMARARVLDIDLQKQLRPYMEHMVPLPGIYDPDFIAANQGSRANSVIKGTKKEQVDHIIKDMREFKEKNKVDKVVVLWTANTERYSDVVVGLNDTMENLLASVEKNEAEISPSTLYAIACVLEGIPFINGSPQNTFVPGLIELAISRNCLIGGDDFKSGQTKMKSVLVDFLVGAGIKPTSIVSYNHLGNNDGMNLSAPQTFRSKEISKSNVVDDMVASNGILFEPGEHPDHVVVIKYVPYVADSKRAMDEYTSEIFMGGKNTIVMHNTCEDSLLAAPIILDLVLLAELSTRIQFRAKGEGKYHSFHPVATILSYLTKAPLVPPGTPVVNALSKQRAMLENILRACVGLAPENNMILEYK

SEQ ID NO: 142901 - DNA, 1533 bp, Brassica napus
  CDS (1)..(1533)
atgttcatcgagagcttcaaggtagagagcccaaacgtgaagtacacagagaacgagatccattctgtgtacgattacgaaaccaccgaggtcgtccatgagaaccgtaacggtacttaccaatgggtcgtcaagcccaaaaccgtcaaatacgatttcaaaacagacactcgtgtccccaagttaggcgtcatgctcgttggatggggaggaaacaacggatcaaccttaaccgccggtgtgatcgccaacaaagaagggatctcttgggcgactaaagacaaagtgcaacaagcaaactactttggctccctcactcaagcttcttcgattcgggtcggatcttacaatggtgaagagatctacgctcctttcaagagtctcctccccatggtgaaccctgacgatgttgtgtttggtggttgggacataagcgacatgaacttagcagacgccatggctagagccagagttcttgacattgatctccagaaacagctcaggccttacatggagcacatggtcccactccctgggatatacgaccctgacttcatcgctgcgaatcaagggtcacgtgctaatagcgtgatcaaaggtactaagaaagaacaagtcgaccagatcatcaaggacatgagggagtttaaggagaagaacaaggtggataagctagttgtcttgtggacagccaacacagagcgttacagcgatgtggtcgtggggcttaacgacacgatggagaatctattggcttctgttgagaagaacgagtctgagatctcgccttctacgctttatgctatagcttgtgttctcgaaggcattcctttcattaatgggagtccgcagaacacgtttgttcctggactcatcgagctggctataacgaagaactgtttgatcggtggggatgatttcaagagtggtcagactaagatgaagtctgttttggttgatttccttgtcggagctggcatcaagcctacttcgattgtgagctataatcatttgggaaacaatgacggcatgaacctctcagcgccgcagactttcagatccaaggagatctcaaagagcaatgtggtggacgacatggtggctagtaacggtatcctctttgagcctggtgaacaccctgaccatgttgttgtcatcaagtatgtgccttatgttggggatagtaagagagccatggacgagtacacctcagagatattcatgggagggaagaatacaattgttatgcataacacttgtgaggattctcttttggctgctccaatcatcttggatcttgttcttctcgctgagctcagcaccagaatccaattcaaagctgaaggagaggggaagtttcactctttccacccagtagctaccatactcagttacctcacaaaggcacctcttgtaccacccgggacacctgtggtgaacgctttatccaagcagagggctatgctggagaacatcctcagggcctgcgttgggcttgcgccagagaacaacatgatcttggagtacaagtga

SEQ ID NO: 142902 - protein, 510 aa, Brassica napus
MFIESFKVESPNVKYTENEIHSVYDYETTEVVHENRNGTYQWVVKPKTVKYDFKTDTRVPKLGVMLVGWGGNNGSTLTAGVIANKEGISWATKDKVQQANYFGSLTQASSIRVGSYNGEEIYAPFKSLLPMVNPDDVVFGGWDISDMNLADAMARARVLDIDLQKQLRPYMEHMVPLPGIYDPDFIAANQGSRANSVIKGTKKEQVDQIIKDMREFKEKNKVDKLVVLWTANTERYSDVVVGLNDTMENLLASVEKNESEISPSTLYAIACVLEGIPFINGSPQNTFVPGLIELAITKNCLIGGDDFKSGQTKMKSVLVDFLVGAGIKPTSIVSYNHLGNNDGMNLSAPQTFRSKEISKSNVVDDMVASNGILFEPGEHPDHVVVIKYVPYVGDSKRAMDEYTSEIFMGGKNTIVMHNTCEDSLLAAPIILDLVLLAELSTRIQFKAEGEGKFHSFHPVATILSYLTKAPLVPPGTPVVNALSKQRAMLENILRACVGLAPENNMILEYK

SEQ ID NO: 142903 - DNA, 1533 bp, Brassica napus
  CDS (1)..(1533)
atgttcatcgagagcttcaaggtagagagcccaaacgtgaagtacacagagaacgagatccattctgtgtacgattacgaaaccaccgaggtcgtccatgagaaccgtaacggtacttaccaatgggtcgtcaagcccaaaaccgtcaaatacgatttcaaaacagacactcgtgtccccaagttaggcgtcatgctcgttggatggggaggaaacaacggatcaaccttaaccgccggtgtgatcgccaacaaagaagggatctcttgggcgactaaagacaaagtgcaacaagcaaactactttggctccctcactcaagcttcttcgattcgggtcggatcttacaatggtgaagagatctacgctcctttcaagagtctcctccccatggtgaaccctgacgatgttgtgtttggtggttgggacataagcgacatgaacttagcagacgccatggctagagccagagttcttgacattgatctccagaaacagctcaggccttacatggagcacatggtcccactccctgggatatacgaccctgacttcatcgctgcgaatcaagggtcacgtgctaatagcgtgatcaaaggtactaagaaagaccgggtcgaccagatcatcaaggacatgagggagtttaaggagaagaacaaggtggataagctagttgtcttgtggacagccaacacagagcgttacagcgatgtggtcgtggggcttaacgacacgatggagaatctattggcttctgttgagaagaacgagtctgagatctcgccttctacgctttatgctatagcttgtgttctcgaaggcattcctttcattaatgggagtccgcagaacacgtttgttcctggactcatcgagctggctataacgaagaactgtttgatcggtggggatgatttcaagagtggtcagactaagatgaagtctgttttggttgatttccttgtcggagctggtattaagcctacttcgattgtgagctataatcatttgggaaacaatgatggcatgaacctctcggcgccgcagactttcagatccaaggagatctcaaagagtaatgtggtggacgacatggtggctagtaacggtatcctctttgagcctggtgaacaccctgaccatgttgttgtcatcaagtatgtgccttatgttggggatagtaagagagccatggacgagtacacctcagagatattcatgggagggaagaatacaattgttatgcataacacttgtgaggattctcttttggctgctccaatcatcttggatcttgttcttctcgctgagctcagcaccagaatccaattcaaagctgaaggagaggggaagtttcactctttccacccagtagctaccatactcagttacctcacaaaggcacctcttgtaccacccgggacacctgtggtgaacgctttatccaagcagagggctatgctggagaacatcctcagggcctgcgttgggcttgcgccagagaacaacatgatcttggagtacaagtga

SEQ ID NO: 142904 - protein, 510 aa, Brassica napus
MFIESFKVESPNVKYTENEIHSVYDYETTEVVHENRNGTYQWVVKPKTVKYDFKTDTRVPKLGVMLVGWGGNNGSTLTAGVIANKEGISWATKDKVQQANYFGSLTQASSIRVGSYNGEEIYAPFKSLLPMVNPDDVVFGGWDISDMNLADAMARARVLDIDLQKQLRPYMEHMVPLPGIYDPDFIAANQGSRANSVIKGTKKDRVDQIIKDMREFKEKNKVDKLVVLWTANTERYSDVVVGLNDTMENLLASVEKNESEISPSTLYAIACVLEGIPFINGSPQNTFVPGLIELAITKNCLIGGDDFKSGQTKMKSVLVDFLVGAGIKPTSIVSYNHLGNNDGMNLSAPQTFRSKEISKSNVVDDMVASNGILFEPGEHPDHVVVIKYVPYVGDSKRAMDEYTSEIFMGGKNTIVMHNTCEDSLLAAPIILDLVLLAELSTRIQFKAEGEGKFHSFHPVATILSYLTKAPLVPPGTPVVNALSKQRAMLENILRACVGLAPENNMILEYK

SEQ ID NO: 142905 - DNA, 1533 bp, Glycine max
  CDS (1)..(1533)
atgttcatcgagagtttcaaggttgagagtcctaacgtgaagtacacagagactgagattcagtccgtgtacaactatgaaaccactgaacttgttcacgagaacaataatggcacttatcagtgggttgtcaagcccaaaactgtcaaatatgaatttaaaaccaacacccatgtccctaaactaggggtaatgcttgtggggtgggggggaaacaatggctcaaccctcactggtggtgttattgctaaccgagagggtatttcatgggcaacaaaggacaagattcaacaagccaattactttgggtcgctgacccaggcatcagctatcagagtggggtctttccaaggggaagaaatatatgctccattcaagagcctgcttccaatggtgaaccctgatgatgttgtgtttgggggatgggatatcagtaacttgaacctggcagatgccatggccagggccaaggtgtttgatatcgacctgcagaaacagttgaggccttacatggaatctatggttccactccccggaatctatgaccccgatttcattgctgccaaccaaggagaccgtgccaacaacgtgatcaagggcacaaagaaagaacaagttcaacaaatcatcaaagacattaaggagtttaaggaaagcactaaggttgacaaggtggttgtcctgtggacagccaacacagagaggtacagcaacctagttgtgggactaaacgacaccatggaaaacctctttgcttccttggacaggaacgaggctgagatttccccttccaccttgtatgccattgcttgtgttatggaaaatgttcctttcatcaatggaagccctcagaacacctttgtcccagggctgattgatctggccatcaagaggaacagtttgattggaggagatgactttaagagtggtcagaccaaaatgaaatctgtgttggtggatttccttgtgggggccggcatcaagccaacatctatagtgagttacaaccatctgggaaacaatgatggcatgaatctctcagcccctcaaaccttccgctcgaaggaaatttccaagagcaatgttgttgacgatatggtcaacagcaacgccatcctctatgagcctggtgaacatccggaccatgtggttgtcattaagtatgtaccttacgttggggacagcaagagggccatggatgagtactcttctgagatattcatgggcggaaagaacacaattgtgttgcacaacacttgtgaggattcactgttagctgctcctattatcttggacttggtccttcttgctgagcttagcactcgaatcgagtttaaagctgaaaatgagggaaagttccactcattccacccagttgcgaccatcctcagttacctgaccaaggcccctctggttccaccgagtacgccagtggttaatgcactgtcaaagcagcgagctatgctggaaaacatcctaagggcttgtgttggattagctcctgagaacaacatgatcctggagtacaagtga

SEQ ID NO: 142906 - protein, 510 aa, Glycine max
MFIESFKVESPNVKYTETEIQSVYNYETTELVHENNNGTYQWVVKPKTVKYEFKTNTHVPKLGVMLVGWGGNNGSTLTGGVIANREGISWATKDKIQQANYFGSLTQASAIRVGSFQGEEIYAPFKSLLPMVNPDDVVFGGWDISNLNLADAMARAKVFDIDLQKQLRPYMESMVPLPGIYDPDFIAANQGDRANNVIKGTKKEQVQQIIKDIKEFKESTKVDKVVVLWTANTERYSNLVVGLNDTMENLFASLDRNEAEISPSTLYAIACVMENVPFINGSPQNTFVPGLIDLAIKRNSLIGGDDFKSGQTKMKSVLVDFLVGAGIKPTSIVSYNHLGNNDGMNLSAPQTFRSKEISKSNVVDDMVNSNAILYEPGEHPDHVVVIKYVPYVGDSKRAMDEYSSEIFMGGKNTIVLHNTCEDSLLAAPIILDLVLLAELSTRIEFKAENEGKFHSFHPVATILSYLTKAPLVPPSTPVVNALSKQRAMLENILRACVGLAPENNMILEYK

SEQ ID NO: 142907 - DNA, 1533 bp, Zea mays
  CDS (1)..(1533)
atgttcatcgagagcttccgcgtcgagagcccccacgtgcggtacggcccgacggagatcgagtcggagtaccggtacgacacgacggagctggtgcacgaggccaaggacggcgcctcccgctgggtcgtccgccccaagtccgtcaagtacaacttccggaccagcaccgcggtccccaagctcggggtcatgcttgtggggtggggaggcaacaacgggtccacgctgacggctggggtcattgccaacagggaggggatctcatgggcgaccaaggacaaggtgcagcaagccaactactacggctccctcacccaggcttccaccatcagagtaggcagctacaacggggaggagatatatgcgccgttcaagagcctcctacccatggtgaacccagacgaccttgtgtttggaggctgggacatcagcagcatgaacctggcagatgccatgaccagggccaaggtgctggacattgacctgcagaagcagctcaggccctacatggagtccatggtgccacttcccggtgtctatgatccggacttcatcgccgctaaccagggctctcgtgccaacaatgtcatcaagggcaccaagaaagaacaggtggagcagatcatcaaggatatcagggagtttaaggagaagaacaaagtggacaaggttgttgtgctgtggactgcaaacactgaaaggtacagcaatgtatgcgctggtctcaacgacacaatggagaatctgctggcatctgtggacaagaacgaggcggaaatctcgccatcaacactatatgccattgcctgtgtcacggaaggggtgccattcatcaatgggagcccccagaacacttttgtgcctgggctgattgatcttgctatcaagaacaactgcctgatcggtggtgacgacttcaagagtgggcagaccaagatgaaatcggtcttggttgatttccttattggtgctggaataaagcccacctcgattgtgagctacaaccacttgggaaacaacgacggcatgaacctgtctgcccctcaaacattcaggtccaaggagatctccaagagcaacgtggtggatgacatggtctcaagcaatgccattctctatgggcccggcgagcatcccgatcatgttgttgtcatcaagtacgtgccgtacgtgggagacagtaagagggctatggacgagtacacatcagagatcttcatgggcggcaagagcaccatcgtgctgcacaacacctgcgaggactcgctcctcgccgcgcctatcatccttgatctggtgctcctggctgagctcagcaccaggatccagctaaaacctgagggaacggacaagttccactccttccacccggtggccaccatccttagctacctcaccaaggcaccactggttccgcccggcacaccggtggtgaatgctctggcaaagcagagggcgatgctggagaacatcatgagggcctgcgttggcctggccccagagaacaacatgatcctggagtacaagtga

SEQ ID NO: 142908 - protein, 510 aa, Zea mays
MFIESFRVESPHVRYGPTEIESEYRYDTTELVHEAKDGASRWVVRPKSVKYNFRTSTAVPKLGVMLVGWGGNNGSTLTAGVIANREGISWATKDKVQQANYYGSLTQASTIRVGSYNGEEIYAPFKSLLPMVNPDDLVFGGWDISSMNLADAMTRAKVLDIDLQKQLRPYMESMVPLPGVYDPDFIAANQGSRANNVIKGTKKEQVEQIIKDIREFKEKNKVDKVVVLWTANTERYSNVCAGLNDTMENLLASVDKNEAEISPSTLYAIACVTEGVPFINGSPQNTFVPGLIDLAIKNNCLIGGDDFKSGQTKMKSVLVDFLIGAGIKPTSIVSYNHLGNNDGMNLSAPQTFRSKEISKSNVVDDMVSSNAILYGPGEHPDHVVVIKYVPYVGDSKRAMDEYTSEIFMGGKSTIVLHNTCEDSLLAAPIILDLVLLAELSTRIQLKPEGTDKFHSFHPVATILSYLTKAPLVPPGTPVVNALAKQRAMLENIMRACVGLAPENNMILEYK

SEQ ID NO: 142909 - DNA, 1533 bp, Zea mays
  CDS (1)..(1533)
atgttcatcgagagcttccgcgtcgagagcccccacgtgcggtacggcccgacggagatcgagtcggagtaccggtacgacacgacggagctggtacacgagggcaaggacggcgcctcacgctgggtcgtccgccccaagtccgtcaagtacaacttccggaccagaaccgccgtccccaagctcggggtgatgcttgtggggtggggaggcaacaacgggtccacgctgacggctggggtcattgccaacagggaggggatctcatgggcgaccaaggacaaggtgcagcaagccaactactacggctccctcacccaggcctccaccatcagagtcggcagctacaacggggaggagatctatgcgccgttcaagagcctccttcccatggtgaacccagacgacattgtgttcggaggctgggacattagcaacatgaacctggccgactccatgaccagggccaaggtgctggatattgacctgcagaagcagctcaggccctacatggagtccatggtgccacttcccggtatctatgatccggacttcatcgcggctaaccagggctctcgcgccaacagtgtcatcaagggcaccaagaaagaacaggtggagcagatcatcaaggatatcagggagtttaaggagaagaacaaagtggacaagatagttgtgttgtggactgcaaacactgaaaggtacagcaatgtgtgcgctggtctcaacgacacgatggagaatctactggcatctgtggacaagaacgaggcggagatatcaccatcaacactatatgccattgcctgtgtcatggagggggtgccgttcatcaacgggagcccccagaacacctttgtgcctgggctgattgatcttgctataaaaaacaactgcttgattggtggtgacgacttcaagagtggacagaccaagatgaaatctgtcttggtcgatttccttgttggtgctggaataaagcccacctcaatcgtgagctacaaccacttgggaaacaacgatggcatgaacctgtctgcccctcaaacattcaggtccaaggagatctccaagagcaacgtggtggatgacatggtctcgagcaatgccatcctctatgagcccggcgagcatcccgatcatgtcgttgtcatcaagtatgtgccgtacgtgggagacagcaagagggctatggacgagtacacctcagagatcttcatgggcggcaagaacaccatcgtgctgcacaacacctgtgaggactcgctcctcgccgcacctatcatccttgatctggtgctcttggctgagctcagcaccaggatccagctgaaagctgagggagaggacaaattccactccttccacccggtggccaccatcctgagctacctcaccaaggcacccctggttccccctggcacaccggtggtgaacgctctggccaagcagagggcgatgctggagaacatcatgagggcctgcgttgggctggccccagagaacaacatgatcctggagtacaagtga

SEQ ID NO: 142910 - protein, 510 aa, Zea mays
MFIESFRVESPHVRYGPTEIESEYRYDTTELVHEGKDGASRWVVRPKSVKYNFRTRTAVPKLGVMLVGWGGNNGSTLTAGVIANREGISWATKDKVQQANYYGSLTQASTIRVGSYNGEEIYAPFKSLLPMVNPDDIVFGGWDISNMNLADSMTRAKVLDIDLQKQLRPYMESMVPLPGIYDPDFIAANQGSRANSVIKGTKKEQVEQIIKDIREFKEKNKVDKIVVLWTANTERYSNVCAGLNDTMENLLASVDKNEAEISPSTLYAIACVMEGVPFINGSPQNTFVPGLIDLAIKNNCLIGGDDFKSGQTKMKSVLVDFLVGAGIKPTSIVSYNHLGNNDGMNLSAPQTFRSKEISKSNVVDDMVSSNAILYEPGEHPDHVVVIKYVPYVGDSKRAMDEYTSEIFMGGKNTIVLHNTCEDSLLAAPIILDLVLLAELSTRIQLKAEGEDKFHSFHPVATILSYLTKAPLVPPGTPVVNALAKQRAMLENIMRACVGLAPENNMILEYK

SEQ ID NO: 142911 - DNA, 1533 bp, Zea mays
  CDS (1)..(1533)
atgttcatcgagagcttccgcgtcgagagcccccacgtgcggtacggcccgatggagatcgagtcggagtaccggtacgacacgacggagctggtacacgagggcaaggacggcgcctcacgctgggtcgtccgccccaagtccgtcaagtacaacttccggaccagaaccgccgtccccaagctcggggtgatgcttgtggggtggggaggcaacaacgggtccacgctgacggctggggtcattgccaacagggaggggatctcatgggcgaccaaggacaaggtgcagcaagccaactactacggctccctcacccaggcctccaccatcagagtcggcagctacaacggggaggagatctatgcgccgttcaagagcctccttcccatggtgaacccagacgacattgtgttcggaggctgggacattagcaacatgaacctggccgactccatgaccagggccaaggtgctggatattgacctgcagaagcagctcaggccctacatggagtccatggtgccacttcccggtatctatgatccggacttcatcgcggctaaccagggctctcgcgccaacagtgtcatcaagggcaccaagaaagaacaggtggagcagatcatcaaggatatcagggagtttaaggagaagaacaaagtggacaagatagttgtgttgtggactgcaaacactgaaaggtatagcaatgtgtgcgctggtctcaacgacacgatggagaatctactggcatctgtggacaagaacgaggcggaggtatcaccatcaacactatatgccattgcctgtgtcatggagggggtgccgttcatcaatgggagcccccagaacacctttgtgcctgggctgattgatcttgctataaaaaacaactgcttgattggtggtgacgacttcaagagtggacagaccaagatgaaatctgtcttggtcgatttccttgttggtgctggaataaagcccacctcaatcgtgagctacaaccacttgggaaacaacgatggcatgaacctgtctgcccctcaaacattcaggtccaaggagatctccaagagcaacgtggtggatgacatggtctcgagcaatgccatcctctatgagcccggcgagcatcccgatcatgtcgttgtcatcaagtatgtgccgtacgtgggagacagcaagagggctatggacgagtacacctcagagatcttcatgggcggcaagaacaccatcgtgctgcacaacacctgtgaggactcgctcctcgccgcacctatcatccttgatctggtgctcttggctgagctcagcaccaggatccagctgaaagctgagggagaggacaaattccactccttccacccggtggccaccatcctgagctacctcaccaaggcacccctggttccccctggcacaccggtggtgaacgctctggccaagcagagggcgatgctggagaacatcatgagggcctgcgttgggctggccccagagaacaacatgatcctggagtacaagtga

SEQ ID NO: 142912 - protein, 510 aa, Zea mays
MFIESFRVESPHVRYGPMEIESEYRYDTTELVHEGKDGASRWVVRPKSVKYNFRTRTAVPKLGVMLVGWGGNNGSTLTAGVIANREGISWATKDKVQQANYYGSLTQASTIRVGSYNGEEIYAPFKSLLPMVNPDDIVFGGWDISNMNLADSMTRAKVLDIDLQKQLRPYMESMVPLPGIYDPDFIAANQGSRANSVIKGTKKEQVEQIIKDIREFKEKNKVDKIVVLWTANTERYSNVCAGLNDTMENLLASVDKNEAEVSPSTLYAIACVMEGVPFINGSPQNTFVPGLIDLAIKNNCLIGGDDFKSGQTKMKSVLVDFLVGAGIKPTSIVSYNHLGNNDGMNLSAPQTFRSKEISKSNVVDDMVSSNAILYEPGEHPDHVVVIKYVPYVGDSKRAMDEYTSEIFMGGKNTIVLHNTCEDSLLAAPIILDLVLLAELSTRIQLKAEGEDKFHSFHPVATILSYLTKAPLVPPGTPVVNALAKQRAMLENIMRACVGLAPENNMILEYK

SEQ ID NO: 142913 - DNA, 21 bp, Artificial sequence
  primer
atgttcatcgaaagcttcaag

SEQ ID NO: 142914 - DNA, 22 bp, Artificial sequence
  primer
tcacttgtactcgagaatcatg

SEQ ID NO: 142915 - protein, 609 aa, Artificial sequence
  consensus sequence
  Variant (2)..(7): Xaa in position 2 to 7 is any amino acid
  Variant (8)..(39): Xaa in position 8 to 39 is any or no amino acid
  Variant (41)..(41): Xaa in position 41 is any amino acid
  Variant (42)..(42): Xaa in position 42 is any or no amino acid
  Variant (44)..(44): Xaa in position 44 is any amino acid
  Variant (46)..(46): Xaa in position 46 is any amino acid
  Variant (48)..(51): Xaa in position 48 to 51 is any amino acid
  Variant (53)..(55): Xaa in position 53 to 55 is any amino acid
  Variant (57)..(57): Xaa in position 57 is any amino acid
  Variant (59)..(59): Xaa in position 59 is any amino acid
  Variant (61)..(65): Xaa in position 61 to 65 is any amino acid
  Variant (66)..(71): Xaa in position 66 to 71 is any or no amino acid
  Variant (73)..(75): Xaa in position 73 to 75 is any amino acid
  Variant (76)..(77): Xaa in position 76 to 77 is any or no amino acid
  Variant (79)..(79): Xaa in position 79 is any amino acid
  Variant (81)..(82): Xaa in position 81 to 82 is any amino acid
  Variant (83)..(84): Xaa in position 83 to 84 is any or no amino acid
  Variant (86)..(86): Xaa in position 86 is any amino acid
  Variant (88)..(88): Xaa in position 88 is any amino acid
  Variant (90)..(91): Xaa in position 90 to 91 is any amino acid
  Variant (92)..(92): Xaa in position 92 is any or no amino acid
  Variant (95)..(95): Xaa in position 95 is any amino acid
  Variant (104)..(104): Xaa in position 104 is any amino acid
  Variant (110)..(110): Xaa in position 110 is any amino acid
  Variant (112)..(115): Xaa in position 112 to 115 is any amino acid
  Variant (117)..(117): Xaa in position 117 is any amino acid
  Variant (120)..(121): Xaa in position 120 to 121 is any amino acid
  Variant (123)..(124): Xaa in position 123 to 124 is any amino acid
  Variant (126)..(126): Xaa in position 126 is any amino acid
  Variant (128)..(129): Xaa in position 128 to 129 is any amino acid
  Variant (131)..(135): Xaa in position 131 to 135 is any amino acid
  Variant (139)..(139): Xaa in position 139 is any amino acid
  Variant (147)..(148): Xaa in position 147 to 148 is any amino acid
  Variant (150)..(150): Xaa in position 150 is any amino acid
  Variant (152)..(154): Xaa in position 152 to 154 is any amino acid
  Variant (155)..(160): Xaa in position 155 to 160 is any or no amino acid
  Variant (162)..(162): Xaa in position 162 is any amino acid
  Variant (165)..(166): Xaa in position 165 to 166 is any amino acid
  Variant (172)..(172): Xaa in position 172 is any amino acid
  Variant (174)..(174): Xaa in position 174 is any amino acid
  Variant (176)..(176): Xaa in position 176 is any amino acid
  Variant (178)..(178): Xaa in position 178 is any amino acid
  Variant (185)..(186): Xaa in position 185 to 186 is any amino acid
  Variant (189)..(190): Xaa in position 189 to 190 is any amino acid
  Variant (193)..(193): Xaa in position 193 is any amino acid
  Variant (196)..(196): Xaa in position 196 is any amino acid
  Variant (198)..(201): Xaa in position 198 to 201 is any amino acid
  Variant (204)..(204): Xaa in position 204 is any amino acid
  Variant (207)..(207): Xaa in position 207 is any amino acid
  Variant (209)..(209): Xaa in position 209 is any amino acid
  Variant (211)..(214): Xaa in position 211 to 214 is any amino acid
  Variant (218)..(219): Xaa in position 218 to 219 is any amino acid
  Variant (221)..(221): Xaa in position 221 is any amino acid
  Variant (230)..(231): Xaa in position 230 to 231 is any amino acid
  Variant (234)..(236): Xaa in position 234 to 236 is any amino acid
  Variant (237)..(238): Xaa in position 237 to 238 is any or no amino acid
  Variant (240)..(240): Xaa in position 240 is any amino acid
  Variant (241)..(250): Xaa in position 241 to 250 is any or no amino acid
  Variant (252)..(252): Xaa in position 252 is any amino acid
  Variant (254)..(260): Xaa in position 254 to 260 is any amino acid
  Variant (263)..(264): Xaa in position 263 to 264 is any amino acid
  Variant (267)..(271): Xaa in position 267 to 271 is any amino acid
  Variant (272)..(277): Xaa in position 272 to 277 is any or no amino acid
  Variant (280)..(281): Xaa in position 280 to 281 is any amino acid
  Variant (292)..(296): Xaa in position 292 to 296 is any amino acid
  Variant (297)..(297): Xaa in position 297 is any or no amino acid
  Variant (299)..(299): Xaa in position 299 is any amino acid
  Variant (300)..(302): Xaa in position 300 to 302 is any or no amino acid
  Variant (306)..(307): Xaa in position 306 to 307 is any amino acid
  Variant (310)..(318): Xaa in position 310 to 318 is any amino acid
  Variant (319)..(321): Xaa in position 319 to 321 is any or no amino acid
  Variant (328)..(329): Xaa in position 328 to 329 is any amino acid
  Variant (331)..(331): Xaa in position 331 is any amino acid
  Variant (333)..(335): Xaa in position 333 to 335 is any amino acid
  Variant (336)..(350): Xaa in position 336 to 350 is any or no amino acid
  Variant (352)..(353): Xaa in position 352 to 353 is any amino acid
  Variant (355)..(355): Xaa in position 355 is any amino acid
  Variant (368)..(368): Xaa in position 368 is any amino acid
  Variant (370)..(370): Xaa in position 370 is any amino acid
  Variant (373)..(377): Xaa in position 373 to 377 is any amino acid
  Variant (378)..(379): Xaa in position 378 to 379 is any or no amino acid
  Variant (392)..(392): Xaa in position 392 is any amino acid
  Variant (402)..(402): Xaa in position 402 is any amino acid
  Variant (408)..(408): Xaa in position 408 is any amino acid
  Variant (411)..(411): Xaa in position 411 is any amino acid
  Variant (422)..(422): Xaa in position 422 is any amino acid
  Variant (429)..(429): Xaa in position 429 is any amino acid
  Variant (439)..(439): Xaa in position 439 is any amino acid
  Variant (446)..(446): Xaa in position 446 is any amino acid
  Variant (449)..(449): Xaa in position 449 is any amino acid
  Variant (452)..(454): Xaa in position 452 to 454 is any amino acid
  Variant (455)..(468): Xaa in position 455 to 468 is any or no amino acid
  Variant (471)..(471): Xaa in position 471 is any amino acid
  Variant (475)..(475): Xaa in position 475 is any amino acid
  Variant (481)..(481): Xaa in position 481 is any amino acid
  Variant (483)..(483): Xaa in position 483 is any amino acid
  Variant (495)..(495): Xaa in position 495 is any amino acid
  Variant (499)..(500): Xaa in position 499 to 500 is any amino acid
  Variant (503)..(504): Xaa in position 503 to 504 is any amino acid
  Variant (507)..(508): Xaa in position 507 to 508 is any amino acid
  Variant (511)..(511): Xaa in position 511 is any amino acid
  Variant (519)..(519): Xaa in position 519 is any amino acid
  Variant (532)..(533): Xaa in position 532 to 533 is any amino acid
  Variant (536)..(537): Xaa in position 536 to 537 is any amino acid
  Variant (539)..(540): Xaa in position 539 to 540 is any amino acid
  Variant (541)..(554): Xaa in position 541 to 554 is any or no amino acid
  Variant (557)..(557): Xaa in position 557 is any amino acid
  Variant (559)..(561): Xaa in position 559 to 561 is any amino acid
  Variant (565)..(566): Xaa in position 565 to 566 is any amino acid
  Variant (577)..(578): Xaa in position 577 to 578 is any amino acid
  Variant (582)..(582): Xaa in position 582 is any amino acid
  Variant (584)..(584): Xaa in position 584 is any amino acid
  Variant (589)..(589): Xaa in position 589 is any amino acid
  Variant (593)..(594): Xaa in position 593 to 594 is any amino acid
  Variant (598)..(598): Xaa in position 598 is any amino acid
  Variant (601)..(601): Xaa in position 601 is any amino acid
  Variant (603)..(603): Xaa in position 603 is any amino acid
  Variant (605)..(605): Xaa in position 605 is any amino acid
  Variant (607)..(607): Xaa in position 607 is any amino acid
MXXXXXXXXXXXXXXXXXXXXXXXXXXXXXXXXXXXXXXVXXPXVXYXXXXIXXXYXYXTXXXXXXXXXXXGXXXXXVXPXXXXYXFXTXXXVPXKLGVMLVGXGGNNGXTXXXXVXANXXGXXWXTXXKXXXXXANYXGSLTQASXXRXGXXXXXXXXXYXPFXXLLPMVXPXDXVXGGWDISXXNLXXAMXRAXVXXXXLQXQLXPXMXXXXPLPXXYXPDFIAANQXXRAXXXXXGXXXXXXXXXXXKXEXXXXXXXDIXXFKXXXXXXXXXXXDKXXVLWTANTERYXXXXXXGXXXXNDTXXNLXXXXXXXXXXXXEISPSTXXAXAXXXXXXXXXXXXXXXXXXEXXPXINGSPQNTFVPGXIXLAXXXXXXXIGGDDFKSGQTKXKSVLVDFLVXAGIKPXSIXSYNHLGNNDGXNLSAPQXFRSKEISKSXVVDDMVXSNXILXXXXXXXXXXXXXXXXXGEXPDHXVVIKYXPXVGDSKRAMDEYXSEIXXGGXXTIXXHNXCEDSLLAXPIILDLVLLAELXXRIXXKXXXXXXXXXXXXXXXXFHXVXXXLSYXXKAPLVPPGTPXXVVNXLXKQRAXLENXXRACXGLXPXNXMXLE

SEQ ID NO: 142916 - protein, 42 aa, Artificial sequence
  protein pattern
  Variant (5)..(5): Xaa in position 5 is any amino acid
  Variant (8)..(8): Xaa in position 8 is Ala or Val
  Variant (19)..(19): Xaa in position 19 is any amino acid
  Variant (23)..(23): Xaa in position 23 is Ala or Ser
  Variant (25)..(25): Xaa in position 25 is any or no amino acid
  Variant (27)..(27): Xaa in position 27 is any or no amino acid
  Variant (32)..(32): Xaa in position 32 is Glu or Lys
  Variant (36)..(36): Xaa in position 36 is Gln or Ser
  Variant (37)..(37): Xaa in position 37 is Gly, Asn or Ser
  Variant (39)..(39): Xaa in position 39 is Ile or Val
  Variant (42)..(42): Xaa in position 42 is Ile or Met
GIKPXSIXSYNHLGNNDGXNLSXPXQXFRSKXISKXXVXDDX

SEQ ID NO: 142917 - protein, 25 aa, Artificial sequence
  protein pattern
  Variant (2)..(3): Xaa in position 2 to 3 is any amino acid
  Variant (6)..(6): Xaa in position 6 is Thr or Val
  Variant (14)..(14): Xaa in position 14 is Ala, Ser or Thr
  Variant (16)..(16): Xaa in position 16 is Ile or Leu
  Variant (18)..(18): Xaa in position 18 is Ile or Leu
  Variant (21)..(22): Xaa in position 21 to 22 is Ile, Leu or Val
  Variant (23)..(23): Xaa in position 23 is any amino acid
  Variant (24)..(24): Xaa in position 24 is Ala, Ser or Thr
IXXHNXCEDSLLAXPXIXDLXXXXE

SEQ ID NO: 142918 - protein, 42 aa, Artificial sequence
  protein pattern
  Variant (2)..(2): Xaa in position 2 is any amino acid
  Variant (4)..(4): Xaa in position 4 is Asp, Glu or Asn
  Variant (5)..(5): Xaa in position 5 is Asp, Glu or Ser
  Variant (6)..(6): Xaa in position 6 is Phe, Ile, Leu or Val
  Variant (8)..(8): Xaa in position 8 is any amino acid
  Variant (9)..(9): Xaa in position 9 is any or no amino acid
  Variant (11)..(11): Xaa in position 11 is any or no amino acid
  Variant (16)..(17): Xaa in position 16 to 17 is any amino acid
  Variant (18)..(18): Xaa in position 18 is Asn, Pro or Ser
  Variant (19)..(19): Xaa in position 19 is Ile, Leu or Met
  Variant (20)..(20): Xaa in position 20 is Ala, Asp, Gly or Ser
  Variant (21)..(21): Xaa in position 21 is any amino acid
  Variant (22)..(22): Xaa in position 22 is Ala or Ser
  Variant (24)..(24): Xaa in position 24 is any amino acid
  Variant (27)..(27): Xaa in position 27 is any amino acid
  Variant (29)..(29): Xaa in position 29 is Phe or Leu
  Variant (30)..(30): Xaa in position 30 is Asp, Glu or Ser
  Variant (31)..(32): Xaa in position 31 to 32 is any amino acid
  Variant (34)..(40): Xaa in position 34 to 40 is any amino acid
  Variant (41)..(41): Xaa in position 41 is Leu or Met
  Variant (42)..(42): Xaa in position 42 is Ala, Glu, Gly or Ser
VXPXXXVXXGXWDISXXXXXXXMXRAXVXXXXLXXXXXXXXX

SEQ ID NO: 142919 - protein, 21 aa, Artificial sequence
  protein pattern
  Variant (2)..(2): Xaa in position 2 is Ala or Gly
  Variant (13)..(13): Xaa in position 13 is Ile, Leu or Met
  Variant (18)..(18): Xaa in position 18 is Ala or Val
  Variant (19)..(19): Xaa in position 19 is Asp or Gln
IXGDDFKSGQTKXKSVLXXFL

SEQ ID NO: 142920 - protein, 20 aa, Artificial sequence
  protein pattern
  Variant (2)..(2): Xaa in position 2 is any amino acid
  Variant (6)..(6): Xaa in position 6 is any or no amino acid
  Variant (8)..(8): Xaa in position 8 is any or no amino acid
  Variant (10)..(10): Xaa in position 10 is any or no amino acid
  Variant (13)..(13): Xaa in position 13 is His or Tyr
  Variant (14)..(14): Xaa in position 14 is Ile, Met or Val
  Variant (16)..(16): Xaa in position 16 is any amino acid
  Variant (18)..(18): Xaa in position 18 is Ala or Gly
  Variant (20)..(20): Xaa in position 20 is Asp, Asn or Ser
EXPDHXVXVXIKXXPXVXDX

SEQ ID NO: 142921 - protein, 21 aa, Artificial sequence
  protein pattern
  Variant (2)..(2): Xaa in position 2 is Ala, Cys or Ser
  Variant (3)..(3): Xaa in position 3 is Ala, Ile or Val
  Variant (4)..(8): Xaa in position 4 to 8 is any amino acid
  Variant (9)..(9): Xaa in position 9 is Phe or Tyr
  Variant (20)..(20): Xaa in position 20 is any amino acid
AXXXXXXXXINGSPQNTFVXG

SEQ ID NO: 142922 - protein, 21 aa, Artificial sequence
  protein pattern
  Variant (2)..(2): Xaa in position 2 is Ala or Leu
  Variant (3)..(3): Xaa in position 3 is Ser or Thr
  Variant (4)..(4): Xaa in position 4 is any amino acid
  Variant (8)..(8): Xaa in position 8 is any or no amino acid
  Variant (10)..(10): Xaa in position 10 is any or no amino acid
  Variant (15)..(15): Xaa in position 15 is Thr or Val
  Variant (17)..(17): Xaa in position 17 is any amino acid
  Variant (18)..(18): Xaa in position 18 is Gly, Asn or Ser
  Variant (19)..(19): Xaa in position 19 is Ser or Thr
  Variant (20)..(20): Xaa in position 20 is Pro or Gln
  Variant (21)..(21): Xaa in position 21 is Gly, Ile, Leu or Val
VXXXLSYXLXKAPLXPXXXXX

SEQ ID NO: 142923 - protein, 12 aa, Artificial sequence
  protein pattern
  Variant (2)..(2): Xaa in position 2 is any or no amino acid
  Variant (7)..(7): Xaa in position 7 is Ala or Gly
  Variant (12)..(12): Xaa in position 12 is Phe or Tyr
VXVLWTXNTERX

SEQ ID NO: 142924 - protein, 26 aa, Artificial sequence
  protein pattern
  Variant (2)..(3): Xaa in position 2 to 3 is any amino acid
  Variant (8)..(8): Xaa in position 8 is Ser or Thr
  Variant (10)..(10): Xaa in position 10 is Phe, Ile, Leu or Val
  Variant (11)..(11): Xaa in position 11 is any amino acid
  Variant (12)..(12): Xaa in position 12 is Ala, Gly or Thr
  Variant (13)..(13): Xaa in position 13 is Ala, Gly, Ser or Thr
  Variant (14)..(15): Xaa in position 14 to 15 is any amino acid
  Variant (18)..(18): Xaa in position 18 is Lys or Arg
  Variant (19)..(20): Xaa in position 19 to 20 is any amino acid
  Variant (21)..(21): Xaa in position 21 is Ile, Leu or Val
  Variant (22)..(22): Xaa in position 22 is any amino acid
  Variant (23)..(23): Xaa in position 23 is Phe or Trp
  Variant (24)..(24): Xaa in position 24 is any amino acid
  Variant (26)..(26): Xaa in position 26 is Lys or Arg
GXXGNNGXTXXXXXXANXXXXXXXTX

SEQ ID NO: 142925 - protein, 18 aa, Artificial sequence
  protein pattern
  Variant (3)..(3): Xaa in position 3 is any amino acid
  Variant (4)..(4): Xaa in position 4 is Gly or Ser
  Variant (5)..(5): Xaa in position 5 is Ile or Val
  Variant (6)..(6): Xaa in position 6 is Phe or Tyr
  Variant (7)..(7): Xaa in position 7 is any amino acid
  Variant (13)..(13): Xaa in position 13 is any amino acid
  Variant (16)..(16): Xaa in position 16 is Ala, Asp, Glu, Gly, Asn or Ser
  Variant (17)..(17): Xaa in position 17 is Asp, Glu, Gln or Ser
PLXXXXXPDFIAXNQXXR

SEQ ID NO: 142926 - protein, 15 aa, Artificial sequence
  protein pattern
  Variant (2)..(2): Xaa in position 2 is Trp or Tyr
  Variant (3)..(3): Xaa in position 3 is Phe or Tyr
  Variant (6)..(6): Xaa in position 6 is Ile, Leu, Met or Val
  Variant (9)..(9): Xaa in position 9 is Ala, Cys or Ser
  Variant (11)..(11): Xaa in position 11 is Ala, Ser or Thr
  Variant (12)..(12): Xaa in position 12 is Ile, Leu or Val
  Variant (13)..(13): Xaa in position 13 is any amino acid
  Variant (14)..(14): Xaa in position 14 is Ile, Leu or Val
NXXGSXTQXSXXXXG

SEQ ID NO: 142927 - protein, 14 aa, Artificial sequence
  protein pattern
  Variant (2)..(3): Xaa in position 2 to 3 is any amino acid
  Variant (4)..(4): Xaa in position 4 is Ala or Ser
  Variant (5)..(5): Xaa in position 5 is Ile, Leu or Val
  Variant (6)..(6): Xaa in position 6 is Asp, Glu or Lys
  Variant (7)..(7): Xaa in position 7 is any amino acid
  Variant (8)..(8): Xaa in position 8 is Asp, Gly, Asn or Ser
  Variant (9)..(9): Xaa in position 9 is Glu or His
  Variant (10)..(10): Xaa in position 10 is any amino acid
  Variant (12)..(12): Xaa in position 12 is Ile, Met or Val
LXXXXXXXXXEXSP

SEQ ID NO: 142928 - protein, 11 aa, Artificial sequence
  protein pattern
  Variant (3)..(3): Xaa in position 3 is Leu or Met
  Variant (7)..(7): Xaa in position 7 is any amino acid
  Variant (8)..(8): Xaa in position 8 is Ala, Gly or Ser
  Variant (11)..(11): Xaa in position 11 is Phe, Leu or Met
RAXDEYXXEIX

SEQ ID NO: 142929 - DNA, 2496 bp, Arabidopsis thaliana
  CDS (1)..(2496)
atgggagatggagatgagcaaagtaaagagttaggaggagtttcgtcttcgagtcgtcgttgttcttccggtactgctggtgctgcaaatgcagaagcaagaatgaagtttgctgctgttgatgctataacagaattagtgtggtctcctagcaacggtctaagcttaagatgtgcagatatcagtttcacgggaaaggcaaaattactctctcctaacttctttgatataggactaactaacatggcgattcactcaaatagcacaagtattgaagaccaagaagatcacgtagatgtcgaattgagaaaccgagatcaagtgaaccaagcaatgattggtggttctgttgaggatatgaaacctgaaatggttgaggataaggttgaaaccaatgatgatataaagaatgaagaagcaggatgttccaaaagatcttcagatagtccgaaagctatggaaggagaaaccagagacttgttggttaatgaacagttgaggatggaaagtgctggatctcaagaagaaggggataaggcgcataatagagttgatcgtttagaatcaatggatgagaacaacctcgcaactcttgctgttgtagcatgtgaaggtaaaggggactatttgccggagggtgaggctggacctagtggttcctacaggcgtcgtgagaaagcaaaagggaaagagaaagctttatctgatgaaaactttggtggtgatggtgaagatgaggatgaggagagttttggtagtgtagaaagttgcaatagtgcgggtttgctctcaaggggaaagaaaagaccaggctttgaggagcagctgatttttggaagcaaacggctcaaaacgttaaatcaagaatgtttggggtcaacttcaaagctcaagcaagatagttccttcatgaattggatatcaaatatgactaaaggaatctggaaaggtaatgaagaagacaattctccttttgtagctcttaccaccacctcaaatgctaatggtcatggccaagtcaatgccatcgttgaccaacaacaattgagtccatgctgtgtgaaggaaaatagtggatgcagaaacaccggtttccagtcttttttccagtctatatattgtccgaagaaacaaagtcaagatgtcgtcgacatggatttcccgaatgatgttaatgctgctcctttgcaggaacttccctggattcctgaacattgcgacatttccaaaggggatgacttgtcttcatctggtaatgagattggtccagtggctgaacccaacatttcatcaggaaaagttgtatttaatcagacaagcaaaacacagtcttcagagaacaaacgtgaggacaaagagccaaacatctcgttgatgtctcttagtaagtctaagccaaatgaagagccaaaaacatgcggtgaagctgatggaaaggttagtccatgtttaaccaacagaaactctggtcttaaaagtttgtggattagtcggttttcttctaaaggttcgttccctcagaaaaaggcaagtgaaacggctaaagaggccaatgcttcagcctcagacgcagctaaaacccgtgattcacggaaaatgctggcagacaagaatgttataagacccagtatcagctcggtagatgggcccgataaaccggacactgtccttcctatagtttcgtcaatgagaatagagtcttcagaagcaatggcttctttgtttgctagaagattagaagcaatgaaaagcatcatgccctcaggttctttagctgagaatgcagaggaggaacagagggatctaatttgtttctactgcggtaaaaagggtcattgtttacgggattgtttggaagtaactgatactgagctcagagatctagtacagaacataagtgtgcggaatggaagagaagaagcgtcaagtctatgcattagatgttttcagcttagtcactgggctgcaacatgcccgaatgctcccctgtatggttcaggagctgaaggtagagctatgaagaacgctttagcttctacctctggcatgaagctgcccataagtggtttcacagacgtaccaagggcggtctttgatgctgttcaagtgcttcgcctgagccgcacagacgttctcaaatggataaacaccaagaagtctgtatcgggtctcgaagggttcttcttgcggttaaggctcgggaaatgggaagaagggcttggaggaacagggtattatgtagctcgcatagatggggacacagagggacaaagctcaaggagacattcagagaaaagcttaatttcagttaaggttaaaggtgtgacttgccttgttgagtctcagtttatctcaaaccaagactttcttgaggaggagttaaaggcctggtggcagagcgcggggaaaagtgccagaacaagcggctacgacggcatcccgtcggcggaggaacttagtcggaaaattcagcagagaaaaatgttaggcttttag

SEQ ID NO: 142930 - protein, 831 aa, Arabidopsis thaliana
MGDGDEQSKELGGVSSSSRRCSSGTAGAANAEARMKFAAVDAITELVWSPSNGLSLRCADISFTGKAKLLSPNFFDIGLTNMAIHSNSTSIEDQEDHVDVELRNRDQVNQAMIGGSVEDMKPEMVEDKVETNDDIKNEEAGCSKRSSDSPKAMEGETRDLLVNEQLRMESAGSQEEGDKAHNRVDRLESMDENNLATLAVVACEGKGDYLPEGEAGPSGSYRRREKAKGKEKALSDENFGGDGEDEDEESFGSVESCNSAGLLSRGKKRPGFEEQLIFGSKRLKTLNQECLGSTSKLKQDSSFMNWISNMTKGIWKGNEEDNSPFVALTTTSNANGHGQVNAIVDQQQLSPCCVKENSGCRNTGFQSFFQSIYCPKKQSQDVVDMDFPNDVNAAPLQELPWIPEHCDISKGDDLSSSGNEIGPVAEPNISSGKVVFNQTSKTQSSENKREDKEPNISLMSLSKSKPNEEPKTCGEADGKVSPCLTNRNSGLKSLWISRFSSKGSFPQKKASETAKEANASASDAAKTRDSRKMLADKNVIRPSISSVDGPDKPDTVLPIVSSMRIESSEAMASLFARRLEAMKSIMPSGSLAENAEEEQRDLICFYCGKKGHCLRDCLEVTDTELRDLVQNISVRNGREEASSLCIRCFQLSHWAATCPNAPLYGSGAEGRAMKNALASTSGMKLPISGFTDVPRAVFDAVQVLRLSRTDVLKWINTKKSVSGLEGFFLRLRLGKWEEGLGGTGYYVARIDGDTEGQSSRRHSEKSLISVKVKGVTCLVESQFISNQDFLEEELKAWWQSAGKSARTSGYDGIPSAEELSRKIQQRKMLGF

SEQ ID NO: 142931 - DNA, 23 bp, Artificial sequence
  primer
atgggagatggagatgagcaaag

SEQ ID NO: 142932 - DNA, 20 bp, Artificial sequence
  primer
ctaaaagcctaacatttttc

SEQ ID NO: 142933 - DNA, 996 bp, Arabidopsis thaliana
  CDS (1)..(996)
atgacggcaattccaaacgtcgtcgatattgaatcttcttcctcttcgctttgtcaagagacggcaacggagaccgtcaccgttgaaagaggctcgtctgattcatcttcaaagccagacgacgtcgttttactaatcaaggaagaggaggatgacgccgttaacttgtcacttggtttttggaaattgcacgagataggtttaataacaccgttcttgagaaagacgtttgagatcgtcgatgacaaagtaacagacccggttgtatcatggagcccgacccgtaaaagctttatcatttgggattcttacgagttctcagagaatctacttcccaaatacttcaagcacaagaacttctccagttttattcgtcagcttaactcttacggttttaaaaaggtcgattcagataggtgggaatttgctaacgaagggtttcaaggagggaagaaacatttgcttaagaacatcaagaggagaagcaaaaacactaaatgttgtaacaaggaagcgagtaccaccacgacagagactgaggttgagtcattgaaggaggaacagagtccaatgagattggagatgttgaagctgaaacaacaacaagaagaatctcaacatcagatggtcactgtgcaggagaagatccacggagttgataccgaacaacagcatatgcttagtttctttgcaaagttggctaaagatcaaagatttgtagagagactggtgaagaagagaaagatgaaaatacagagagagctagaagcagctgaattcgtgaagaagctcaagttgcttcaggatcaagaaactcaaaagaacttgttagatgtagaaagagaatttatggccatggctgcaacagaacacaatcccgagcctgacattttggtgaacaatcaaagcgggaatacgagatgtcagcttaactcagaggacctacttgttgacggtggctcaatggatgtaaatgggaggatagagatagagtag

SEQ ID NO: 142934 - protein, 331 aa, Arabidopsis thaliana
MTAIPNVVDIESSSSSLCQETATETVTVERGSSDSSSKPDDVVLLIKEEEDDAVNLSLGFWKLHEIGLITPFLRKTFEIVDDKVTDPVVSWSPTRKSFIIWDSYEFSENLLPKYFKHKNFSSFIRQLNSYGFKKVDSDRWEFANEGFQGGKKHLLKNIKRRSKNTKCCNKEASTTTTETEVESLKEEQSPMRLEMLKLKQQQEESQHQMVTVQEKIHGVDTEQQHMLSFFAKLAKDQRFVERLVKKRKMKIQRELEAAEFVKKLKLLQDQETQKNLLDVEREFMAMAATEHNPEPDILVNNQSGNTRCQLNSEDLLVDGGSMDVNGRIEIE

SEQ ID NO: 142935 - DNA, 1509 bp, Medicago sativa; identical to SEQ ID NO: 24248
  CDS (1)..(1509)

SEQ ID NO: 142936 - protein, 502 aa, Medicago sativa; identical to SEQ ID NO: 24249

SEQ ID NO: 142937 - DNA, 1686 bp, Medicago sativa; identical to SEQ ID NO: 24250
  CDS (1)..(1686)

SEQ ID NO: 142938 - protein, 561 aa, Medicago sativa; identical to SEQ ID NO: 24251

SEQ ID NO: 142939 - DNA, 1509 bp, Medicago sativa; identical to SEQ ID NO: 24252
  CDS (1)..(1509)

SEQ ID NO: 142940 - protein, 502 aa, Medicago sativa; identical to SEQ ID NO: 24253

SEQ ID NO: 142941 - DNA, 1014 bp, Beta vulgaris
  CDS (1)..(1014)
atggaacccaaaactgagttatcactcggtggtggaatcaggagttctgggtttgttacaactaaaatggaggatacagaagaaaaagaagtgatagagttgccaaaaccattagaaaatttacatgaaattggaccacccccatttttaagtaagacatttgagatagtagaagacccagaaactgacacaattgtttcatggggtgtaacttttgatagtttcattgtttgggatatctctaagttctctgatttgctttctaagtattttaagcatcgtaatttcaacagctttgtccgtcaacttaatacttatggattcagaaaagtccatcttgatcggttggagtatgcaaattcagggtttcaaaagggtaaaaagcatttgttgaagactataaaaaggagaaaccatggtgcaaacaacaatactgcactattgctccaaagagagactgcaatagaaaatattaagaaagaacaggaggcgctaaagctcgagatccttgatcttaagaaagaacaacagaactcgaacacgtgtttggctgcattgggagagcgtgtgaagttcgttgaatggaagcaacgtgagttcattatgctcattgccaaggcaatgaaaagaacttcctcatttcagcaggttctccaaaactataggcacaacaaagttctgagtagtggagaattttacaagaaacgtagattggcctcaactagcgacagtctggcactggcagaccagtttctggcaaacagtccgaccacgacccaaaataaggaagatgtgtctacttttcagtatgaagcaaactcgtttgttgggtctgcgggccaaaagtcgaacttggcatccgagactagtagtccagatttgtcttctggaagctacataatgtgggaaaagctaatggcagatgatgtgatctgtaaagatgatagggaggagaagtatgtccatgaattagagaatttgattactaaaccatccagcttgatttgcaaataa

SEQ ID NO: 142942 - protein, 337 aa, Beta vulgaris
MEPKTELSLGGGIRSSGFVTTKMEDTEEKEVIELPKPLENLHEIGPPPFLSKTFEIVEDPETDTIVSWGVTFDSFIVWDISKFSDLLSKYFKHRNFNSFVRQLNTYGFRKVHLDRLEYANSGFQKGKKHLLKTIKRRNHGANNNTALLLQRETAIENIKKEQEALKLEILDLKKEQQNSNTCLAALGERVKFVEWKQREFIMLIAKAMKRTSSFQQVLQNYRHNKVLSSGEFYKKRRLASTSDSLALADQFLANSPTTTQNKEDVSTFQYEANSFVGSAGQKSNLASETSSPDLSSGSYIMWEKLMADDVICKDDREEKYVHELENLITKPSSLICK

SEQ ID NO: 142943 - DNA, 1299 bp, Brassica oleracea; identical to SEQ ID NO: 24454
  CDS (1)..(1299)

SEQ ID NO: 142944 - protein, 432 aa, Brassica oleracea; identical to SEQ ID NO: 24455

SEQ ID NO: 142945 - DNA, 1533 bp, Glycine max; identical to SEQ ID NO: 24260
  CDS (1)..(1533)

SEQ ID NO: 142946 - protein, 510 aa, Glycine max; identical to SEQ ID NO: 24261

SEQ ID NO: 142947 - DNA, 1116 bp, Helianthus annuus
  CDS (1)..(1116)
atggcaggagtagtaaaagagtttgactctagtcatgatatgttcaaagtcagagaagaacccaaggtcgtttttaataataaagatttgtctgaagagatgatgaagattaaagaggaacccatgttagtgtttgatgagcatgaagattttgttggtggtgaggaggcaccgaagccgattgaagggctgagagacggcggacctccgccgtttctcaagaaaacatttgaaatggtggatgacccaacaacagattcgattatttcatggagtagttctaaaaatagttttattctttgggatcctcataagttttctactgatcttttgccgcaaagattcaagcacaataatttctctagctttgttcgtcaactaaacacttataggttcaagaaaatcgatcctgaccgatgggaattcgcaaacgagtttttccaaaagggtaagaagcatttgttaagagacataaagaggagaacaaaccagccacaaaacacacaaaaacaagaggaaatcaggaaacaagaacaacaacaatgttgtggtcatcaaacaaactctacaatggagaccgagctaaagaatctaagaaaagaaagaatcacacttaaacaagagatcttgaagatgaaacagcaacaagagaacaccgaaaagcatttggaaatggttgaagaacgtatgctaagaatggagttcaagcaacagcagctgttagttttcatgtctaaagcgtttagaaatccgattttcgttaagcttttgcaacatctggtgcaaaaacaaaaaacgggaagtgtcgaaatgtgcaaaaagcgaaaacttgagcaaatgctaaacactgatgatctcgatcgttttcaagaaatgtggaatatgattgaacctgatgcgtatactgtgttgtcatcagatggatcagtaagcccgcctgaagatcaaaacacgagtgacaaatctggatccaacggttcagattacaattcggaaagctttatattgtgggagaaactaatggaggacgaactgatattcggcggtgaacaatcgggtaaagatcaaacagaaacttatctccaagaatgggaagagttgatcccaaaagcttaa

SEQ ID NO: 142948 - protein, 371 aa, Helianthus annuus
MAGVVKEFDSSHDMFKVREEPKVVFNNKDLSEEMMKIKEEPMLVFDEHEDFVGGEEAPKPIEGLRDGGPPPFLKKTFEMVDDPTTDSIISWSSSKNSFILWDPHKFSTDLLPQRFKHNNFSSFVRQLNTYRFKKIDPDRWEFANEFFQKGKKHLLRDIKRRTNQPQNTQKQEEIRKQEQQQCCGHQTNSTMETELKNLRKERITLKQEILKMKQQQENTEKHLEMVEERMLRMEFKQQQLLVFMSKAFRNPIFVKLLQHLVQKQKTGSVEMCKKRKLEQMLNTDDLDRFQEMWNMIEPDAYTVLSSDGSVSPPEDQNTSDKSGSNGSDYNSESFILWEKLMEDELIFGGEQSGKDQTETYLQEWEELIPKA

SEQ ID NO: 142949 - DNA, 1527 bp, Solanum peruvianum
  CDS (1)..(1527)
atgaacccatttgataaaaaacaagaacctgatactgattcaaaaaccccatttttgactgaaatggactctgaatttgctgcgttttcaccaatttcactcccttttgctgacccatcttctccttttatcaattttggatcttttgccactcctttgagccaacatccagttggagaaggggaaagggaaggagaaggagaaggaggagaaattgaacagccagctgagggaggattgggtgtgccgcagcctatggagtgtttacatgggatacaaattccgccatttttgtcaaagacttttgatttggttgaggaccctttattggatacgattatttcttggggtacaaatggagaaagctttgtagtttgggatccagtggagttttcaagattggttcttcctaggaatttcaagcacagcaatttctccagctttgttcgacagcttaatacatatggatttcgcaaaatcgatgctgacaggtgggagtttgcgaatgaagggttctcgagagggaagaggcatttgttgaagaacatacagaggcgaaggtcacagcagggtgggagttcttctggatcatctgctgaagcaggaaaaggtactatggatgagatagagaaactcaggaatgagaagagtttgatgatgcaggaagttgttgagttgcagcagcagcagcatggaacagttcaactaatggaatccgttaatgaaaagcttcaggctgcagaacaaagacagaagcagatggtttcattcttggccaaggtgcttcaaaatcccacattcttggctcgtgttcggcagatgaaggagcaaggagaaattactagtccaagaacaatgaggaaatttgttaaacatcagtcacatggtccggatggagtgggatcgtcttcaatggaagggcagatagtcaagttcaggtctgactttcaagaccttgcaggatgctttgacagcccagatttcaatccagttgtggatcaacaactcccagaaactggtttaggagcggaagccatgccatttgaaggtggtcctgttgctgatggactgacagtggcacatgaacttcttaattgttcagatcgggaaatacgaggagcttcattctttaactccggaggctctcaattcaaagggaagaatgtagctagtcctcaaatagaagttatgcctgagtactttgcctcttttccagaggagatggggaaggagaagaacatttcaggattttctgcaccagctattggaagtatggtgaaagatgaggaactttggggtatgggttttgaagccagtgctggcatgccaagcactggccccgagttatgggatagtcttagcagctacgttccagacttcggtgttagctctggtttgtcagatttatgggatatagatcccttgcaggtagctggaagttctggggtcgataagtggccagctgacgggtctccttttggtcagtctgaaagccatgcgaaccagcccaagaatgatagtttctag

SEQ ID NO: 142950 - protein, 508 aa, Solanum peruvianum; identical to SEQ ID NO: 24461

SEQ ID NO: 142951 - DNA, 1488 bp, Arabidopsis thaliana; identical to SEQ ID NO: 24270
  CDS (1)..(1488)

SEQ ID NO: 142952 - protein, 495 aa, Arabidopsis thaliana; identical to SEQ ID NO: 24271

SEQ ID NO: 142953 - DNA, 1563 bp, Arabidopsis thaliana; identical to SEQ ID NO: 24272
  CDS (118)..(1563)

SEQ ID NO: 142954 - protein, 481 aa, Arabidopsis thaliana; identical to SEQ ID NO: 24273

SEQ ID NO: 142955 - DNA, 1221 bp, Arabidopsis thaliana
  CDS (1)..(1221)
atggatccttcatttaggttcattaaagaggagtttcctgctggattcagtgattctccatcaccaccatcttcttcttcatacctttattcatcttccatggctgaagcagccataaatgatccaacaacattgagctatccacaaccattagaaggtctccatgaatcagggccacctccatttttgacaaagacatatgacttggtggaagattcaagaaccaatcatgtcgtgtcttggagcaaatccaataacagcttcattgtctgggatccacaggccttttctgtaactctccttcccagattcttcaagcacaataacttctccagttttgtccgccagctcaacacatatggtttcagaaaggtgaatccggatcggtgggagtttgcaaacgaagggtttcttagagggcaaaagcatctcctcaagaacataaggagaagaaaaacaagtaataatagtaatcaaatgcaacaacctcaaagttctgaacaacaatctctagacaatttttgcatagaagtgggtaggtacggtctagatggagagatggacagcctaaggcgagacaagcaagtgttgatgatggagctagtgagactaagacagcaacaacaaagcaccaaaatgtatctcacattgattgaagagaagctcaagaagaccgagtcaaaacaaaaacaaatgatgagcttccttgcccgcgcaatgcagaatccagattttattcagcagctagtagagcagaaggaaaagaggaaagagatcgaagaggcgatcagcaagaagagacaaagaccgatcgatcaaggaaaaagaaatgtggaagattatggtgatgaaagtggttatgggaatgatgttgcagcctcatcctcagcattgattggtatgagtcaggaatatacatatggaaacatgtctgaattcgagatgtcggagttggacaaacttgctatgcacattcaaggacttggagataattccagtgctagggaagaagtcttgaatgtggaaaaaggaaatgatgaggaagaagtagaagatcaacaacaagggtaccataaggagaacaatgagatttatggtgaaggtttttgggaagatttgttaaatgaaggtcaaaattttgattttgaaggagatcaagaaaatgttgatgtgttaattcagcaacttggttatttgggttctagttcacacactaattaa

SEQ ID NO: 142956 - protein, 406 aa, Arabidopsis thaliana
MDPSFRFIKEEFPAGFSDSPSPPSSSSYLYSSSMAEAAINDPTTLSYPQPLEGLHESGPPPFLTKTYDLVEDSRTNHVVSWSKSNNSFIVWDPQAFSVTLLPRFFKHNNFSSFVRQLNTYGFRKVNPDRWEFANEGFLRGQKHLLKNIRRRKTSNNSNQMQQPQSSEQQSLDNFCIEVGRYGLDGEMDSLRRDKQVLMMELVRLRQQQQSTKMYLTLIEEKLKKTESKQKQMMSFLARAMQNPDFIQQLVEQKEKRKEIEEAISKKRQRPIDQGKRNVEDYGDESGYGNDVAASSSALIGMSQEYTYGNMSEFEMSELDKLAMHIQGLGDNSSAREEVLNVEKGNDEEEVEDQQQGYHKENNEIYGEGFWEDLLNEGQNFDFEGDQENVDVLIQQLGYLGSSSHTN

SEQ ID NO: 142957 - DNA, 1056 bp, Solanum peruvianum; identical to SEQ ID NO: 24466
  CDS (1)..(1056)

SEQ ID NO: 142958 - protein, 351 aa, Solanum peruvianum; identical to SEQ ID NO: 24467

SEQ ID NO: 142959 - DNA, 1584 bp, Solanum lycopersicum; identical to SEQ ID NO: 24280
  CDS (1)..(1584)

SEQ ID NO: 142960 - protein, 527 aa, Solanum lycopersicum; identical to SEQ ID NO: 24281

SEQ ID NO: 142961 - DNA, 1584 bp, Solanum peruvianum; identical to SEQ ID NO: 24282
  CDS (1)..(1584)

SEQ ID NO: 142962 - protein, 527 aa, Solanum peruvianum; identical to SEQ ID NO: 24283

SEQ ID NO: 142963 - DNA, 1038 bp, Arabidopsis thaliana; identical to SEQ ID NO: 24472
  CDS (1)..(1038)

SEQ ID NO: 142964 - protein, 345 aa, Arabidopsis thaliana; identical to SEQ ID NO: 24473

SEQ ID NO: 142965 - DNA, 1366 bp, Arabidopsis thaliana
  CDS (1)..(1239)
atgagcccaaaaaaagatgctgtttctaaaccaactccaatttcagtacccgtttcgagacgatccgatatacccgggtctctctacgtcgacactgacatgggtttctctgggtcaccacttcccatgccactagacatcttacaagggaatccaattccaccttttttatccaagacttttgatttggttgatgacccgactcttgacccggtcatctcttggggactgaccggagctagcttcgtagtttgggatcctctagagtttgccagaatcatacttccaaggaatttcaaacacaacaatttctccagcttcgtcagacagcttaacacttatggatttcgaaagattgatactgacaagtgggaattcgctaacgaggctttccttagaggcaagaagcatcttctgaagaacattcatcgtcgtcgatcaccacaatccaaccaaacttgctgcagtagcactagccaaagccaagggtcacctactgaggttggaggagagattgagaagctgaggaaagagcggcgtgcattgatggaggaaatggttgagcttcagcagcaaagcagaggcacagctcgacatgtggacactgtaaaccagaggctgaaagctgcagagcaacgtcagaagcaattgctctctttcttggctaagttgtttcagaaccggggtttcttggaacgcctgaagaacttcaaaggaaaagaaaaaggaggagctcttggattggaaaaggcgagaaagaagttcatcaagcaccaccagcagcctcaagattctccaacaggaggggaggtggtgaagtatgaagctgatgattgggagagattgctaatgtatgacgaagagactgagaacaccaagggtttaggagggatgacttcaagcgatccaaaaggcaagaacttgatgtatccatcagaagaagagatgagcaaaccagattacttgatgtccttcccatctcctgaaggacttattaaacaagaagagacgacatggagcatgggtttcgatactacaataccgagtttcagcaacaccgatgcatggggaaacacaatggactataatgatgtctcagagtttggttttgctgcagaaacaacaagtgatggtttgcctgatgtctgctgggaacaatttgctgcaggaatcacagagactggattcaactggccaactggtgatgatgatgataatacgccaatgaatgatccttaggatcttttcatatatagtttagaccaaaaacccgtttcttatcgggtgaactattaattcattattcattttgaatgcactctttatacatatatataatattgatgagtttgattgttcctttctt

SEQ ID NO: 142966 - protein, 412 aa, Arabidopsis thaliana; identical to SEQ ID NO: 24439

SEQ ID NO: 142967 - DNA, 1401 bp, Arabidopsis thaliana; identical to SEQ ID NO: 24284
  CDS (1)..(1401)

SEQ ID NO: 142968 - protein, 466 aa, Arabidopsis thaliana; identical to SEQ ID NO: 24285

SEQ ID NO: 142969 - DNA, 1125 bp, Arabidopsis thaliana
  CDS (1)..(1125)
atggtgaaatcgacggacggtggtggtgggtcttcttcttcttcttcagtggcgccgttcttgagaaaatgttacgatatggttgatgattctactactgactctataatctcatggagtccaagtgcagataatagcttcgttatcttggacaccaccgtcttctctgttcaactcttgcctaaatactttaaacacagcaatttctctagcttcattcgtcagctcaatatctacggttttagaaaagttgatgcagatcgatgggagtttgcgaatgacgggtttgtgagaggtcaaaaggatttgctgaagaatgttatcaggaggaagaatgttcaaagtagtgagcagagcaaacatgagagtacaagtacaacatatgctcaggaaaagagtggattgtggaaggaagttgatattttgaaaggtgataagcaggtattggcgcaggagttgatcaaagttaggcagtatcaggaggtgacggatactaagatgttacatttagaagacagagttcaaggaatggaagagagtcagcaggagatgctttcgtttttggttatggttatgaagaatccaagtcttttagttcagttacttcagccaaaggagaaaaacacttggcgaaaagcgggggaaggagcgaagattgtggaagaagtgactgatgaaggagaatcaaactcatatggtcttcctttagtaacataccagccaccatcggacaacaatggaactgcaaagtcaaactcgaacgacgtaaatgatttcttgagaaacgccgatatgttgaagttctgcttagatgaaaaccatgtgccattgatcatacctgatctatacgatgatggagcatgggaaaagcttttgttgttgagcccttcaaggaagaagacgaagaagcaggagaacattgtgaagaaaggaaaggatgatttgacattggaggaggaggaggaggatggaacaatggaattagacaagagctatatgcttaagctgatatcagaagagatggagaaaccagatgactttgaatttggacagcttactcctgagaggtctaggaaccttgagattttgacagagcagatggaattgctggcttcaaatgaatag

SEQ ID NO: 142970 - protein, 374 aa, Arabidopsis thaliana
MVKSTDGGGGSSSSSSVAPFLRKCYDMVDDSTTDSIISWSPSADNSFVILDTTVFSVQLLPKYFKHSNFSSFIRQLNIYGFRKVDADRWEFANDGFVRGQKDLLKNVIRRKNVQSSEQSKHESTSTTYAQEKSGLWKEVDILKGDKQVLAQELIKVRQYQEVTDTKMLHLEDRVQGMEESQQEMLSFLVMVMKNPSLLVQLLQPKEKNTWRKAGEGAKIVEEVTDEGESNSYGLPLVTYQPPSDNNGTAKSNSNDVNDFLRNADMLKFCLDENHVPLIIPDLYDDGAWEKLLLLSPSRKKTKKQENIVKKGKDDLTLEEEEEDGTMELDKSYMLKLISEEMEKPDDFEFGQLTPERSRNLEILTEQMELLASNE

SEQ ID NO: 142971 - DNA, 1428 bp, Oryza sativa; identical to SEQ ID NO: 24290
  CDS (1)..(1428)

SEQ ID NO: 142972 - protein, 475 aa, Oryza sativa; identical to SEQ ID NO: 24291

SEQ ID NO: 142973 - DNA, 1131 bp, Oryza sativa
  CDS (1)..(1131)
atgaatccattgcgcgtcatcgtgaaagaggaggagctcgacttcgccgccgcggcggcggcggcggcggcgggtgagggctcgccgtcgtcgtgggcggtcggcgtgatggacctgcctcgtccaatggagggcctcggcgaggccgggccgccgccgttcttgtgcaagacgtacgaggtcgtggacgaccccggcacggacaccgtcatctcgtgggggttcgccggcaacagcttcgtcgtctgggacgccaatgcgttcgccgccgtgctcctcccgcgctacttcaagcacagcaacttctccagcttcgtccgccagctcaacacctacgggttcaggaaggtcgatccggatagatgggagttcgcgaacgaggggttcttgcgggggaagaaggagctcctgaagacgatcaagcgacgccggccgccgccgtcgagccccccgtcgtcttcgtcgtcgtcgtcgtcgtcgcagcaccagcagcagccggcggcggcgtgcctggaggtggggcagttcgggcgcgacggcgtggtgaaccggctgcagcgcgacaagagcgtcctgatcgcggaggtggtgaagctgcggcaggagcagcagacgacgcgcgcgcagatgcaggcgatggaggagcgcatctcggcggcggagcagaagcagcagcagatgacggtgttcctggcgcgcgccatgaagaacccgggcttcctccagatgctcgtcgaccggcaggccggccagcacggcgcccggaacagggtgctcgaggacgccctctccaagaagcgccgccgccccatcgagtacctcctcacccgcaacggcgagacctgcgccgccggcgagtcggcagctatgctggcggcggacggcgtggcggagccggacggcgacaccaccccgcgcggcgacggcggcggcggcggcggcggcgacaccgagagcttctggatgcagctgctcagcctcggcctggaggagaagcagcgagaggacggcgtcgccggcggcgtccaggagagtaacagcggcggcgctgacgtggacaacgacgaggaggatgacgacgatgacgtggacgtgctcgtgcagagcatatatcacctcagccccaagtga

SEQ ID NO: 142974 - protein, 376 aa, Oryza sativa
MNPLRVIVKEEELDFAAAAAAAAAGEGSPSSWAVGVMDLPRPMEGLGEAGPPPFLCKTYEVVDDPGTDTVISWGFAGNSFVVWDANAFAAVLLPRYFKHSNFSSFVRQLNTYGFRKVDPDRWEFANEGFLRGKKELLKTIKRRRPPPSSPPSSSSSSSSSQHQQQPAAACLEVGQFGRDGVVNRLQRDKSVLIAEVVKLRQEQQTTRAQMQAMEERISAAEQKQQQMTVFLARAMKNPGFLQMLVDRQAGQHGARNRVLEDALSKKRRRPIEYLLTRNGETCAAGESAAMLAADGVAEPDGDTTPRGDGGGGGGGDTESFWMQLLSLGLEEKQREDGVAGGVQESNSGGADVDNDEEDDDDDVDVLVQSIYHLSPK

SEQ ID NO: 142975 - DNA, 1074 bp, Oryza sativa; identical to SEQ ID NO: 24476
  CDS (1)..(1074)

SEQ ID NO: 142976 - protein, 357 aa, Oryza sativa; identical to SEQ ID NO: 24477

SEQ ID NO: 142977 - DNA, 1521 bp, Oryza sativa; identical to SEQ ID NO: 24236
  CDS (1)..(1521)

SEQ ID NO: 142978 - protein, 506 aa, Oryza sativa; identical to SEQ ID NO: 24237

SEQ ID NO: 142979 - DNA, 996 bp, Oryza sativa
  CDS (1)..(996)
atggactactcgacggtgaagcaggaggaggtggaggtggtggtgctggatggagaggaggaggcggcggcggcggcggcgccagtgccgttgccggcggcgatgggggtgggggcggcggtggcgccgttcctggtgaagacgttcgagatggtggaggacccggcgacggacgcggtggtgtcgtggggcggcgcggcgaggaacagcttcgtggtgtgggatccccacgccttcgccgccggcctcctcccgctccacttcaagcacgccaacttctccagcttcctccgccagctcaacacctacggattccggaaggtgagcgccgacaggtgggagttcgccaacgaggacttcctcggcgggcagcgccacctcctcgccaacatccgccgccgccgccgcggcgccggcacgggctcgacgacgccgcgtgctgtgaactgcggcggcggcggcggcgagggggaggtggagaggctgaggagggacaaggaggcgctggcgagggagctggcgcggctgcggcggcagcagcaggaggcccgcgcgcagctgctcgacatggagcgccgggtgcggggcaccgagcggcggcaggagcagtgcacggagttcctcgcgcgggcgctcaggagccccgacgtcctcgacaacatcgcgcgccgccacgccgcggcggtcgaacgaaagaagcggcggatgctcgccgccgccgcggacgacgacggcctcaccttcgaggcgctggcgctggccgcggcggccgacaccagccatagcacgggcggcgcggtgaccacggacatgatatggtacgagctgctcggcgaggagcaggcggagatcgacatcgaggtggaccagctcgtcgcctccgcctccgccgccgccgacacggcatcggaggcggagccatgggaggagatgggagaggaggaggtgcaggagctggtgcagcagatcgattgcttggcctcgccgagttcttga

SEQ ID NO: 142980 - protein, 331 aa, Oryza sativa
MDYSTVKQEEVEVVVLDGEEEAAAAAAPVPLPAAMGVGAAVAPFLVKTFEMVEDPATDAVVSWGGAARNSFVVWDPHAFAAGLLPLHFKHANFSSFLRQLNTYGFRKVSADRWEFANEDFLGGQRHLLANIRRRRRGAGTGSTTPRAVNCGGGGGEGEVERLRRDKEALARELARLRRQQQEARAQLLDMERRVRGTERRQEQCTEFLARALRSPDVLDNIARRHAAAVERKKRRMLAAAADDDGLTFEALALAAAADTSHSTGGAVTTDMIWYELLGEEQAEIDIEVDQLVASASAAADTASEAEPWEEMGEEEVQELVQQIDCLASPSS

SEQ ID NO: 142981 - DNA, 1119 bp, Oryza sativa
  CDS (1)..(1119)
atggatgatccaatgctgaatgcggtgaaggaggaggagagccacggggacggaggagggttggaggtggtggcgggagaggatggggcggcggcggtggcggcgggggtggcgccgaggccgatggaggggctgcacgacgccgggccgccgccgttcctgaccaagacgtacgacatggtggacgacgccggcaccgacgccgccgtgtcgtggagcgcgacgagcaacagcttcgtggtgtgggatccccacgccttcgccaccgtcttgctccccaggttcttcaagcacaacaacttctccagcttcgtcaggcagctcaacacctatggtttcagaaaggtggatcctgatcggtgggaatttgcaaatgagaattttctgcggggacagagacatcttctcaagaacatcaagcgtagaaaaccaccttcccatactgcttcaaaccagcaatcccttgggccataccttgaggtgggccactttggatatgatgctgagatagaccggctgaagagagacaagcaattattgatggctgaggtggtgaagctaaggcaggagcagcagaatacaaaggcaaatctgaaagccatggaggataggctgcaaggaaccgagcagaggcaacagcagatgatggcattcttggcgcgtgtcatgaaaaatcctgagttcttaaaacaacttatgtcccagaatgagatgagaaaggagctccaagatgccatttcaaagaaaagaaggcgtcgcatagatcagggacctgaagttgacgacgtcggcactagcagtagcatagagcaagagtcaccggccttgtttgatccccaggagtcggtggaattcctcatcgatgggattccctccgatcttgaaaactcagctatggatgctggaggtctggtggagccacaggatttcgatgtcggcgcctccgaacagcagcagatcgggccccagggggagttgaacgacaatttctgggaggagctgctgaacgaagggcttgttggtgaggagaacgacaacccggtcgtcgaggacgacatgaatgtgttgtcggagaagatgggttacctcaactcaaatggcccaacggctggggaatag

SEQ ID NO: 142982 - protein, 372 aa, Oryza sativa
MDDPMLNAVKEEESHGDGGGLEVVAGEDGAAAVAAGVAPRPMEGLHDAGPPPFLTKTYDMVDDAGTDAAVSWSATSNSFVVWDPHAFATVLLPRFFKHNNFSSFVRQLNTYGFRKVDPDRWEFANENFLRGQRHLLKNIKRRKPPSHTASNQQSLGPYLEVGHFGYDAEIDRLKRDKQLLMAEVVKLRQEQQNTKANLKAMEDRLQGTEQRQQQMMAFLARVMKNPEFLKQLMSQNEMRKELQDAISKKRRRRIDQGPEVDDVGTSSSIEQESPALFDPQESVEFLIDGIPSDLENSAMDAGGLVEPQDFDVGASEQQQIGPQGELNDNFWEELLNEGLVGEENDNPVVEDDMNVLSEKMGYLNSNGPTAGE

SEQ ID NO: 142983 - DNA, 1065 bp, Brassica napus; identical to SEQ ID NO: 24478
  CDS (1)..(1065)

SEQ ID NO: 142984 - protein, 354 aa, Brassica napus; identical to SEQ ID NO: 24479

SEQ ID NO: 142985 - DNA, 1065 bp, Brassica napus; identical to SEQ ID NO: 24480
  CDS (1)..(1065)

SEQ ID NO: 142986 - protein, 354 aa, Brassica napus; identical to SEQ ID NO: 24481

SEQ ID NO: 142987 - DNA, 21 bp, Artificial sequence
  primer
atgacggcaattccaaacgtc

SEQ ID NO: 142988 - DNA, 27 bp, Artificial sequence
  primer
ctactctatctctatcctcccatttac

SEQ ID NO: 142989 - protein, 197 aa, Artificial sequence
  consensus sequence
  Variant (2)..(2): Xaa in position 2 is any amino acid
  Variant (6)..(6): Xaa in position 6 is any amino acid
  Variant (9)..(11): Xaa in position 9 to 11 is any amino acid
  Variant (13)..(13): Xaa in position 13 is any amino acid
  Variant (15)..(16): Xaa in position 15 to 16 is any amino acid
  Variant (19)..(21): Xaa in position 19 to 21 is any amino acid
  Variant (24)..(27): Xaa in position 24 to 27 is any amino acid
  Variant (28)..(28): Xaa in position 28 is any or no amino acid
  Variant (32)..(32): Xaa in position 32 is any amino acid
  Variant (36)..(38): Xaa in position 36 to 38 is any amino acid
  Variant (40)..(41): Xaa in position 40 to 41 is any amino acid
  Variant (42)..(42): Xaa in position 42 is any or no amino acid
  Variant (46)..(47): Xaa in position 46 to 47 is any amino acid
  Variant (51)..(51): Xaa in position 51 is any amino acid
  Variant (57)..(57): Xaa in position 57 is any amino acid
  Variant (68)..(68): Xaa in position 68 is any amino acid
  Variant (70)..(70): Xaa in position 70 is any amino acid
  Variant (79)..(79): Xaa in position 79 is any amino acid
  Variant (81)..(82): Xaa in position 81 to 82 is any amino acid
  Variant (84)..(84): Xaa in position 84 is any amino acid
  Variant (86)..(86): Xaa in position 86 is any amino acid
  Variant (90)..(90): Xaa in position 90 is any amino acid
  Variant (92)..(92): Xaa in position 92 is any amino acid
  Variant (95)..(110): Xaa in position 95 to 110 is any amino acid
  Variant (111)..(137): Xaa in position 111 to 137 is any or no amino acid
  Variant (139)..(141): Xaa in position 139 to 141 is any amino acid
  Variant (143)..(148): Xaa in position 143 to 148 is any amino acid
  Variant (150)..(151): Xaa in position 150 to 151 is any amino acid
  Variant (153)..(155): Xaa in position 153 to 155 is any amino acid
  Variant (157)..(157): Xaa in position 157 is any amino acid
  Variant (161)..(177): Xaa in position 161 to 177 is any amino acid
  Variant (179)..(180): Xaa in position 179 to 180 is any amino acid
  Variant (182)..(186): Xaa in position 182 to 186 is any amino acid
  Variant (190)..(193): Xaa in position 190 to 193 is any amino acid
  Variant (194)..(194): Xaa in position 194 is any or no amino acid
  Variant (196)..(196): Xaa in position 196 is any amino acid
PXPFLXKTXXXVXDXXTDXXXSWXXXXXNSFXVWDXXXFXXXLLPXXFKHXNFSSFXRQLNTYGFRKXDXDRWEFANEXFXXGXKXLLKXIXRRXXXXXXXXXXXXXXXXXXXXXXXXXXXXXXXXXXXXXXXXXXXEXXXLXXXXXXLXXEXXXLXQQQXXXXXXXXXXXXXXXXXEXXQXXXXXFLAXXXXXPXF

SEQ ID NO: 142990 - protein, 76 aa, Artificial sequence
  protein pattern
  Variant (2)..(2): Xaa in position 2 is any amino acid
  Variant (3)..(4): Xaa in position 3 to 4 is any or no amino acid
  Variant (6)..(9): Xaa in position 6 to 9 is any amino acid
  Variant (10)..(11): Xaa in position 10 to 11 is any or no amino acid
  Variant (14)..(15): Xaa in position 14 to 15 is Ile or Val
  Variant (17)..(17): Xaa in position 17 is Asp, Asn or Ser
  Variant (18)..(20): Xaa in position 18 to 20 is any amino acid
  Variant (22)..(22): Xaa in position 22 is Ala, Gly or Ser
  Variant (23)..(24): Xaa in position 23 to 24 is any amino acid
  Variant (25)..(25): Xaa in position 25 is Ile or Leu
  Variant (28)..(29): Xaa in position 28 to 29 is any amino acid
  Variant (33)..(33): Xaa in position 33 is any amino acid
  Variant (39)..(39): Xaa in position 39 is Ile or Val
  Variant (44)..(44): Xaa in position 44 is Ser or Thr
  Variant (48)..(48): Xaa in position 48 is Lys or Arg
  Variant (50)..(50): Xaa in position 50 is Ile or Val
  Variant (51)..(51): Xaa in position 51 is Asp or Asn
  Variant (52)..(52): Xaa in position 52 is Pro, Ser or Thr
  Variant (53)..(53): Xaa in position 53 is Asp or Glu
  Variant (54)..(54): Xaa in position 54 is Lys or Arg
  Variant (58)..(58): Xaa in position 58 is Ala or Leu
  Variant (60)..(60): Xaa in position 60 is Asp or Glu
  Variant (61)..(61): Xaa in position 61 is any amino acid
  Variant (63)..(64): Xaa in position 63 to 64 is any amino acid
  Variant (65)..(65): Xaa in position 65 is Asp or Gly
  Variant (66)..(66): Xaa in position 66 is any amino acid
  Variant (67)..(67): Xaa in position 67 is Lys or Arg
  Variant (68)..(68): Xaa in position 68 is any amino acid
  Variant (72)..(72): Xaa in position 72 is any amino acid
  Variant (74)..(74): Xaa in position 74 is any amino acid
VXXXSXXXXXXSFXXWXXXXFXXXXLPXXFKHXNFSSFXRQLNXYGFXKXXXXXWEFXNXXFXXXXXXLLKXIXRR

SEQ ID NO: 142991 - protein, 83 aa, Artificial sequence
  protein pattern
  Variant (2)..(8): Xaa in position 2 to 8 is any amino acid
  Variant (9)..(9): Xaa in position 9 is any or no amino acid
  Variant (11)..(11): Xaa in position 11 is any or no amino acid
  Variant (14)..(14): Xaa in position 14 is Gly or Ser
  Variant (15)..(15): Xaa in position 15 is any amino acid
  Variant (16)..(16): Xaa in position 16 is Ala, Gly, Asn, Ser or Thr
  Variant (17)..(18): Xaa in position 17 to 18 is any amino acid
  Variant (21)..(22): Xaa in position 21 to 22 is Ile or Val
  Variant (24)..(24): Xaa in position 24 is Asp, Asn or Ser
  Variant (25)..(27): Xaa in position 25 to 27 is any amino acid
  Variant (29)..(31): Xaa in position 29 to 31 is any amino acid
  Variant (32)..(32): Xaa in position 32 is any or no amino acid
  Variant (34)..(34): Xaa in position 34 is Pro or Ser
  Variant (35)..(36): Xaa in position 35 to 36 is any amino acid
  Variant (40)..(40): Xaa in position 40 is any amino acid
  Variant (43)..(43): Xaa in position 43 is Asn or Ser
  Variant (46)..(46): Xaa in position 46 is Ile or Val
  Variant (51)..(51): Xaa in position 51 is Ser or Thr
  Variant (55)..(55): Xaa in position 55 is Lys or Arg
  Variant (57)..(57): Xaa in position 57 is Ile or Val
  Variant (58)..(59): Xaa in position 58 to 59 is any amino acid
  Variant (60)..(60): Xaa in position 60 is Asp or Glu
  Variant (61)..(61): Xaa in position 61 is Lys or Arg
  Variant (62)..(62): Xaa in position 62 is any amino acid
  Variant (64)..(64): Xaa in position 64 is Phe or Tyr
  Variant (65)..(65): Xaa in position 65 is Ala or Leu
  Variant (67)..(67): Xaa in position 67 is Asp, Glu or Ser
  Variant (68)..(68): Xaa in position 68 is Ala, Asp, Gly or Asn
  Variant (70)..(71): Xaa in position 70 to 71 is any amino acid
  Variant (72)..(72): Xaa in position 72 is Asp or Gly
  Variant (73)..(73): Xaa in position 73 is any amino acid
  Variant (74)..(74): Xaa in position 74 is Lys or Arg
  Variant (75)..(75): Xaa in position 75 is any amino acid
  Variant (79)..(79): Xaa in position 79 is any amino acid
  Variant (81)..(81): Xaa in position 81 is any amino acid
VXXXXXXXXVXSWXXXXXSFXXWXXXXFXXXXLXXXFKHXNFXSFXRQLNXYGFXKXXXXXXEXXNXXFXXXXXXLLKXIXRR

SEQ ID NO: 142992 - DNA, 1008 bp, Arabidopsis thaliana
  CDS (1)..(1008)
atggcacctgagatcaataccaaactcaccgtaccggtccactcagcaaccggcggagaaaagagggcgtacgtgactttccttgctggaactggagactacgtgaaaggggtggtgggtcttgctaaggggctaaggaaagctaagagcaagtacccactcgtggtggcggttttgccggatgtaccggaggatcaccggaaacagttggtggatcaaggctgtgttgttaaggagatagagccggtttatccaccggagaatcaaaccgagtttgctatggcttactatgtcattaactactctaagcttcgtatctgggagttcgtggagtacaacaagatgatatacttggacggtgacatacaagtgttcgacaacatagatcacttgtttgatcttccaaacggccaattctatgcagttatggactgtttttgcgagaagacatggagtcactcgccacagtacaagatcggttattgccaacagtgtccggacaaggtgacatggccagaggccaagcttggtcctaagccgcctttgtacttcaacgccggtatgttcgtttacgagcctaacctctccacttatcataacctcttggagacggtcaaaattgtgcctcccactctttttgctgaacaggattttttgaatatgtacttcaaggacatatacaagccaataccaccagtgtataacttggtcttggcaatgctttggaggcatccagagaatatagagcttgaccaagtcaaagttgttcactactgtgctgctggtgctaaaccttggagattcactggagaagaagagaacatggacagagaagacattaagatgctggtcaagaaatggtgggacatttacaatgacgagtctcttgattacaagaatgttgtcattggggacagccacaagaagcaacagacacttcagcagtttatcgaagctttgtctgaagccggtgcgcttcagtatgtcaaagctccatctgcagcttaa

SEQ ID NO: 142993 - protein, 335 aa, Arabidopsis thaliana; identical to SEQ ID NO: 140890

SEQ ID NO: 142994 - DNA, 1454 bp, Glycine max
  CDS (123)..(1115)
  misc_feature (1436)..(1436): n is a, g, c or t
gctcgggctttattcaaaacaaccaacctcttcagtgatctttgattagtactaagctaaaccatttcttattccctcaaaatcaaaacctttttctttctagctatttcccttttcaaatcatgccacctaacatcaccaccgttgttgccaatgtcaccaccgagcaattacccaaggctcgtggaggaagtgggcgtgccttcgtgacctttcttgctgggaacggtgattacgtaaagggtgtcgtgggtttggccaaaggactgagaaaggccaaaagcatgtaccctttggtggttgctgtgttaccagatgttcctgaagaacatcgtgagattctcaaatcccaaggttgcattgtcagggagattgaacctgtgtaccctcctgagaaccagacccagttcgccatggcctattatgtcatcaattactccaagctacgtatttgggagttcgtggagtacaagaagacgatatacctagacggtgacatccaagtatttggaaacatagaccacttgtttgatctgcctgataattatttctatgcggtgatggattgtttctgcgagaagacttggagccacacccctcagttccagattgggtactgccaacagtgccctgataaggttcaatggccctctcactttggttccaaacctcctctatatttcaatgctggcatgtttgtttatgagcctaatctcgacacctaccgtgatcttctccaaactgtccaactcaccaagcccacttcttttgctgagcaggactttctcaacatgtacttcaaggacaagtacaagccaataccgaacatgtacaaccttgtgctggccatgttgtggcgtcaccctgaaaatgttgaacttgataaagttcaagtggttcattactgtgctgctgggtctaagccttggaggttcactgggaaggaagagaacatggatagggaagatatcaagatgcttgtgaagaagtggtgggacatatatgaagatgagacactggactacaataacaactctgtcaacgtggaacgtttcacatcggcactattggatgctgggggctttcagtttgtgccagcaccttctgctgcctaatatgcttattatttacagctacaaattaatgttaattaacgacaaagtatatgtattgttatttgctttttttcgtttttgggtcttatatatgaaggaacaacgtctatggttttaatttggatgacctttttgtatacaaagccacatgtgatctcatacagcttttgattattattaagaaattagaggcccttttattatgagtcctttacttaatttgttttcattgatcaagtgagggggagatatctttaattttattaaatgaaattttagggcgtgtttaaaaaaaaaaaaaacaaaaaaaaaacctcctcnaaaaaaaaaaagaggacc

SEQ ID NO: 142995 - protein, 330 aa, Glycine max; identical to SEQ ID NO: 140872

SEQ ID NO: 142996 - DNA, 1578 bp, Oryza sativa; identical to SEQ ID NO: 140877
  CDS (121)..(1107)
  misc_feature (1509)..(1509): n is a, g, c or t
  misc_feature (1566)..(1566): n is a, g, c or t

SEQ ID NO: 142997 - protein, 328 aa, Oryza sativa; identical to SEQ ID NO: 140878

SEQ ID NO: 142998 - DNA, 1526 bp, Sorghum bicolor; identical to SEQ ID NO: 140875
  CDS (127)..(1176)

SEQ ID NO: 142999 - protein, 349 aa, Sorghum bicolor; identical to SEQ ID NO: 140876

SEQ ID NO: 143000 - DNA, 1440 bp, Triticum aestivum; identical to SEQ ID NO: 140853
  CDS (94)..(1113)

SEQ ID NO: 143001 - protein, 339 aa, Triticum aestivum; identical to SEQ ID NO: 140854

SEQ ID NO: 143002 - DNA, 1514 bp, Zea mays subsp. mays; identical to SEQ ID NO: 140845
  CDS (127)..(1164)
  misc_feature (230)..(230): n is a, g, c or t

SEQ ID NO: 143003 - protein, 345 aa, Zea mays subsp. mays; identical to SEQ ID NO: 140846
  misc_feature (35)..(35): The Xaa at location 35 stands for Ala, Asp, Gly, or Val.

SEQ ID NO: 143004 - DNA, 1514 bp, Zea mays subsp. mays; identical to SEQ ID NO: 140845
  CDS (142)..(1164)
  misc_feature (230)..(230): n is a, g, c or t

SEQ ID NO: 143005 - protein, 340 aa, Zea mays subsp. mays; identical to SEQ ID NO: 140848
  misc_feature (30)..(30): The Xaa at location 30 stands for Ala, Asp, Gly, or Val.

SEQ ID NO: 143006 - DNA, 1510 bp, Zea mays subsp. mays; identical to SEQ ID NO: 140849
  CDS (160)..(1188)

SEQ ID NO: 143007 - protein, 342 aa, Zea mays subsp. mays; identical to SEQ ID NO: 140850

SEQ ID NO: 143008 - DNA, 1510 bp, Zea mays subsp. mays; identical to SEQ ID NO: 140849
  CDS (184)..(1188)

SEQ ID NO: 143009 - protein, 334 aa, Zea mays subsp. mays; identical to SEQ ID NO: 140852

SEQ ID NO: 143010 - DNA, 1440 bp, Triticum aestivum; identical to SEQ ID NO: 140853
  CDS (118)..(1113)

SEQ ID NO: 143011 - protein, 331 aa, Triticum aestivum; identical to SEQ ID NO: 140856

SEQ ID NO: 143012 - DNA, 1265 bp, Cucurbita pepo; Burpee's hybrid; identical to SEQ ID NO: 140863
  CDS (33)..(1025)
  misc_feature (1183)..(1183): s is g or c
  misc_feature (1184)..(1184): w is a or t
  misc_feature (1186)..(1186): s is g or c
  misc_feature (1187)..(1187): r is g or a
  misc_feature (1188)..(1188): y is t or c
  misc_feature (1189)..(1189): k is g or t
  misc_feature (1190)..(1190): r is g or a
  misc_feature (1192)..(1192): w is a or t
  misc_feature (1193)..(1193): w is a or t
  misc_feature (1194)..(1194): y is t or c
  misc_feature (1195)..(1195): m is a or c
  misc_feature (1196)..(1196): m is a or c
  misc_feature (1197)..(1197): k is g or t
  misc_feature (1199)..(1199): y is t or c
  misc_feature (1200)..(1200): w is a or t
  misc_feature (1201)..(1201): s is g or c
  misc_feature (1202)..(1202): y is t or c
  misc_feature (1203)..(1203): w is a or t
  misc_feature (1204)..(1204): w is a or t
  misc_feature (1205)..(1205): m is a or c

SEQ ID NO: 143013 - protein, 330 aa, Cucurbita pepo; Burpee's hybrid; identical to SEQ ID NO: 140864

SEQ ID NO: 143014 - DNA, 1406 bp, Glycine max; Cultivar Wye; identical to SEQ ID NO: 140865
  CDS (139)..(1125)
  misc_feature (1275)..(1275): k is g or t
  misc_feature (1276)..(1276): k is g or t
  misc_feature (1277)..(1277): k is g or t
  misc_feature (1278)..(1278): k is g or t
  misc_feature (1322)..(1322): s is g or c
  misc_feature (1323)..(1323): r is g or a

SEQ ID NO: 143015 - protein, 328 aa, Glycine max; Cultivar Wye; identical to SEQ ID NO: 140866

SEQ ID NO: 143016 - DNA, 1342 bp, Glycine max; identical to SEQ ID NO: 140867
  CDS (107)..(1099)

SEQ ID NO: 143017 - protein, 330 aa, Glycine max; identical to SEQ ID NO: 140868

SEQ ID NO: 143018 - DNA, 1151 bp, Glycine max; identical to SEQ ID NO: 140869
  CDS (71)..(1090)

SEQ ID NO: 143019 - protein, 339 aa, Glycine max; identical to SEQ ID NO: 140870

SEQ ID NO: 143020 - DNA, 1398 bp, Glycine max; identical to SEQ ID NO: 141657
  CDS (94)..(1089)

SEQ ID NO: 143021 - protein, 331 aa, Glycine max; identical to SEQ ID NO: 141658

SEQ ID NO: 143022 - DNA, 1417 bp, Glycine max; identical to SEQ ID NO: 140873
  CDS (213)..(1187)

SEQ ID NO: 143023 - protein, 324 aa, Glycine max; identical to SEQ ID NO: 140874

SEQ ID NO: 143024 - DNA, 1005 bp, Arabidopsis thaliana; identical to SEQ ID NO: 140887
  CDS (1)..(1005)

SEQ ID NO: 143025 - protein, 334 aa, Arabidopsis thaliana; identical to SEQ ID NO: 140888

SEQ ID NO: 143026 - DNA, 999 bp, Arabidopsis thaliana; identical to SEQ ID NO: 140891
  CDS (1)..(999)

SEQ ID NO: 143027 - protein, 332 aa, Arabidopsis thaliana; identical to SEQ ID NO: 140892

SEQ ID NO: 143028 - DNA, 1005 bp, Arabidopsis thaliana; identical to SEQ ID NO: 140841
  CDS (1)..(1005)

SEQ ID NO: 143029 - protein, 334 aa, Arabidopsis thaliana; identical to SEQ ID NO: 140842

SEQ ID NO: 143030 - DNA, 1035 bp, Arabidopsis thaliana; identical to SEQ ID NO: 140893
  CDS (1)..(1035)

SEQ ID NO: 143031 - protein, 344 aa, Arabidopsis thaliana; identical to SEQ ID NO: 140894

SEQ ID NO: 143032 - DNA, 1002 bp, Arabidopsis thaliana; identical to SEQ ID NO: 140895
  CDS (1)..(1002)

SEQ ID NO: 143033 - protein, 333 aa, Arabidopsis thaliana; identical to SEQ ID NO: 140896

SEQ ID NO: 143034 - DNA, 1011 bp, Arabidopsis thaliana; identical to SEQ ID NO: 140897
  CDS (1)..(1011)

SEQ ID NO: 143035 - protein, 336 aa, Arabidopsis thaliana; identical to SEQ ID NO: 140898

SEQ ID NO: 143036 - DNA, 987 bp, Arabidopsis thaliana; identical to SEQ ID NO: 140899
  CDS (1)..(987)

SEQ ID NO: 143037 - protein, 328 aa, Arabidopsis thaliana; identical to SEQ ID NO: 140900

SEQ ID NO: 143038 - DNA, 987 bp, Ammopiptanthus mongolicus; identical to SEQ ID NO: 140901
  CDS (1)..(987)

SEQ ID NO: 143039 - protein, 328 aa, Ammopiptanthus mongolicus; identical to SEQ ID NO: 140902

SEQ ID NO: 143040 - DNA, 1014 bp, Xerophyta viscosa; identical to SEQ ID NO: 140903
  CDS (1)..(1014)

SEQ ID NO: 143041 - protein, 337 aa, Xerophyta viscosa; identical to SEQ ID NO: 140904

SEQ ID NO: 143042 - DNA, 1026 bp, Oryza sativa subsp; identical to SEQ ID NO: 140905
  CDS (1)..(1026)

SEQ ID NO: 143043 - protein, 341 aa, Oryza sativa subsp; identical to SEQ ID NO: 140906

SEQ ID NO: 143044 - DNA, 984 bp, Oryza sativa subsp; identical to SEQ ID NO: 140907
  CDS (1)..(984)

SEQ ID NO: 143045 - protein, 327 aa, Oryza sativa subsp; identical to SEQ ID NO: 140908

SEQ ID NO: 143046 - DNA, 951 bp, Oryza sativa subsp; identical to SEQ ID NO: 140909
  CDS (1)..(951)

SEQ ID NO: 143047 - protein, 316 aa, Oryza sativa subsp; identical to SEQ ID NO: 140910

SEQ ID NO: 143048 - DNA, 960 bp, Triticum aestivum; identical to SEQ ID NO: 140911
  CDS (1)..(960)

SEQ ID NO: 143049 - protein, 319 aa, Triticum aestivum; identical to SEQ ID NO: 140912

SEQ ID NO: 143050 - DNA, 972 bp, Triticum aestivum; identical to SEQ ID NO: 140913
  CDS (1)..(972)

SEQ ID NO: 143051 - protein, 323 aa, Triticum aestivum; identical to SEQ ID NO: 140914

SEQ ID NO: 143052 - DNA, 978 bp, Vitis vinifera; identical to SEQ ID NO: 140915
  CDS (1)..(978)

SEQ ID NO: 143053 - protein, 325 aa, Vitis vinifera; identical to SEQ ID NO: 140916

SEQ ID NO: 143054 - DNA, 978 bp, Vitis vinifera; identical to SEQ ID NO: 140917
  CDS (1)..(978)
  misc_feature (84)..(84): w is a or t

SEQ ID NO: 143055 - protein, 325 aa, Vitis vinifera; identical to SEQ ID NO: 140918

SEQ ID NO: 143056 - DNA, 1029 bp, Vitis vinifera; identical to SEQ ID NO: 140919
  CDS (1)..(1029)
  misc_feature (67)..(67): r is g or a
  misc_feature (675)..(675): s is g or c

SEQ ID NO: 143057 - protein, 342 aa, Vitis vinifera; identical to SEQ ID NO: 140920
  misc_feature (225)..(225): The Xaa at location 225 stands for Arg, or Ser.

SEQ ID NO: 143058 - DNA, 1011 bp, Capsicum annuum; identical to SEQ ID NO: 140923
  CDS (1)..(1011)

SEQ ID NO: 143059 - protein, 336 aa, Capsicum annuum; identical to SEQ ID NO: 140924

SEQ ID NO: 143060 - DNA, 1005 bp, Arabidopsis thaliana; identical to SEQ ID NO: 140953
  CDS (1)..(1005)

SEQ ID NO: 143061 - protein, 334 aa, Arabidopsis thaliana; identical to SEQ ID NO: 140954

SEQ ID NO: 143062 - DNA, 1020 bp, Medicago truncatula; identical to SEQ ID NO: 141699
  CDS (1)..(1020)

SEQ ID NO: 143063 - protein, 339 aa, Medicago truncatula; identical to SEQ ID NO: 141700

SEQ ID NO: 143064 - DNA, 1047 bp, Zea mays; identical to SEQ ID NO: 140883
  CDS (1)..(1047)

SEQ ID NO: 143065 - protein, 348 aa, Zea mays; identical to SEQ ID NO: 140884

SEQ ID NO: 143066 - DNA, 1035 bp, Zea mays; identical to SEQ ID NO: 140881
  CDS (1)..(1035)

SEQ ID NO: 143067 - protein, 344 aa, Zea mays; identical to SEQ ID NO: 140882

SEQ ID NO: 143068 - DNA, 1038 bp, Zea mays; identical to SEQ ID NO: 140885
  CDS (1)..(1038)

SEQ ID NO: 143069 - protein, 345 aa, Zea mays; identical to SEQ ID NO: 140886

SEQ ID NO: 143070 - DNA, 1002 bp, Fagopyrum esculentum; identical to SEQ ID NO: 140955
  CDS (1)..(1002)

SEQ ID NO: 143071 - protein, 333 aa, Fagopyrum esculentum; identical to SEQ ID NO: 140956

SEQ ID NO: 143072 - DNA, 1065 bp, Fagopyrum esculentum; identical to SEQ ID NO: 140957
  CDS (1)..(1065)

SEQ ID NO: 143073 - protein, 354 aa, Fagopyrum esculentum; identical to SEQ ID NO: 140958

SEQ ID NO: 143074 - DNA, 987 bp, Glycine max; identical to SEQ ID NO: 140959
  CDS (1)..(987)

SEQ ID NO: 143075 - protein, 328 aa, Glycine max; identical to SEQ ID NO: 140960

SEQ ID NO: 143076 - DNA, 978 bp, Medicago sativa; identical to SEQ ID NO: 140961
  CDS (1)..(978)

SEQ ID NO: 143077 - protein, 325 aa, Medicago sativa; identical to SEQ ID NO: 140962

SEQ ID NO: 143078 - DNA, 996 bp, Cucumis sativus; identical to SEQ ID NO: 140963
  CDS (1)..(996)

SEQ ID NO: 143079 - protein, 331 aa, Cucumis sativus; identical to SEQ ID NO: 140964

SEQ ID NO: 143080 - DNA, 1014 bp, Thellungiella halophila; identical to SEQ ID NO: 140965
  CDS (1)..(1014)

SEQ ID NO: 143081 - protein, 337 aa, Thellungiella halophila; identical to SEQ ID NO: 140966

SEQ ID NO: 143082 - DNA, 996 bp, Cucumis melo; identical to SEQ ID NO: 140967
  CDS (1)..(996)

SEQ ID NO: 143083 - protein, 331 aa, Cucumis melo; identical to SEQ ID NO: 140968

SEQ ID NO: 143084 - DNA, 999 bp, Cucumis melo; identical to SEQ ID NO: 140969
  CDS (1)..(999)

SEQ ID NO: 143085 - protein, 332 aa, Cucumis melo; identical to SEQ ID NO: 140970

SEQ ID NO: 143086 - DNA, 957 bp, Solanum lycopersicum; identical to SEQ ID NO: 140971
  CDS (1)..(957)

SEQ ID NO: 143087 - protein, 318 aa, Solanum lycopersicum; identical to SEQ ID NO: 140972

SEQ ID NO: 143088 - DNA, 1005 bp, Pisum sativum; identical to SEQ ID NO: 140973
  CDS (1)..(1005)

SEQ ID NO: 143089 - protein, 334 aa, Pisum sativum; identical to SEQ ID NO: 140974

SEQ ID NO: 143090 - DNA, 1002 bp, Ajuga reptans; identical to SEQ ID NO: 140975
  CDS (1)..(1002)

SEQ ID NO: 143091 - protein, 333 aa, Ajuga reptans; identical to SEQ ID NO: 140976

SEQ ID NO: 143092 - DNA, 1026 bp, Oryza sativa; identical to SEQ ID NO: 140977
  CDS (1)..(1026)

SEQ ID NO: 143093 - protein, 341 aa, Oryza sativa; identical to SEQ ID NO: 140978

SEQ ID NO: 143094 - DNA, 987 bp, Oryza sativa; identical to SEQ ID NO: 140979
  CDS (1)..(987)

SEQ ID NO: 143095 - protein, 328 aa, Oryza sativa; identical to SEQ ID NO: 140980

SEQ ID NO: 143096 - DNA, 1047 bp, Zea mays; identical to SEQ ID NO: 140987
  CDS (1)..(1047)

SEQ ID NO: 143097 - protein, 348 aa, Zea mays; identical to SEQ ID NO: 140988

SEQ ID NO: 143098 - DNA, 993 bp, Brassica napus; identical to SEQ ID NO: 140989
  CDS (1)..(993)

SEQ ID NO: 143099 - protein, 330 aa, Brassica napus; identical to SEQ ID NO: 140990

SEQ ID NO: 143100 - DNA, 1023 bp, Glycine max; identical to SEQ ID NO: 140991
  CDS (1)..(1023)

SEQ ID NO: 143101 - protein, 340 aa, Glycine max; identical to SEQ ID NO: 140992

SEQ ID NO: 143102 - DNA, 975 bp, Glycine max; identical to SEQ ID NO: 140993
  CDS (1)..(975)

SEQ ID NO: 143103 - protein, 324 aa, Glycine max; identical to SEQ ID NO: 140994

SEQ ID NO: 143104 - DNA, 1044 bp, Zea mays
  CDS (1)..(1044)
atggctcccgagctgatgacagccaagatgaccgccaaggccgccgcggcggcggcggcggcggcggcgaagcctgccacgagggcgtacgtgacgttccttgcgggcgacggcgactactggaagggcgtggtggggctggccaagggcctgcgcaaggtccgctcggcctaccccctggtggtggccgtgctgcccgacgtgcccgagtcccaccgccgcatcctcgtctcgcagggctgcgtcgtccgcgagatcgagcccgtgtacccgcctgagaaccagacgcagttcgccatggcgtactacgtcatcaactactccaagctccgcatctgggagttcgtggagtacgagaggatggtgtacctggacgcggacatccaggtgttcgagaacatcgacggcctgttcgagctcgagaaggggtacttctacgcggtgatggactgcttctgcgagaagacgtggagccacaccccgcagtacaggatcggctactgccagcagtgcccggacaaggtggcgtggccagcggcgaccgccgagctgggccctccgccgtcgctctacttcaacgccggcatgttcgtgcacgagcccagcgtggccaccgccaaggcgctcctcgacaccctccgcgtgactccgcccacccccttcgcagagcaggacttcctgaacatgttcttcagggatcagtacaggccgatccccaacgtgtacaacctcgtgctggccatgctctggaggcaccccgagaacgtgcagctggagaaggtgaaggtcgtgcactactgcgcggcggggtccaagccgtggaggttcacgggcaaggaggcgaacatggacagggaggacatcaacgccctggtgaacaagtggtgggacatctacaacgacgagacgctggacttgaagggcctgccctcgctctcgcccgacgacgacgacgaggtggaggcggtggccaagaagccgcttcgcgcggccctggcggaggccggcacggtcaagtacgtcaccgcgccctcggccgcgtga

SEQ ID NO: 143105 - protein, 347 aa, Zea mays; identical to SEQ ID NO: 140844

SEQ ID NO: 143106 - DNA, 1038 bp, Zea mays; identical to SEQ ID NO: 140997
  CDS (1)..(1038)

SEQ ID NO: 143107 - protein, 345 aa, Zea mays; identical to SEQ ID NO: 140998

SEQ ID NO: 143108 - DNA, 1029 bp, Zea mays; identical to SEQ ID NO: 140999
  CDS (1)..(1029)

SEQ ID NO: 143109 - protein, 342 aa, Zea mays; identical to SEQ ID NO: 141000

SEQ ID NO: 143110 - DNA, 1035 bp, Zea mays; identical to SEQ ID NO: 141001
  CDS (1)..(1035)

SEQ ID NO: 143111 - protein, 344 aa, Zea mays; identical to SEQ ID NO: 141002

SEQ ID NO: 143112 - DNA, 20 bp, Artificial sequence
  primer
atggcacctgagatcaatac

SEQ ID NO: 143113 - DNA, 20 bp, Artificial sequence
  primer
ttaagctgcagatggagctt

SEQ ID NO: 143114 - protein, 365 aa, Artificial sequence
  consensus sequence
  Variant (2)..(2): Xaa in position 2 is any amino acid
  Variant (4)..(15): Xaa in position 4 to 15 is any amino acid
  Variant (16)..(29): Xaa in position 16 to 29 is any or no amino acid
  Variant (39)..(39): Xaa in position 39 is any amino acid
  Variant (43)..(43): Xaa in position 43 is any amino acid
  Variant (57)..(59): Xaa in position 57 to 59 is any amino acid
  Variant (66)..(66): Xaa in position 66 is any amino acid
  Variant (72)..(73): Xaa in position 72 to 73 is any amino acid
  Variant (76)..(77): Xaa in position 76 to 77 is any amino acid
  Variant (79)..(80): Xaa in position 79 to 80 is any amino acid
  Variant (84)..(85): Xaa in position 84 to 85 is any amino acid
  Variant (94)..(94): Xaa in position 94 is any amino acid
  Variant (122)..(123): Xaa in position 122 to 123 is any amino acid
  Variant (125)..(125): Xaa in position 125 is any amino acid
  Variant (129)..(129): Xaa in position 129 is any amino acid
  Variant (134)..(135): Xaa in position 134 to 135 is any amino acid
  Variant (139)..(139): Xaa in position 139 is any amino acid
  Variant (142)..(142): Xaa in position 142 is any amino acid
  Variant (144)..(145): Xaa in position 144 to 145 is any amino acid
  Variant (147)..(147): Xaa in position 147 is any amino acid
  Variant (167)..(167): Xaa in position 167 is any amino acid
  Variant (176)..(176): Xaa in position 176 is any amino acid
  Variant (179)..(179): Xaa in position 179 is any amino acid
  Variant (182)..(184): Xaa in position 182 to 184 is any amino acid
  Variant (185)..(187): Xaa in position 185 to 187 is any or no amino acid
  Variant (189)..(190): Xaa in position 189 to 190 is any amino acid
  Variant (191)..(191): Xaa in position 191 is any or no amino acid
  Variant (193)..(193): Xaa in position 193 is any amino acid
  Variant (203)..(203): Xaa in position 203 is any amino acid
  Variant (206)..(208): Xaa in position 206 to 208 is any amino acid
  Variant (210)..(211): Xaa in position 210 to 211 is any amino acid
  Variant (212)..(212): Xaa in position 212 is any or no amino acid
  Variant (215)..(215): Xaa in position 215 is any amino acid
  Variant (217)..(219): Xaa in position 217 to 219 is any amino acid
  Variant (221)..(221): Xaa in position 221 is any amino acid
  Variant (224)..(224): Xaa in position 224 is any amino acid
  Variant (234)..(234): Xaa in position 234 is any amino acid
  Variant (236)..(237): Xaa in position 236 to 237 is any amino acid
  Variant (238)..(238): Xaa in position 238 is any or no amino acid
  Variant (240)..(240): Xaa in position 240 is any amino acid
  Variant (244)..(245): Xaa in position 244 to 245 is any amino acid
  Variant (260)..(261): Xaa in position 260 to 261 is any amino acid
  Variant (262)..(262): Xaa in position 262 is any or no amino acid
  Variant (264)..(265): Xaa in position 264 to 265 is any amino acid
  Variant (281)..(281): Xaa in position 281 is any amino acid
  Variant (284)..(284): Xaa in position 284 is any amino acid
  Variant (286)..(286): Xaa in position 286 is any amino acid
  Variant (289)..(289): Xaa in position 289 is any amino acid
  Variant (295)..(295): Xaa in position 295 is any amino acid
  Variant (298)..(298): Xaa in position 298 is any amino acid
  Variant (305)..(305): Xaa in position 305 is any amino acid
  Variant (307)..(308): Xaa in position 307 to 308 is any amino acid
  Variant (311)..(321): Xaa in position 311 to 321 is any amino acid
  Variant (322)..(346): Xaa in position 322 to 346 is any or no amino acid
  Variant (348)..(348): Xaa in position 348 is any amino acid
  Variant (350)..(356): Xaa in position 350 to 356 is any amino acid
  Variant (357)..(360): Xaa in position 357 to 360 is any or no amino acid
MXPXXXXXXXXXXXXXXXXXXXXXXXXXXRAYVTFLAGXGDYXKGVVGLAKGLRKVXXXYPLVVAXLPDVPXXHRXXLXXQGCXXREIEPVYPXPENQTQFAMAYYVINYSKLRIWEFVEYXXMXYLDXDIQVXXNIDXLFXLXXGXFYAVMDCFCEKTWSHTPQYXIGYCQQCPXKVXWPXXXXXXGXXXPXLYFNAGMFVXEPXXXTXXXLLXTXXXTXPTXFAEQDFLNMXFXXXYXPIPXXYNLVLAMLWRHPENXXXLXXVKVVHYCAAGSKPWRXTGXEXNMXREDIKXLVXKWWDIYXDXXLDXXXXXXXXXXXXXXXXXXXXXXXXXXXXXXXXXXXXLXEXXXXXXXXXXXAPSAA

SEQ ID NO: 143115 - protein, 44 aa, Artificial sequence
  protein pattern
  Variant (2)..(2): Xaa in position 2 is any amino acid
  Variant (3)..(4): Xaa in position 3 to 4 is any or no amino acid
  Variant (20)..(20): Xaa in position 20 is any amino acid
  Variant (24)..(24): Xaa in position 24 is Phe or Tyr
  Variant (25)..(25): Xaa in position 25 is any amino acid
  Variant (26)..(26): Xaa in position 26 is Lys or Arg
  Variant (27)..(27): Xaa in position 27 is any amino acid
  Variant (28)..(28): Xaa in position 28 is Ile or Val
  Variant (32)..(32): Xaa in position 32 is Ala or Gly
  Variant (35)..(35): Xaa in position 35 is Glu or Gln
  Variant (36)..(36): Xaa in position 36 is Leu or Val
  Variant (37)..(37): Xaa in position 37 is Phe or Tyr
  Variant (38)..(38): Xaa in position 38 is any amino acid
  Variant (40)..(40): Xaa in position 40 is Ile or Val
  Variant (42)..(42): Xaa in position 42 is any amino acid
QXXXAMAYYVINYSKLRIWXFVEXXXXXYLDXDIXXXXNXDXLF

SEQ ID NO: 143116 - protein, 42 aa, Artificial sequence
  protein pattern
  Variant (2)..(3): Xaa in position 2 to 3 is any or no amino acid
  Variant (12)..(12): Xaa in position 12 is Ala or Ser
  Variant (17)..(17): Xaa in position 17 is Phe or Tyr
  Variant (20)..(20): Xaa in position 20 is any amino acid
  Variant (22)..(22): Xaa in position 22 is Ala, Asp, Glu or Gly
  Variant (25)..(25): Xaa in position 25 is Asp, Glu, Asn or Gln
  Variant (27)..(27): Xaa in position 27 is Ala, Asp or Glu
  Variant (30)..(31): Xaa in position 30 to 31 is any amino acid
  Variant (33)..(33): Xaa in position 33 is Ala, Ile or Val
  Variant (34)..(35): Xaa in position 34 to 35 is any amino acid
  Variant (38)..(38): Xaa in position 38 is Ala, Asp or Glu
  Variant (39)..(39): Xaa in position 39 is Ile or Val
  Variant (41)..(41): Xaa in position 41 is Asp, Glu or Asn
KXXVVHYCAAGXKPWRXTGXEXNMXRXDIXXLXXXWWXXYXD

SEQ ID NO: 143117 - protein, 61 aa, Artificial sequence
  protein pattern
  Variant (3)..(3): Xaa in position 3 is Phe or Tyr
  Variant (10)..(11): Xaa in position 10 to 11 is any or no amino acid
  Variant (13)..(14): Xaa in position 13 to 14 is any or no amino acid
  Variant (16)..(17): Xaa in position 16 to 17 is any amino acid
  Variant (20)..(20): Xaa in position 20 is any amino acid
  Variant (28)..(28): Xaa in position 28 is Lys or Arg
  Variant (29)..(29): Xaa in position 29 is Ala, Thr or Val
  Variant (30)..(30): Xaa in position 30 is any amino acid
  Variant (31)..(31): Xaa in position 31 is Ala, Ser or Thr
  Variant (32)..(32): Xaa in position 32 is any amino acid
  Variant (33)..(33): Xaa in position 33 is His or Tyr
  Variant (36)..(36): Xaa in position 36 is Ile or Val
  Variant (39)..(39): Xaa in position 39 is Ile, Leu, Met or Val
  Variant (45)..(46): Xaa in position 45 to 46 is any amino acid
  Variant (49)..(50): Xaa in position 49 to 50 is any amino acid
  Variant (52)..(53): Xaa in position 52 to 53 is any amino acid
  Variant (57)..(57): Xaa in position 57 is Ile or Val
  Variant (58)..(58): Xaa in position 58 is Ala, Ile, Leu or Val
  Variant (59)..(59): Xaa in position 59 is Lys or Arg
RAXVTFLAGXXDXXYXXGVXGLAKGLRXXXXXXPLXVAXLPDVPXXHRXXLXXQGCXXXEI

SEQ ID NO: 143118 - protein, 20 aa, Artificial sequence
  protein pattern
  Variant (5)..(5): Xaa in position 5 is any amino acid
  Variant (8)..(8): Xaa in position 8 is Gly or Ser
  Variant (9)..(9): Xaa in position 9 is any amino acid
  Variant (10)..(10): Xaa in position 10 is Ser or Thr
  Variant (11)..(11): Xaa in position 11 is any amino acid
  Variant (13)..(14): Xaa in position 13 to 14 is any amino acid
  Variant (15)..(15): Xaa in position 15 is Ile or Val
CFCEXTWXXXXQXXXGYCQQ

SEQ ID NO: 143119 - protein, 19 aa, Artificial sequence
  protein pattern
  Variant (3)..(3): Xaa in position 3 is Pro or Ser
  Variant (4)..(5): Xaa in position 4 to 5 is any amino acid
  Variant (19)..(19): Xaa in position 19 is Cys or Asn
PIXXXYNLVLAMLWRHPEX

SEQ ID NO: 143120 - protein, 21 aa, Artificial sequence
  protein pattern
  Variant (2)..(2): Xaa in position 2 is Glu, Asn, Pro, Gln or Ser
  Variant (3)..(3): Xaa in position 3 is any amino acid
  Variant (5)..(5): Xaa in position 5 is Ala, Pro, Ser or Thr
  Variant (12)..(12): Xaa in position 12 is Phe or Met
  Variant (14)..(14): Xaa in position 14 is Ala, Ile, Leu or Val
  Variant (15)..(15): Xaa in position 15 is Phe, His or Tyr
  Variant (18)..(18): Xaa in position 18 is Cys, Asp, Gly, Asn or Ser
  Variant (19)..(20): Xaa in position 19 to 20 is any amino acid
  Variant (21)..(21): Xaa in position 21 is Thr or Val
GXXPXLYFNAGXFXXEPXXXX

SEQ ID NO: 143121 - DNA, 681 bp, Azotobacter vinelandii
  CDS (1)..(681): transl_table=11
atgcgcctccggcccgacgacctgtcgcacagcggcatcggcatgacttcgcagcgtacccgcgagcgtctgatccagcgtctctacgaggagggcttgtccagcgctccagtgctcgaggtgatccgccgcacgccacgccatctgttcgtcgacgaggccctggcgcaccgggcctatgaggacacggcgttgccgatcggccacaaccagacgatttcccagccctacatggtaggacgcatgaccgaattgctgctcggcggcgaccgcctggacaaggtgctcgagatcggtaccggttcgggttatcagacagcggtattggcgcaactggtggagcgggtgttttccgtcgagcggatccaggcgctgcaggagcgagccaaggagcggctgctcgaactcaatctgcgcaatgtggtctttcgctggggcgatggctgggagggctggccggcgctggctccttacaacggcatcatggtcacggccgccgcttcggatgtcccttccgcactgttggatcaactggctcccggcgggcgcctggtgataccggtgggcagcggcgccgagcaacaactgttgctcatcgtgcgcgagcccgatggcggcttccgccgtcatgcgctggagaccgtgcggttcgtacccctgctccaaggttctttgttctga

SEQ ID NO: 143122 - protein, 226 aa, Azotobacter vinelandii
MRLRPDDLSHSGIGMTSQRTRERLIQRLYEEGLSSAPVLEVIRRTPRHLFVDEALAHRAYEDTALPIGHNQTISQPYMVGRMTELLLGGDRLDKVLEIGTGSGYQTAVLAQLVERVFSVERIQALQERAKERLLELNLRNVVFRWGDGWEGWPALAPYNGIMVTAAASDVPSALLDQLAPGGRLVIPVGSGAEQQLLLIVREPDGGFRRHALETVRFVPLLQGSLF

SEQ ID NO: 143123 - DNA, 1183 bp, Glycine max
  CDS (188)..(886)
gcgtcaatgaaagctgccgtggggcagatgatgcgacgcgtcagcaatcaatcaccccaacatgggcagcggaaagcatgcaaacccatctttacctcttccattttatacaccagtatcgctctgtatttgtctcatcctcctaactgaaccctaatttcttctgggaaactctattttctctaatatggagcaatactggtctgggagtgccatcaatgaaaacaaaggaatggtagataatttgcatcgttatggagtaatcacatctagaaaggtagctgaagtaatggaaaccattgatagagctttgtttgtacccagcggcggcggactccaaccttatgtggacagtcctatgccgattggctacaatgccaccatctctgcgccgcatatgcatgccacctgccttcagttgcttgagaagaatttgcaacctggaatgcgtgttcttgacgttggctccggaacgggatacctgacagcatgctttgccttgatggttggaccccaaggccgtgctattggcgtggaacatattcctgagttggtttctttttcaatcgagaatattcaaaaaagtgctgcagctgcacaattgaaagatggttccctttctgtccatgctggtgatggaaggcaaggttggccagagtttgccccttatgatgccattcacgttggagcagcagcaccagaaattccccaaccacttattgaccagttgaagcctggagggagaatggtgattcctgtcggaaacatattccaagatttaaaggtggtggataagaattctgatggttctatcagtgtccgcactgagacatctgttcgttatgtacccctcaccagtcgagaagctcaactgcgaggttactaaaatgaagccaaaatcctgaattttggaaggctaatgcttcagatgttagtgtttggatcttgcttgtgcacatgccgttagaagttgtatagataaagttccctgaattttgtaaggttcatgtttacagttacagatatcagtagttggaacatgaatgcactcctatgctggtagaatttgtatagtatgaagttcatattctgcttagtgaattaattcgttttcatgatgtgcatattttgtaaatatcttgtacacttttcatttaatttattcgcttttataattctttat

SEQ ID NO: 143124 - protein, 232 aa, Glycine max
MEQYWSGSAINENKGMVDNLHRYGVITSRKVAEVMETIDRALFVPSGGGLQPYVDSPMPIGYNATISAPHMHATCLQLLEKNLQPGMRVLDVGSGTGYLTACFALMVGPQGRAIGVEHIPELVSFSIENIQKSAAAAQLKDGSLSVHAGDGRQGWPEFAPYDAIHVGAAAPEIPQPLIDQLKPGGRMVIPVGNIFQDLKVVDKNSDGSISVRTETSVRYVPLTSREAQLRGY

SEQ ID NO: 143125 - DNA, 681 bp, Methanopyrus kandleri
  CDS (1)..(681): transl_table=11
ttggccgaagacgataaggtctttcgacgcgcccgtgagcgcctggtggagcggttgaagtccctgggttacattagatcgaaccgcgtggccgaggccatgctcaaggtgccgcgtcacgagttcgttccggaggatctccgcgatcgggcctacgtcgactcgcccttacccatcggcaggggacagaccatctcggccccgcacatggtggcgatcatgaccgagttgctcgacccacggcccggacacaaggtgctcgaggtgggggcgggttcggggtaccacgccgccgtggtagccgaactggtgaaacccgacggtcgtgtgatcacggtcgagaggatcccggagctcgcggacttcgcccggaataacctgaagaaaaccggatacgaccgtttcgtgaaggtgttggtgggggacgggaccaagggctacccgcccgaagccccgtacgaccgtattctggtgacggcgggcgccccggacgtcccggaaagcctgctggagcagctgaaaccgggagggaagatggtcattcctgtgggagaccggcacatgcaggagctgtggttggtggagaagaccgaggacggagagatcaggcgtcgtcggcacggtggatgcgcgttcgtaccgctcataggggaggaggggttccaggaacccgaatcttga

SEQ ID NO: 143126 - protein, 226 aa, Methanopyrus kandleri
LAEDDKVFRRARERLVERLKSLGYIRSNRVAEAMLKVPRHEFVPEDLRDRAYVDSPLPIGRGQTISAPHMVAIMTELLDPRPGHKVLEVGAGSGYHAAVVAELVKPDGRVITVERIPELADFARNNLKKTGYDRFVKVLVGDGTKGYPPEAPYDRILVTAGAPDVPESLLEQLKPGGKMVIPVGDRHMQELWLVEKTEDGEIRRRRHGGCAFVPLIGEEGFQEPES

SEQ ID NO: 143127 - DNA, 627 bp, Klebsiella pneumoniae subsp. pneumoniae MGH 78578
  CDS (1)..(627): transl_table=11
atggtaagtaaacgtgttgaaagtttgttgaatcaactgcgcacgcagggcatcgtcgatgaacgtgtcctcgaggcgatcgcgctggtcccgcgcgaaaagtttgttgatgaagcctttgaacataaagcgtgggaaaacaccgcgctgccgattggccaggggcagaccatctcccagccgtatatggtggcgcggatgaccgagctgctgacgctgacgccggagtcgcgggtgctggagatcggcaccggttccggctaccagacggccatcctggcgcatctggtgcatcacgtatgctcggtagagcgaattaagagtttacagtggcaggcgcgtcgtcgcctgaaacaacttgatttacataatgtttcaacccgtcatggcgatgggtggcaaggttggcaggcgcgggcgccgtttgatgccattattgtgacggcggcgccgccggaaataccgaccgcgctgctggcgcagctggatgatgacggcgtgctggtgctgccggtcggcgaagagcatcagtttctcaaacggatccgtcgtcggggcaacgaatttatcattgataccgtcgaggccgttcgctttgttcccctggtgaagggggagctggcctga

SEQ ID NO: 143128 - protein, 208 aa, Klebsiella pneumoniae subsp. pneumoniae MGH 78578
MVSKRVESLLNQLRTQGIVDERVLEAIALVPREKFVDEAFEHKAWENTALPIGQGQTISQPYMVARMTELLTLTPESRVLEIGTGSGYQTAILAHLVHHVCSVERIKSLQWQARRRLKQLDLHNVSTRHGDGWQGWQARAPFDAIIVTAAPPEIPTALLAQLDDDGVLVLPVGEEHQFLKRIRRRGNEFIIDTVEAVRFVPLVKGELA

SEQ ID NO: 143129 - DNA, 660 bp, Xanthobacter autotrophicus Py2
  CDS (1)..(660): transl_table=11
atgagcactggcgaaagcgaaggcgaacaggcggaacgcatggccttcatccttggcctgcggcagcgggggattcgcgatgtaggcgtattgcgcgccatggaactggtgccgcgcccgctgttcgtcgatcccgcgctgcgccggcatgcctatgacgacgtggccctgcccatcgcctgcggccagaccatgtcccagcccagcctcgtcgccgccatgacggaggcgctgtcgctgaccgccgaccattcggtgctggaggtggggacgggatcaggttaccacgccgccgtgctctcccacctcgccgcgcgggtggtgacggtggatcgctaccggtctctggtggcggaggcgcaggcacgcttcgaggtgctgggtctgcgcaatgtcaccgcctatgtgggcgacggtaccttgggcatgccggcccgcgcccctttcgatcgcattctggtgacggcggcggcgcccgacattccctttgccctgatcgaccagctcaagttcggcggcgtcatcgtgatgccgttgggggcgccggaggagatccagaccctcgtgcgctacgtgaaggagcagtccgggcgcacccgcaccgaactcatgaaggtgcggttcgtaccgctgattccgggcgctgcggccacactttga

SEQ ID NO: 143130 - protein, 219 aa, Xanthobacter autotrophicus Py2
MSTGESEGEQAERMAFILGLRQRGIRDVGVLRAMELVPRPLFVDPALRRHAYDDVALPIACGQTMSQPSLVAAMTEALSLTADHSVLEVGTGSGYHAAVLSHLAARVVTVDRYRSLVAEAQARFEVLGLRNVTAYVGDGTLGMPARAPFDRILVTAAAPDIPFALIDQLKFGGVIVMPLGAPEEIQTLVRYVKEQSGRTRTELMKVRFVPLIPGAAATL

SEQ ID NO: 143131 - DNA, 750 bp, Bombyx mori
  CDS (1)..(750)
atgaaaaataaatatacatggattaaaaacatttgtttagcagttattgtaataattccaataataatggcatggagaagccacggagcaaataatgtggacctaatacgtaatttaagaactaacggcataataaaatcggacaccgtcgcaaatgcaatgctagctgttgatcggaaaaattactgtccttcttctccataccaggactctcctcaatctattggattctctgcaacaatcagcgctccccacatgcatgctcatgcattagaaaagttaaaaaaccagctagtaccaggagaaaaagctttagatgttggttcggggtctggttacctcactgcctgtatggccatgatgttaggagaaactggccgggtagttgggatagaacatatatcagaacttgtgaatttggcaaccaaaaacatccaaaatgacaacccaagcttactctcatctgagaggattaaacttgtagttggtgatggtcgtctcggttatccatctgaagccccttacagtgcaattcatgtcggggctgcagcacccacattaccacaagctctaattgatcaattgaaaccgggagggaggctaatagttcctgtagggcctgagggtggtgaacaacatttgactcaggttgataaagcacaggatggaacaacaactgtaaagaaattgatgagtgtgatttatgttccattaactgacaaggagcaccaatatcgtccttggcgataa

SEQ ID NO: 143132 - protein, 249 aa, Bombyx mori
MKNKYTWIKNICLAVIVIIPIIMAWRSHGANNVDLIRNLRTNGIIKSDTVANAMLAVDRKNYCPSSPYQDSPQSIGFSATISAPHMHAHALEKLKNQLVPGEKALDVGSGSGYLTACMAMMLGETGRVVGIEHISELVNLATKNIQNDNPSLLSSERIKLVVGDGRLGYPSEAPYSAIHVGAAAPTLPQALIDQLKPGGRLIVPVGPEGGEQHLTQVDKAQDGTTTVKKLMSVIYVPLTDKEHQYRPWR

SEQ ID NO: 143133 - DNA, 921 bp, Arabidopsis thaliana
  CDS (1)..(921)
atgaacacgaacacacaaacagaacaacagatcatcagagaagaaactagaattgacaaaattattaaaaagcgaaaaaagaaaatgagagctcaggttttattatgtccaacaataacagcttatggtcgtctctattgtgcgccacgtagacttcaccgctacaattcatcatcatcatcatctcagtttctgaatctcaatctctctcgcttctccggtgctctcttcttccacatggagagtggaactggctcgagcggcaagagagggatggtggaaaatttgaagcggtacggtgtgatatcgtcgaaaagagtagctcaagttatggaggctttagatagaggtctctttgtaccagttggttcttcagcttatgttgatactcctgtacctataggttataatgctaccatttctgctccgcatatgcatgctacttgcttgcagctcttggaagataagctccaccccgggatgcgcgctttagatgtcggctcaggaaccgggtacttgactggctgttttgctttgatggttggagctgagggacgtgttgttggcgtggatcatatccctgaattggttgatatgtctatcaagaatatcgaaaagagtgttgctgcttcctttcttaagaaaggatctctctccttacatgttggggatggaagaaaaggttggcaagagtttgcaccgtatgatgcaatacacgtaggagcagcggcatcagaaatccctcagccccttttggatcagctaaaacccggtggacgaatggtgattccactaggaacctattttcaagagctcaaggtaatcgacaaaaacgaggatggttcaatcaaggtacataccgaaacttcagtccggtatgtgcccctcactagccgtgtcgaacagttaggaggattttga

SEQ ID NO: 143134 - protein, 306 aa, Arabidopsis thaliana
MNTNTQTEQQIIREETRIDKIIKKRKKKMRAQVLLCPTITAYGRLYCAPRRLHRYNSSSSSSQFLNLNLSRFSGALFFHMESGTGSSGKRGMVENLKRYGVISSKRVAQVMEALDRGLFVPVGSSAYVDTPVPIGYNATISAPHMHATCLQLLEDKLHPGMRALDVGSGTGYLTGCFALMVGAEGRVVGVDHIPELVDMSIKNIEKSVAASFLKKGSLSLHVGDGRKGWQEFAPYDAIHVGAAASEIPQPLLDQLKPGGRMVIPLGTYFQELKVIDKNEDGSIKVHTETSVRYVPLTSRVEQLGGF

SEQ ID NO: 143135 - DNA, 726 bp, Mesorhizobium loti MAFF303099
  CDS (1)..(726): transl_table=11
atggtggccaatcgcggcgaggatccgaagtttttggcgcagcgattcgatcgcttccagatcatggtctacaacaaggacgtgctggacgaccgcaacaagcgcgccttccttttgactccgcgtgaggaattcgtgctgccgcagaatctggggcgcgcctacgaccatgccttcctcgacatcggctatggcgtgacgatttcgggtccgcacctggtcgggcggatgacgacggcgatcgacgtgcaattcggcgaggccgtactcgagatcggcaccggttcgggttaccagtcggcctatctcgccaacctcaccgacaaggtgcacacgatcgagatcatcaatccgctggcgcagcgcacgcggcgcacctatgacgggctggtcgagcgcggctacagcgaattcggttcggtcaccagccgcaatgccgacggctattatggctgggaaagcgtcggcccgttcgacaagatcatcgtcacctgcggcatcgaccacattccgccgtcgctgctgcagcagttgaagcccaatggcgtgatggtcattccggtcggcccgccgggcgcgcagcacgtgctcaaggtgaccaagcagcagctcgcggacggcacgttcaacatcgtccgctcggacatctacaatggcaaggtggtgccgttcgtgccgttcaccaagctggaaggcgaccagatcgtcggcacgcacaacagctga

SEQ ID NO: 143136 - protein, 241 aa, Mesorhizobium loti MAFF303099
MVANRGEDPKFLAQRFDRFQIMVYNKDVLDDRNKRAFLLTPREEFVLPQNLGRAYDHAFLDIGYGVTISGPHLVGRMTTAIDVQFGEAVLEIGTGSGYQSAYLANLTDKVHTIEIINPLAQRTRRTYDGLVERGYSEFGSVTSRNADGYYGWESVGPFDKIIVTCGIDHIPPSLLQQLKPNGVMVIPVGPPGAQHVLKVTKQQLADGTFNIVRSDIYNGKVVPFVPFTKLEGDQIVGTHNS

SEQ ID NO: 143137 - DNA, 930 bp, Arabidopsis thaliana
  CDS (1)..(930)
atgaacacgaacacacaaacagaacaacagatcatcagagaagaaactagaattgacaaaattattaaaaagcgaaaaaagaaaatgagagctcaggttttattatgtccaacaataacagcttatggtcgtctctattgtgcgccacgtagacttcaccgctacaattcatcatcatcatcatctcagtttctgaatctcaatctctctcgcttctccggtgctctcttcttccacatggagcaattccagagtggaactggctcgagcggcaagagagggatggtggaaaatttgaagcggtacggtgtgatatcgtcgaaaagagtagctcaagttatggaggctttagatagaggtctctttgtaccagttggttcttcagcttatgttgatactcctgtacctataggttataatgctaccatttctgctccgcatatgcatgctacttgcttgcagctcttggaagataagctccaccccgggatgcgcgctttagatgtcggctcaggaaccgggtacttgactggctgttttgctttgatggttggagctgagggacgtgttgttggcgtggatcatatccctgaattggttgatatgtctatcaagaatatcgaaaagagtgttgctgcttcctttcttaagaaaggatctctctccttacatgttggggatggaagaaaaggttggcaagagtttgcaccgtatgatgcaatacacgtaggagcagcggcatcagaaatccctcagccccttttggatcagctaaaacccggtggacgaatggtgattccactaggaacctattttcaagagctcaaggtaatcgacaaaaacgaggatggttcaatcaaggtacataccgaaacttcagtccggtatgtgcccctcactagccgtgtcgaacagttaggaggattttga

SEQ ID NO: 143138 - protein, 309 aa, Arabidopsis thaliana
MNTNTQTEQQIIREETRIDKIIKKRKKKMRAQVLLCPTITAYGRLYCAPRRLHRYNSSSSSSQFLNLNLSRFSGALFFHMEQFQSGTGSSGKRGMVENLKRYGVISSKRVAQVMEALDRGLFVPVGSSAYVDTPVPIGYNATISAPHMHATCLQLLEDKLHPGMRALDVGSGTGYLTGCFALMVGAEGRVVGVDHIPELVDMSIKNIEKSVAASFLKKGSLSLHVGDGRKGWQEFAPYDAIHVGAAASEIPQPLLDQLKPGGRMVIPLGTYFQELKVIDKNEDGSIKVHTETSVRYVPLTSRVEQLGGF

SEQ ID NO: 143139 - DNA, 657 bp, Neisseria meningitidis MC58
  CDS (1)..(657): transl_table=11
atggattttgaaaaagcgcggttcaatatggtcgaacagcaaatccgtccgtgggatgtattggattttgatgtgttggacgctttggcggagattccgcgcgagctttttgtcgatgaggacttgcagggtttggcgtatgcggatatggcgctgccgcttgccaacggtcataagatgctcgagccgaaagtcgtggcgcggctggcgcagggcttgaagctgacgaaaaacgatacggttttggaaatcggcacgggttcgggctatgcgaccgcgctgttggcaaaattggctggtcgtgtggtgtcggacgacatcgatgtcgaacagcaaaaccgcgccaaagcggtgttggacggcttgggtttggacaatatcgattatgtgcaaaacaacgggttgaccgaactttccgcaggtgcgccgtttgatgcggtttatgtcggcggtgcggtaaaccttgtgcctgaagtgttgaaagaacagttgaaagatggcggacgcatggtggttatcgtaggtcgcaagcctgttcaacgcgcgcttttgattacgcgcaggggcgatgtgtttgaagagaaggtgctgttcgataccttggtggcgcatttggatgataaggatgccgatccgtttggcggtttcgatttttaa

SEQ ID NO: 143140 - protein, 218 aa, Neisseria meningitidis MC58
MDFEKARFNMVEQQIRPWDVLDFDVLDALAEIPRELFVDEDLQGLAYADMALPLANGHKMLEPKVVARLAQGLKLTKNDTVLEIGTGSGYATALLAKLAGRVVSDDIDVEQQNRAKAVLDGLGLDNIDYVQNNGLTELSAGAPFDAVYVGGAVNLVPEVLKEQLKDGGRMVVIVGRKPVQRALLITRRGDVFEEKVLFDTLVAHLDDKDADPFGGFDF

SEQ ID NO: 143141 - DNA, 738 bp, Halobacterium sp. NRC-1
  CDS (1)..(738): transl_table=11
atggagtttggggcgttgcgcgaggagatggtcgacagcctcctcgacgcggggacggcgctcgcggacgcgcggccggcggacgcggcgatgcgtgcggttccccgccacgagttcgtcgacgcggggcatcgggcgtacaccgatcaggcgttcgaacaccgcgggacgcgcgtgctcgcgccgtcgacagtcgcgcggctggtgggagcgctggagccacgggctggcgacgacgtgctcgtggtcggggccggcgtcgggtatacggtggcggtggtggccgagatcgccggcccgacacacgtgcacgccgtggacatcgaccggcaggtcgtgtacgacgcgcgcgggaacctcgccgacgccgggtacgaggacgtgctcgtggactgccgggacggcgctgaggggctggcggagtacgcgccgttcgaccgcgtgctcgtggaggccggggcggccagcgtgccggacgcgctcgcccgccagctcgcggccgacgggcggctggtgttcccggagggcgtcggcgatcagcgcctggtgtccgttcgggacggcgagacggtcggcgtgcatgggccggtgtcgttcgcgccgctgctggtggccggcgagcaggccagcgccgtcgagcgcaaccgcaccgtgcgcgaggaccgcgagcgcgtgcgcgaggcggcgcagtcccgcccgggctgggagcgcgagtggatcgactgggaggacgcgtag

SEQ ID NO: 143142 - protein, 245 aa, Halobacterium sp. NRC-1
MEFGALREEMVDSLLDAGTALADARPADAAMRAVPRHEFVDAGHRAYTDQAFEHRGTRVLAPSTVARLVGALEPRAGDDVLVVGAGVGYTVAVVAEIAGPTHVHAVDIDRQVVYDARGNLADAGYEDVLVDCRDGAEGLAEYAPFDRVLVEAGAASVPDALARQLAADGRLVFPEGVGDQRLVSVRDGETVGVHGPVSFAPLLVAGEQASAVERNRTVREDRERVREAAQSRPGWEREWIDWEDA

SEQ ID NO: 143143 - DNA, 654 bp, Agrobacterium tumefaciens str. C58
  CDS (1)..(654): transl_table=11
ttgaaatctgccatggtcgaaaaggaaggttttgccgctctcgttctccgtctgcggggcgaggggatttccgatctcgacctgttgacggcggttgagcagacgccgcgttccaaattcgtgccgccgcaatttgcggccgacgcctattccagccgcacgatcccgatcgactgcggttccttcatggaaggcgccgacatggcggtgaaaatccttgcccgcctgcagctgaaacccggccagcgcgtgcttgagatcggcaccggcagcggttttatgacggcgatcatcgcgcgccgggtggagcgggtgttttcgctggagcgttacaagacgctggtgcagcaggcgcagaactgtctcgacgatctgtccatccgcaacgtcgtcatccgccaggcggatggcagcaatggtctggtgggcgagggcaccttcgaccggattgtttccaccgccgcctttaccaccatgccccgcttctttgccgagcagatcgtttccggcggcatgatgatcgcgccgatcatcctggaagatgagcgttgcgtgatgacccgcttctccaagaccggcagccgcttcgagaaggaagagctgttcgagacgccgtatctgccactcggcagccatattgcgcggcatttgtga

SEQ ID NO: 143144 - protein, 217 aa, Agrobacterium tumefaciens str. C58
MKSAMVEKEGFAALVLRLRGEGISDLDLLTAVEQTPRSKFVPPQFAADAYSSRTIPIDCGSFMEGADMAVKILARLQLKPGQRVLEIGTGSGFMTAIIARRVERVFSLERYKTLVQQAQNCLDDLSIRNVVIRQADGSNGLVGEGTFDRIVSTAAFTTMPRFFAEQIVSGGMMIAPIILEDERCVMTRFSKTGSRFEKEELFETPYLPLGSHIARHL

SEQ ID NO: 143145 - DNA, 1977 bp, Sinorhizobium meliloti 1021
  CDS (1)..(1977): transl_table=11
atgattgatttttcccgtgcccgcgaacggatgatcacgtcgcatctctcgcgacgggggataagggacagacatgtcgtggaggcgatgggcgtcgttccgcgggaggcattcgtcgatcccggcttcgaggaattcgcctatgaggattcggccctttcgatcagccatggccagaccatctcgcagccctatattgtggcgctgatgatcgaacgcgccgaagtccagccgggcgatacggtgctcgagatcgggaccggatccggttacgcggcggcggtgctcagccggatcgcggcatatgtctatacgatcgagcgccatgccggcctcgccgaggttgccgagagacgatttgccgagctccgttacgggaatatcgatgtgcgtgtcggcgacggcacggccggctggcccgaggcaggacccttcgacgccatactggtcgccgccggaggtcccgagataccgcatgcgctgaaggagcagctcgacctcggcggccatctcgtcatacccgtcggcccccctgaggagcagcgcctgatgaaggtcacgcgggtcaacgccacgacattcgaggagcaggacctcggcggggtcagattcgtgccgctcgtcggcgaatacggctggcatgaggagcgggctcagtcccgggcaaggcccagacctgcgcccacgctgcccgagttggttgcagaggcggccgagccgctgcccgatctcgacgatcctgcattcgggctgcttttcgatcgctttgccgggcggcggatcgtgctgctcggagaggcgagccacggcacgtcggaattctaccgcgcccgcgcagccatcacgcgccgcctgatcgaggaacacgggttcgcgatcgtggcggtcgaggcggattggccggatgcggcggcagttgaccgctatgtccgacatcgaaggcaaggcattcgcctcgacgcgccgttccagcggttcccgacctggatgtggcgcaaccgcgaagtgatggatttcgtcgagtggatgcgcgaacataacggccgcaggagcttgcctgaccgggccggcttctacggtctcgacatctataatatgcgcggctccatttccgcggttctccggtatctcgatgagaccgaccccgaggccgccgcggtcgcgcgcgagcgctacggttgcctgacaccctggcagaacgagccgtcgacctatggccgtgcggccatgaccgcgggcttccgcaaatgcgaagaggccgtcgtcaggcaatgccgcgaactcctggagaagcagctcgaagccgggcgcgacagcggcgacgagcttctcgacgcggtgcagaacgcgcgcctcgtcgcctcggccgagcggtactaccgcatcatgtattatgccggggccgactcctggaacatgcgcgacacccatatgttcgaaacgctcgagcatctgttgaatgcacgcggcgctcgctcgaaggcggtcgtgtgggcgcacaattcccatatcggcgatgcccgccataccgatatgggcatggcccgcgaggagttgaacatcggtcagctctgccgcgagcggtttggcgaccaggcagcgctgatcggcttcggcacgcatggcggccatgtggctgccgcaagcgattggaacggcgatatggaggtgaagccgatccggccgtcgctcgaaggaagctacgagcgcgtgatgcacgactcaggggtagggtgcttcctcatcgacttcgcgcgccacgcgcgtctgcgcgacggtctcctcaagccgttgctcgagcgcttcatcggggtgatctaccggccggacacggaacgcttcagccattatgcccacgcttcgctgccccgccagttcgacggcttcgtctggttcgatcagacgacgccggtcgaaccgctcggcgcgcaacacataaaggcgggcgtgccggacacgttcccgttcggcctctga

SEQ ID NO: 143146 - protein, 658 aa, Sinorhizobium meliloti 1021
MIDFSRARERMITSHLSRRGIRDRHVVEAMGVVPREAFVDPGFEEFAYEDSALSISHGQTISQPYIVALMIERAEVQPGDTVLEIGTGSGYAAAVLSRIAAYVYTIERHAGLAEVAERRFAELRYGNIDVRVGDGTAGWPEAGPFDAILVAAGGPEIPHALKEQLDLGGHLVIPVGPPEEQRLMKVTRVNATTFEEQDLGGVRFVPLVGEYGWHEERAQSRARPRPAPTLPELVAEAAEPLPDLDDPAFGLLFDRFAGRRIVLLGEASHGTSEFYRARAAITRRLIEEHGFAIVAVEADWPDAAAVDRYVRHRRQGIRLDAPFQRFPTWMWRNREVMDFVEWMREHNGRRSLPDRAGFYGLDIYNMRGSISAVLRYLDETDPEAAAVARERYGCLTPWQNEPSTYGRAAMTAGFRKCEEAVVRQCRELLEKQLEAGRDSGDELLDAVQNARLVASAERYYRIMYYAGADSWNMRDTHMFETLEHLLNARGARSKAVVWAHNSHIGDARHTDMGMAREELNIGQLCRERFGDQAALIGFGTHGGHVAAASDWNGDMEVKPIRPSLEGSYERVMHDSGVGCFLIDFARHARLRDGLLKPLLERFIGVIYRPDTERFSHYAHASLPRQFDGFVWFDQTTPVEPLGAQHIKAGVPDTFPFGL

SEQ ID NO: 143147 - DNA, 966 bp, Ralstonia solanacearum GMI1000
  CDS (1)..(966): transl_table=11
atgtctgaacgctcacgcggccgacgctttccgctgacgctcgacgcggtggtcgagcgcaagccggccgagcgccagcgcgagaagcggatttcgtccggcgtgaacgccgtgtcgctgccgacgcccgcgcgtacggcttccgcggagcgcgcaagctccacgcccgcgccgggcccggggccgcagcgcgtggcgggtgtcgacgcggccgtcggcgccgtggcggccagcgcggtgcaggctcgcacccaggccgcgcacgcggccgccggcggcatggcttctgaccgcgcgcgccaagctctggttgcccgcgtgcaggccgcgggcgtgaccgatgcgcgcgtgctggccgcgatcggccgggtgccgcgccacctgttcgtcgatgccgggctcgcctcgcaggcatacgaagatgccgcgctgccgatcggccaccagcagaccatttccaagccctcggtcgtcggtcgcatgatcgagctgctgctgcgggagcgtcccgagccgtccgcccaggccgcgcaggtgcccgcgcaaccgttgtcgcgcgttctcgagatcggcaccggctgcggctaccaggccgcggtgctgtcgcaggtggccggcgaggtgtattcgatcgaacgcatccgtccgctgcacgagaaagccaaagcgaacttgcggccactccgcgtgccaaacatccgcctgcactacggcgacggcatgctggggttgcccaaggccgcgccgttcgatgccatcatcgtggccgccgccgggttggaggtgccgcaggcactgctcgaccagctcgccatcggcggtcggctgatcgcgccggtggcgacggaccgcgccggcggcccctcgcagcagctcgtgctgatcgagcgccgcggccgcttccagtttcacagtaccgcgcttgaaggcgttttctttgtcccgttaaaatcaggaactgtttag

SEQ ID NO: 143148 - protein, 321 aa, Ralstonia solanacearum GMI1000
MSERSRGRRFPLTLDAVVERKPAERQREKRISSGVNAVSLPTPARTASAERASSTPAPGPGPQRVAGVDAAVGAVAASAVQARTQAAHAAAGGMASDRARQALVARVQAAGVTDARVLAAIGRVPRHLFVDAGLASQAYEDAALPIGHQQTISKPSVVGRMIELLLRERPEPSAQAAQVPAQPLSRVLEIGTGCGYQAAVLSQVAGEVYSIERIRPLHEKAKANLRPLRVPNIRLHYGDGMLGLPKAAPFDAIIVAAAGLEVPQALLDQLAIGGRLIAPVATDRAGGPSQQLVLIERRGRFQFHSTALEGVFFVPLKSGTV

SEQ ID NO: 143149 - DNA, 642 bp, Agrobacterium tumefaciens str. C58
  CDS (1)..(642): transl_table=11
atggtcgaaaaggaaggttttgccgctctcgttctccgtctgcggggcgaggggatttccgatctcgacctgttgacggcggttgagcagacgccgcgttccaaattcgtgccgccgcaatttgcggccgacgcctattccagccgcacgatcccgatcgactgcggttccttcatggaaggcgccgacatggcggtgaaaatccttgcccgcctgcagctgaaacccggccagcgcgtgcttgagatcggcaccggcagcggttttatgacggcgatcatcgcgcgccgggtggagcgggtgttttcgctggagcgttacaagacgctggtgcagcaggcgcagaactgtctcgacgatctgtccatccgcaacgtcgtcatccgccaggcggatggcagcaatggtctggtgggcgagggcaccttcgaccggattgtttccaccgccgcctttaccaccatgccccgcttctttgccgagcagatcgtttccggcggcatgatgatcgcgccgatcatcctggaagatgagcgttgcgtgatgacccgcttctccaagaccggcagccgcttcgagaaggaagagctgttcgagacgccgtatctgccactcggcagccatattgcgcggcatttgtga

SEQ ID NO: 143150 - protein, 213 aa, Agrobacterium tumefaciens str. C58
MVEKEGFAALVLRLRGEGISDLDLLTAVEQTPRSKFVPPQFAADAYSSRTIPIDCGSFMEGADMAVKILARLQLKPGQRVLEIGTGSGFMTAIIARRVERVFSLERYKTLVQQAQNCLDDLSIRNVVIRQADGSNGLVGEGTFDRIVSTAAFTTMPRFFAEQIVSGGMMIAPIILEDERCVMTRFSKTGSRFEKEELFETPYLPLGSHIARHL

SEQ ID NO: 143151 - DNA, 672 bp, Agrobacterium tumefaciens str. C58
  CDS (1)..(672): transl_table=11
atgatggatttcgaaaccgcacgcgccaatatggtcgacagccagttgcgcacgaccgacgtgacgtcgcattccgtgctgaaggcgtttttgagcgtgccgcgcgaggcattcgtgccggcgggtgtgcggcagattgcctatgcggatgaggatctgcagatctgtccggcgcttgacggtcgcccggcccgttatgtcatgaaggcatcgccgctggccaagcttttgcagctggctgccgtctccaaggacgatgtggtgctggaagtcggtggtggctccggttacgcggctgccatcctgtcccagcttgccggttcggtggtttcgcttgaaagcgacgaagcgctggccgcacaggcgaccgagacgctcgcttcgctcggttatgacaatgtcgctgtcgtgaccggcgatcttgccaagggttatgcgagtgaagcgccctatgacctgattttcatcaatggttcggtcgaggaagtgccggcggcgctgaccgaccagttgcgcgatggcggacgtcttgtcgtcgttgtcggatatggcaatgctgccaaggcaactgtctatcgccgtgatggcaacagcacgtctgctgcgagctttttcaacgcctccgtcaagcctgtaccgggttttgccaaggcggccgagttcgttttctga

SEQ ID NO: 143152 - protein, 223 aa, Agrobacterium tumefaciens str. C58
MMDFETARANMVDSQLRTTDVTSHSVLKAFLSVPREAFVPAGVRQIAYADEDLQICPALDGRPARYVMKASPLAKLLQLAAVSKDDVVLEVGGGSGYAAAILSQLAGSVVSLESDEALAAQATETLASLGYDNVAVVTGDLAKGYASEAPYDLIFINGSVEEVPAALTDQLRDGGRLVVVVGYGNAAKATVYRRDGNSTSAASFFNASVKPVPGFAKAAEFVF

SEQ ID NO: 143153 - DNA, 819 bp, Pyrococcus furiosus DSM 3638
  CDS (1)..(819): transl_table=11
atgattatcgaaagcacgactacaaggataaaggagataagggcaaacacttttatggcacctgtcagaattgtaccttttctgctggaatttataaagattattttggaacaaacaaagaatatagtaatgcatttatactcttcagattttcctctaatgatggatgagaaagaactttacgaaaagtggatgcgaacagtggaaatgttgaaggctgagggaataattagaagtaaggaagtggagcgagcatttctaaaataccctcgatacttgtttgtggaagataagtacaaaaaatacgctcacattgatgagcctcttccaattccagcaggccagacagtctcggctcctcatatggtggcaataatgcttgagatcgctaatctaaaacctggaatgaatattcttgaagtgggaactggaagtgggtggaatgctgccttgatttctgaaatagtcaaaacggatgtatacacaatagaaaggatccctgaacttgtggaatttgcaaaaagaaacttggagagagcaggcgtaaagaatgttcatgtaattttgggagatgggagtaaaggatttcctcccaaggctccctatgatgttattatcgtcacagctggtgctccaaagattcccgaaccacttattgaacagttaaaaattggtggaaagttgataattcctgtaggtagctatcacctctggcaagagcttttagaagttaggaaaactaaagatggcattaagatcaaaaaccatggtggggtagccttcgttcctttaataggggaatacgggtggaaagaatga

SEQ ID NO: 143154 - protein, 272 aa, Pyrococcus furiosus DSM 3638
MIIESTTTRIKEIRANTFMAPVRIVPFLLEFIKIILEQTKNIVMHLYSSDFPLMMDEKELYEKWMRTVEMLKAEGIIRSKEVERAFLKYPRYLFVEDKYKKYAHIDEPLPIPAGQTVSAPHMVAIMLEIANLKPGMNILEVGTGSGWNAALISEIVKTDVYTIERIPELVEFAKRNLERAGVKNVHVILGDGSKGFPPKAPYDVIIVTAGAPKIPEPLIEQLKIGGKLIIPVGSYHLWQELLEVRKTKDGIKIKNHGGVAFVPLIGEYGWKE

SEQ ID NO: 143155 - DNA, 693 bp, Schizosaccharomyces pombe 972h-
  CDS (1)..(693)
atgttctggagttttaacctttcctctaatgctgcgttggttcagcatttggtagagtcaaaatttttgacgaatcagagagccatcaaggcaatgaatgctactagcagatcattttattgccctttaagtccgtatatggattcacctcaaagcataggatacggagttactatatctgctcctcatatgcatgccacggctttacaagaacttgaaccggtcctccaacctggctgttctgccttggatattggttcaggtagtggttatttggtggccgctatggcccgaatggttgctccaaacggaactgtcaagggtattgagcacataccccagttggtggaaacttcaaaaaaaaatttgctaaaagatattaatcatgatgaagttcttatggaaatgtacaaagaaaaaagattgcaaataaatgtaggggatggaaggatgggtacgtctgaggatgaaaaattcgatgccattcatgtgggtgcctcagcttcagagcttcctcagaaactggtcgatcaattgaagtctcccggaaaaatccttataccgattggtacatattcgcaaaacatttacttaatcgaaaaaaatgagcagggtaaaatatcgaaaagaacattgtttccggttcgatatgtaccgttaactgactcaccagatgactcatcagattactag

SEQ ID NO: 143156 - protein, 230 aa, Schizosaccharomyces pombe 972h-
MFWSFNLSSNAALVQHLVESKFLTNQRAIKAMNATSRSFYCPLSPYMDSPQSIGYGVTISAPHMHATALQELEPVLQPGCSALDIGSGSGYLVAAMARMVAPNGTVKGIEHIPQLVETSKKNLLKDINHDEVLMEMYKEKRLQINVGDGRMGTSEDEKFDAIHVGASASELPQKLVDQLKSPGKILIPIGTYSQNIYLIEKNEQGKISKRTLFPVRYVPLTDSPDDSSDY

SEQ ID NO: 143157 - DNA, 975 bp, Streptomyces coelicolor A3(2)
  CDS (1)..(975): transl_table=11
atgggcgggtacgaggacctggacagcctcgccgcctccgcgcgggcggagctggtgcgggagatcgagctgagcggcgcctggacggccgacccggtgtggcgggaggcgttccggaaggtcccgcgccacctcttcgtgccgtactactacgtcggcgtccggggcggctacgaacgccggtggggcgaggaccccgacccgcgcgcccgcgagcgctgggtgcgcggcgcgtacgccgacgccccgctggcgacgcggatgcgcgacggcgaactgctctcctccatcagccagccctcgctgatggcgatgatgctggtcgagctggacgtgcgggacggcgaccgggtcctggagatcggcgccggcaccggctacaacgcggccctgctcgcccaccggctcggcgcggacgacctggtcaccaccgtcgacctggacccggagatcaccgagtcggcccgccggcacctggacgccgccgggtaccacccggccgtcgtcacgggcgacggcgcccgcggcgtcccggaacgcgccccctacgaccggatcctcgccacctgcgcgctgccctcggtgccgcgcgcatggccggcccagtgccgccccggcggccggatcctgaccccgctggccaccggcctcgtcgtgctcaccgtccgcgacgccgagcacgccgaggggcgcttcctgcacacgcccgcgtacttcgtgccgctgcgcggcgcggaccgtgccgcgcccgagacaccgggcctgggcggcgtaccgcgccgggcccgggaggacgacctgttccgcttcctgctggcgctgagccggggcgggctcgatccgcaggaggcgtacgcgctgtgggaccgcgaggacgccccgcgccgcgagcgctacggcatcaccgtcagcggcgaacgggcctgggcgtggctggacgaccccgaggggccgtacgcctggccgttcgcctga

SEQ ID NO: 143158 - protein, 324 aa, Streptomyces coelicolor A3(2)
MGGYEDLDSLAASARAELVREIELSGAWTADPVWREAFRKVPRHLFVPYYYVGVRGGYERRWGEDPDPRARERWVRGAYADAPLATRMRDGELLSSISQPSLMAMMLVELDVRDGDRVLEIGAGTGYNAALLAHRLGADDLVTTVDLDPEITESARRHLDAAGYHPAVVTGDGARGVPERAPYDRILATCALPSVPRAWPAQCRPGGRILTPLATGLVVLTVRDAEHAEGRFLHTPAYFVPLRGADRAAPETPGLGGVPRRAREDDLFRFLLALSRGGLDPQEAYALWDREDAPRRERYGITVSGERAWAWLDDPEGPYAWPFA

SEQ ID NO: 143159 - DNA, 2091 bp, Streptomyces coelicolor A3(2)
  CDS (1)..(2091): transl_table=11
atgactgcggacgaatggccgcaacgcctcatccggttcaccgactggagtcacgcggaggccaccgccgtggagcatctactcccggtgctgatcgcccaggagtcggaactggcccagtggtcgttcctgcggaagcacccctggtggcggttgcggtaccggcccgcgtgcccggactcggcgaaggccctggacgctgccctggacgagctggtcgacgccggcgtcctcgcctcctggacgcgaggcatctacgaaccggaagagacggccttcggcggccccgccgcgatgaagattgcgcacgccctgttccactacgacagccgtcacctgctggacgaggcggcccgccagcagacagtgagcggcccccggctcggccggcgcgagctggcggtcctcctgctcagcgtggcgatgcgagcggcgggcctcgactggtacgagcagggcgacgtctgggcgaggatcgcggccgagcgctccggcgacgaggtccgtagtccgcaacggcaccgggccgctgtccaccggttgatgaccgtcgacgtcagcaccaccagccgcagcgtcgcccggggccgactggcgccgctggccgagtggatagccaccttcgagtggttcggccagcagctcgccgacctcaaccgccagggccgcctggaacgagggctgcgggccgtgatcgcccaccacggcatcttccacttcaaccgcctgggccttgccgcccaggaccagcacaccttgtcaacactcgcgaaagaggtagtcatgggaacgagcgacaacgccgcgtccacccaagctgagggggcaccgggcgctacggtcaacggggtgaacagtgacaccatcgaagccccttccgccgaccgtctgcgcgcccagttgatcgaccacctggtcgagaccgggtgcgtgcgcaccccccgggtggaggaggccatgcggaccgtgccccgtcacctcttcgtcccgaacgcgcccctggagaaggcgtacggcaacgcgcccgtggacacgaagttcgacggatccgggcgctccatcagctgcgcctcacagcccgacatcgtcgccatgatgctggaacagctcgacgtccagcccggccagaagatcctggagctgggggcaggcaccggcttcaacgccggactcctgggctacctcgtcggcgagacgggacacgtcactacgatcgacgtggacgaggacatcgtggccggagcgcgcggcggcctggccgccgccggcatccacaacgtggaggtgatcctcggagacggagcagtcggccacacccccaacgcgccgtacgaccgcatcgaagccaccgtcggcgcccacggcgtcccgcacgcctggctcgaccagctcgcccctggcggacggctcctcaccccgctgcgcctgcgcggcagcgtctcccgctcgatcgcctttgagaaccaggacggagcctggcgcagcgtcggcagtcagatgaacacgttcatgcctctgcgccggggcatcgccgacgacccgcgcctcttcgtacccctggaccccgaccacaccgtcaccctcgtcaccaacggagaccagaaggtcgacgcggacgccctcggcgacatcttccgccagccgcgcaccgaggcgtggacggacgtcaccttccgcggcccggagtcggcggagtacctggagctgtggctcacctgcgccatgcccaacggcctgagccggatgcccgccaagaacgaggccatcgagaaggggctggtcaccgcgccctacccgtcctcgaccgcggtcttcgaggacggcaccctcacctacctcacccggcgcccgtacgcgaagaaggcccccgacggcgccaccctgtacgagttcggtgtcatcggccacggccccgacgccgaggccctcgccggggacgtcgcggaccagatccgcgcctgggaccaggacttccgagcgctcgacgttggcttcgagattcagccgctcgacgcggccccgctcgcgccgaagcccggccgcttcgccttcgacaacccgctgaaccgcatcgtcatcgaatggcagtga

SEQ ID NO: 143160 - protein, 696 aa, Streptomyces coelicolor A3(2)
MTADEWPQRLIRFTDWSHAEATAVEHLLPVLIAQESELAQWSFLRKHPWWRLRYRPACPDSAKALDAALDELVDAGVLASWTRGIYEPEETAFGGPAAMKIAHALFHYDSRHLLDEAARQQTVSGPRLGRRELAVLLLSVAMRAAGLDWYEQGDVWARIAAERSGDEVRSPQRHRAAVHRLMTVDVSTTSRSVARGRLAPLAEWIATFEWFGQQLADLNRQGRLERGLRAVIAHHGIFHFNRLGLAAQDQHTLSTLAKEVVMGTSDNAASTQAEGAPGATVNGVNSDTIEAPSADRLRAQLIDHLVETGCVRTPRVEEAMRTVPRHLFVPNAPLEKAYGNAPVDTKFDGSGRSISCASQPDIVAMMLEQLDVQPGQKILELGAGTGFNAGLLGYLVGETGHVTTIDVDEDIVAGARGGLAAAGIHNVEVILGDGAVGHTPNAPYDRIEATVGAHGVPHAWLDQLAPGGRLLTPLRLRGSVSRSIAFENQDGAWRSVGSQMNTFMPLRRGIADDPRLFVPLDPDHTVTLVTNGDQKVDADALGDIFRQPRTEAWTDVTFRGPESAEYLELWLTCAMPNGLSRMPAKNEAIEKGLVTAPYPSSTAVFEDGTLTYLTRRPYAKKAPDGATLYEFGVIGHGPDAEALAGDVADQIRAWDQDFRALDVGFEIQPLDAAPLAPKPGRFAFDNPLNRIVIEWQ

SEQ ID NO: 143161 - DNA, 678 bp, Xanthomonas axonopodis pv. citri str. 306
  CDS (1)..(678): transl_table=11
atgacgccgaggctgcgcctgcaaccggaatcggtcgggatcggcatgacctcgcagcgcgtgcgcgaccgcctggtcgagcgcctgcgcgaggccggcatccaggacgagtccacgctcaatgcaatgcgcaccgtgccgcggcatctgttcatcgatgaagcgctggcctcgcgcgcctacgaagacaccgcgctgccaatcggccatggccagaccatctcccagccctgggtggtggcgcgcatgaccgaagcggtgctgcaggttgccccgaccaaggtgctcgaagtgggcaccggctccggctaccagggcgcgatcctggcggcgctggggttggaggtctacaccgtcgagcgcatcggcgacctgctgcggcaggcgcgcaagcgcttccggcatctgggcatgaatgtgcgcagcaagcacgacgacggccgcatcggctggcccgagcatggtccgtacgacgccatcgtggtgaccgccgcggcaccggcgttggtcgatgcactgatcgatcagctggcggtcggcggacgcctggtcgcgccggtcggcggtgcttcctcgcaatcgttggtgcaactcacccgcggggccgatggcgcgatcgaacaacaggttctggcgccggtcacgttcgtcccgctgttgtcgggcatgctggattga

SEQ ID NO: 143162 - protein, 225 aa, Xanthomonas axonopodis pv. citri str. 306
MTPRLRLQPESVGIGMTSQRVRDRLVERLREAGIQDESTLNAMRTVPRHLFIDEALASRAYEDTALPIGHGQTISQPWVVARMTEAVLQVAPTKVLEVGTGSGYQGAILAALGLEVYTVERIGDLLRQARKRFRHLGMNVRSKHDDGRIGWPEHGPYDAIVVTAAAPALVDALIDQLAVGGRLVAPVGGASSQSLVQLTRGADGAIEQQVLAPVTFVPLLSGMLD

SEQ ID NO: 143163 - DNA, 642 bp, Chlorobium tepidum TLS
  CDS (1)..(642): transl_table=11
atggctcgggagcgccaggagatggtggtagagctcaagcgttacggtatcagcaacgcccgagtgctcgatgcgtttctgacggtcaggcgtcatctctttgtcgatgcacagagccggccctacgcctacagcgacaatgctatgccgatcggattcggccagaccatttcgcagccctatacggtggcgtacatgacttcgctgctggtggagcgcgttccatccggcaaggtgcttgaaatcggtaccggttcgggctaccaggcggctattctcgccgagcttggctatcgtgtctataccatcgagcggattgccgggttgtacgcagcggcggggcgcgtgctcgatgcgcttggtttgcccgttcacccgcgtctcggtgatggaacgctcggctggccggaggaggcgccgttcgacggcatcatcgtgaccgccgccgcgccgcgcgagccgcatacgctcatgagccagcttgccgaaggcggcgtgctcgttgtgccgattggcgacctcggttcacagcagatgaccgtcattcggcgcaggggcgagcggttcgagcatgagatttttcacaacttcgccttcgtgccgctctgcgggcgtgaaggttgggcagacaacaacgaataa

SEQ ID NO: 143164 - protein, 213 aa, Chlorobium tepidum TLS
MARERQEMVVELKRYGISNARVLDAFLTVRRHLFVDAQSRPYAYSDNAMPIGFGQTISQPYTVAYMTSLLVERVPSGKVLEIGTGSGYQAAILAELGYRVYTIERIAGLYAAAGRVLDALGLPVHPRLGDGTLGWPEEAPFDGIIVTAAAPREPHTLMSQLAEGGVLVVPIGDLGSQQMTVIRRRGERFEHEIFHNFAFVPLCGREGWADNNE

SEQ ID NO: 143165 - DNA, 636 bp, Shewanella oneidensis MR-1
  CDS (1)..(636): transl_table=11
atgactcgagttgccttaacatcggcggtgaatttagcgaaaaagcttcaggatgcggggatccgcaatccagccgtgcttaaggcaatatcccaaacgcctcgcgagctatttcttgataatgcgttagctcataaagcttatgaaaatacggcgttacccatagggcaagggcaaacgatatctcaaccttatattgttgcacgtatgaccgagttactgctgcagcatcaaccacagaaggtgcttgaggtggggacaggctctggctatcaagcggcgattcttgcccaattagtgcccgaactttgcactgtagaacggataaaggcgttacagatccaagcaagacaaagattaaaacgactcgatctgcacaatgtttcttttaagtatggtgatggttggcagggctggctgaatcgcagtccttataatggcattatggtcacggctgcggcggcgaagattcctgaagcgttattatcacagttagccgaaggaggggttttgatcatccctgtgggggaagaaacccagcaattgatgcggattacgcgtcattctgaccgttttagctcggaagtgatagagactgtcaaatttgttcccttagtcaatggcgagcttgcatag

SEQ ID NO: 143166 - protein, 211 aa, Shewanella oneidensis MR-1
MTRVALTSAVNLAKKLQDAGIRNPAVLKAISQTPRELFLDNALAHKAYENTALPIGQGQTISQPYIVARMTELLLQHQPQKVLEVGTGSGYQAAILAQLVPELCTVERIKALQIQARQRLKRLDLHNVSFKYGDGWQGWLNRSPYNGIMVTAAAAKIPEALLSQLAEGGVLIIPVGEETQQLMRITRHSDRFSSEVIETVKFVPLVNGELA

SEQ ID NO: 143167 - DNA, 696 bp, Pseudomonas putida KT2440
  CDS (1)..(696): transl_table=11
ttggctggagggcctgctctgatgcgtgaggacgatatgctgcggcgtggcatcggcatgacctctcagcgtacccgggagcggctgatccagcgcttgtgcgaagagggggtttcgaacaccaaggtgctcgacgtgatccgtcgtacgccgcgccacctgttcgtcgacgaggcgctggcgcatcgggcttacgaagacaccgcgctgccgatcggccacaaccagaccatctcccagccgttcatggttgctcacatgagcgagttgttgctcgaggccgggccgctggacaaggtgctggagattggcaccggttcgggctaccagacggcgatcctggcccagctggtcgagcgagtgttttcggtagagcgtatcaaggtactgcaggaccgggccaaagagcgcctggtggagcttaacctgcgcaacgtggtcttccgctggggtgacggttgtgaggggtggccggcgcttgcgccgtacaacggcatcatcgtcaccgccgtggcgccggaagtgccacaggcactgctcgaccaactggcacccggtgggcgcatggtcatcccggtagggccggccggcgaagcgcagcaactgatgctgatcgtgcgcgaggagcatggattctcccgtcgggtactgggggctgtgcgtttcgtgccgctgctcaatggtcccctggcctga

SEQ ID NO: 143168 - protein, 231 aa, Pseudomonas putida KT2440
MAGGPALMREDDMLRRGIGMTSQRTRERLIQRLCEEGVSNTKVLDVIRRTPRHLFVDEALAHRAYEDTALPIGHNQTISQPFMVAHMSELLLEAGPLDKVLEIGTGSGYQTAILAQLVERVFSVERIKVLQDRAKERLVELNLRNVVFRWGDGCEGWPALAPYNGIIVTAVAPEVPQALLDQLAPGGRMVIPVGPAGEAQQLMLIVREEHGFSRRVLGAVRFVPLLNGPLA

SEQ ID NO: 143169 - DNA, 678 bp, Xylella fastidiosa Temecula1
  CDS (1)..(678): transl_table=11
atgactgcacctccatccctgcaagcgaaagccgtagggatcggcatgacgtcgcaacgcgtccgagaccgcctggtcgaacgactacgcgaatgcggcatccaagacgaacgggtactcagcaccattcgcatcgtgccacgccatttattcattgatgaagccttggcactgcgcgcttacgaagacaccgcattgcccatcggccatggacagaccatctcgcaaccctgggtcgtcgcacggatgaccgaagctgtcatgcaggttgtccccaaaaaaatactcgagatcggtacaggttccggctaccagagcgccattctggcctcactaggattggaggtgtacaccattgagcgtatcggcaaactactgcgtcaagcacgtaagcgtttccgccagcttggcataaaaatacgcagcaaacacgatgacgggagcaccggctggacagaacatgcaccttacaacgccatcttggtcacagcagcagccccgacactgatcgacactctcatcgaacaacttgcaataggcggacgcctggtggctcctgtcggcaccgcttcagagcaagccctagtgcagctcacacgaacaatcgacggtagcatcacacacgagattttagaaccagtcacatttgtatccctgctaccagggatgttggattaa

SEQ ID NO: 143170 - protein, 225 aa, Xylella fastidiosa Temecula1
MTAPPSLQAKAVGIGMTSQRVRDRLVERLRECGIQDERVLSTIRIVPRHLFIDEALALRAYEDTALPIGHGQTISQPWVVARMTEAVMQVVPKKILEIGTGSGYQSAILASLGLEVYTIERIGKLLRQARKRFRQLGIKIRSKHDDGSTGWTEHAPYNAILVTAAAPTLIDTLIEQLAIGGRLVAPVGTASEQALVQLTRTIDGSITHEILEPVTFVSLLPGMLD

SEQ ID NO: 143171 - DNA, 981 bp, Streptomyces avermitilis MA-4680
  CDS (1)..(981): transl_table=11
atgagcgcgcacgcactcgaccacgacctggaggccctcgccgcgtcggcgcgggcggtacttctgcgcgagatcgacgcgagcggggcctgggatgccgatccgcggtggcgggaggcgttcgagacggtcccgcgccacctcttcgtgccgtactactacgcgggcgccgtcggcggctacgagcgcctgtggcgcgacagccccgacccgcgcgcccgggagcgctgggtgcgcggcgcgtacgccgacgccccgctggcgacccgggtgcgcgacggggagctggtgtcctccagcagtcagccctccctgatggcgaagatgctcgtcgagttggacgtgcgggacggggacgccgtcctggagatcggtgccggcaccgggtacaacgcggccctgctcgcccaccggctcggcgacgagcaggtcaccaccgtcgacctcgacgccgagatcaccgagtcggcgcggcagcacctggccgccgccggacaccacccggcggtcgtcaccggcgacggcgcgcggggagtgcccgcccgcgcccccttcgaccggatcatcgccacctgcacgctgacgtcgatcccgcgcccctggctcgcccagtgcgttcccggagcccgcatcctggcgccgttcgcgaccggtctgatcgccctgcgggtacgggacgccgggtacgccaccgggcacttcctgcacacgcccgcctacttcgtaccgctgcgcggtgtcgtacggcccgagcaggagcccccgaacctgggcgggctgccgcgccgggccaggggccacgagctgttccggttcctgctgaccctgaccgccggccgcctcgacccgcaggaggcgtacaccctgtgggagcgcgaggggcagccggggcgcgagcggtacggggtcacggtcggcgacgggcgctcctgggcctggctggacgaccccgaagggccgtacacctggccactgccgtga

SEQ ID NO: 143172 - protein, 326 aa, Streptomyces avermitilis MA-4680
MSAHALDHDLEALAASARAVLLREIDASGAWDADPRWREAFETVPRHLFVPYYYAGAVGGYERLWRDSPDPRARERWVRGAYADAPLATRVRDGELVSSSSQPSLMAKMLVELDVRDGDAVLEIGAGTGYNAALLAHRLGDEQVTTVDLDAEITESARQHLAAAGHHPAVVTGDGARGVPARAPFDRIIATCTLTSIPRPWLAQCVPGARILAPFATGLIALRVRDAGYATGHFLHTPAYFVPLRGVVRPEQEPPNLGGLPRRARGHELFRFLLTLTAGRLDPQEAYTLWEREGQPGRERYGVTVGDGRSWAWLDDPEGPYTWPLP

SEQ ID NO: 143173 - DNA, 669 bp, Nitrosomonas europaea ATCC 19718
  CDS (1)..(669): transl_table=11
gtgagtgtacgccattctggtatcggcatgacatcgctgcggacgcgggttcgtatggtcgaacgcttgcgggaacagggtattaaagatgaagtggtattggcagcaatgggttttatcccgcgccatctttttgttgaggcagccttggcatctcgggcatatgaagatgttgcgttaccgatcaattacggacaaaccatctccagtccctggattgtcggccgtatgactgaattgctgcgaaatggtggcagtaattcacttagaaaaatcctggaaattggtacagggtgtggttatcagactgcagttctggcaaaaatagcaagtgaagtctactcgattgagcggataggtcctttgttgacacgtacacgtattcgattacgtgaattgggtattctcaatattcatctgaagcatgctgatggtatgcggggcttaccggaagcagggctgttcgatggaattatgatgacagcagttataccggaaataccggagacacttctggaacaattggctatgggtggcagaatggtattcccaaagggaaacaggaagcaatatctttgtgtgatcgatcacacgaccgaaggttttgttgaaactatcttggatgaggtgatgtttgtaccgatacttcccggaactatcaatagatag

SEQ ID NO: 143174 - protein, 222 aa, Nitrosomonas europaea ATCC 19718
MSVRHSGIGMTSLRTRVRMVERLREQGIKDEVVLAAMGFIPRHLFVEAALASRAYEDVALPINYGQTISSPWIVGRMTELLRNGGSNSLRKILEIGTGCGYQTAVLAKIASEVYSIERIGPLLTRTRIRLRELGILNIHLKHADGMRGLPEAGLFDGIMMTAVIPEIPETLLEQLAMGGRMVFPKGNRKQYLCVIDHTTEGFVETILDEVMFVPILPGTINR

SEQ ID NO: 143175 - DNA, 657 bp, Helicobacter hepaticus ATCC 51449
  CDS (1)..(657): transl_table=11
atgtatcaaaaaatagccaaaaaaatgtgtgatgaaatacaaaaaagctttccactttctcccaaagtagttaccgcactttgtgctgtggatagagagatgtttgtgccttcagttttcgctcatcaagcttatgagattaatgcgttgcctatggtagattctcaatggattagctcccctctgaccgtggcacaaatgagcgagtatctcgccccaaatggaggagattctgtattggaaattggttgtgggagcggctatcaagcaatggtgctttccaaaatgtttcgccgtgtttttagtattgagcgcattgataagctttttgaagaagcacgagaacgctttagacgtttagcatctcataatatttttattaagctcgatgatgggcaaaaaggttgggctgaatatgctccatttgatgcaatacttttttctgcgtgtgcaagggagattccgactattattgttaatcaacttgaagagggtggggtgcttgtcgcacctatgcttgaaaatggaaagcaaatcattaaacgttttaaaaaacataatggcatacttgagggtggcgaaatcttatcagaatgcctttttgtagatatacaagatggtatagtctcagaatctaagaataaatgcgtaatgtaa

SEQ ID NO: 143176 - protein, 218 aa, Helicobacter hepaticus ATCC 51449
MYQKIAKKMCDEIQKSFPLSPKVVTALCAVDREMFVPSVFAHQAYEINALPMVDSQWISSPLTVAQMSEYLAPNGGDSVLEIGCGSGYQAMVLSKMFRRVFSIERIDKLFEEARERFRRLASHNIFIKLDDGQKGWAEYAPFDAILFSACAREIPTIIVNQLEEGGVLVAPMLENGKQIIKRFKKHNGILEGGEILSECLFVDIQDGIVSESKNKCVM

SEQ ID NO: 143177 - DNA, 1479 bp, Rhodopirellula baltica SH 1
  CDS (1)..(1479): transl_table=11
gtgatgccgaagcgtaaagtgattccgaagcagcaaccgctcgcaagcaacgcactctctccaacagccgtgactttgccctccagcatctcgtgcggtgtggggttggtccattctcggttgggacgggctcgctcgggatgggcccgctttgggtggatctgcgtgttgatctcaattgtgacgcccgtgtggtcgcagtcgcctcgctcatcaagatctcatttcaatccatctccattgaccagcggcagttccttggctcagcctcctcatttaattttgggccaaaccggttcgtcgcgatccgccgtcgacgatcgctacgcggccgcacgacgcaagctcgttgaaactcgaatccgaaccgctggcgtgaccaacgaagcggttctgaaatcgattgagaccacgcctcgacacgagttcgttcccgcggcggtgcgagacaaggcgtactttgacatggccttgcctatcggctcggcacaaaccatcagcagtccgttcatcgtcgcgtcgatgacggagacgcttgatcccaaaccgaccgacaaagtgttggaaatcggcaccggcagcggttaccaagccgccgtgctcagtcccttggtcgcggaagtttattcgattgaaattgtcgacgaactcggcacgcgtgcggccggagtgctcagcaagctgggttatgaaaacgtccacactcgcatcggcgatggtttccttggttggccggaagcctctcctttcgacaaaatcatcgtgacgtgcagccccgagtcggtgccggttccgctagtgcaacaacttcgcgaaggcgggtcgatgatcattcccgtcggcgaacgctatcaacaaacgctgtaccggatgaccaaacgtgatggcgagctggttcgcgaaccactccggccgacgctgtttgtccccatgactggcacggcggaggacgctcgtcaaacgcttcccgatcccgccaaccccaaagtcgtcaaccaggatttctccgatccgcccggagccgacgatccagagggttttgtgcccggatggtattacggtcggcaagtcgagcaagtcgcgttacaggcagacggagccgaaggtgcgaaagattccgggttggttcggtttgaaaacgagacccccggtttgggatcgcacttgttgcaaggcattgcaatcgacggaaccaaagtctctttgattcgtctgtctgctcgacttcgaaccgacaaggttgtgaaggggcccgatgcggatgcgtggccaatggtcgcaatcagtttctacgacgagctaaggcgtgacctgggaacattttcgatgggtccatatcgaggaactcgtccgtggcgtgatgacagccgtttggtacgggtcccgcgagccgcacgtgagggaattgtgcggattggattgttcggagcgaccgggacagttgagtttgaccacgtatcgatcgagaagattgactga

SEQ ID NO: 143178 - protein, 492 aa, Rhodopirellula baltica SH 1
MMPKRKVIPKQQPLASNALSPTAVTLPSSISCGVGLVHSRLGRARSGWARFGWICVLISIVTPVWSQSPRSSRSHFNPSPLTSGSSLAQPPHLILGQTGSSRSAVDDRYAAARRKLVETRIRTAGVTNEAVLKSIETTPRHEFVPAAVRDKAYFDMALPIGSAQTISSPFIVASMTETLDPKPTDKVLEIGTGSGYQAAVLSPLVAEVYSIEIVDELGTRAAGVLSKLGYENVHTRIGDGFLGWPEASPFDKIIVTCSPESVPVPLVQQLREGGSMIIPVGERYQQTLYRMTKRDGELVREPLRPTLFVPMTGTAEDARQTLPDPANPKVVNQDFSDPPGADDPEGFVPGWYYGRQVEQVALQADGAEGAKDSGLVRFENETPGLGSHLLQGIAIDGTKVSLIRLSARLRTDKVVKGPDADAWPMVAISFYDELRRDLGTFSMGPYRGTRPWRDDSRLVRVPRAAREGIVRIGLFGATGTVEFDHVSIEKID

SEQ ID NO: 143179 - DNA, 690 bp, Bordetella bronchiseptica RB50
  CDS (1)..(690): transl_table=11
ttgccgcgcgcgcctgcgcagcccgcgccgctggccagcggcaacctgggcctgaactccgaccggctgcgccaggcgatggtgcagcggctgcgcacgcagggcatcgtcgacgaacgggtgctcaacgccatggcggcggtgccgcgccatctgttcgtcgatgaagcgctggccagccgtgcctacgaagacgcggcgctgcccatcgggcactcgcagaccatttcgcagccgtgggtggtggcccgcatgatcgccgccgtctgcgaggaccgtgccccggcccgggtgctcgaggttggcgccggctgcggctaccaggcggcggtactggcccagatcgtgcgcgaggtgcatgccatcgagcgcatccgcggcctgtacgagctggcgcgcggccatctgcgggcgctgcgcctggccacccgggtgcgcctgatccatggcgacggcatgctgggcgtgcccggcgtggcgccgttcgatgctattgttgtggctgcggcgggcctggccattccgcaggccttgctggatcagcttgcgccgggcgggcggctgatcgcgcccgaagggtccacccaccagcggctggtgctgatcgaacgcaccggggccaccgcctggagccgaaaagaactcgaagctgtacgttttgtgcccctcagggccggaatacaatcttga

SEQ ID NO: 143180 - protein, 229 aa, Bordetella bronchiseptica RB50
MPRAPAQPAPLASGNLGLNSDRLRQAMVQRLRTQGIVDERVLNAMAAVPRHLFVDEALASRAYEDAALPIGHSQTISQPWVVARMIAAVCEDRAPARVLEVGAGCGYQAAVLAQIVREVHAIERIRGLYELARGHLRALRLATRVRLIHGDGMLGVPGVAPFDAIVVAAAGLAIPQALLDQLAPGGRLIAPEGSTHQRLVLIERTGATAWSRKELEAVRFVPLRAGIQS

SEQ ID NO: 143181 - DNA, 669 bp, Chromobacterium violaceum ATCC 12472
  CDS (1)..(669): transl_table=11
atggctgcaccgctgaccccgaacgcccaggcctacggcatgctttccgagcgcacgcgccgccgcatgagcgaccgcctgcgccagcacggcatcagcgacgagcgggtgctgtcggcgatgcacgaggtgccgcgccacctgttcgtcgaccaggcgctggccacccgcgcctatgacgacgtgtcgctgcccatcggccatggccagaccatctcccagccgctgacggtggcgaggatgaccgaattgctgatccagggccggcaacccggaaagatcctggaggtcggcaccggctgcggctaccagacggcggtgctgctgaaaaccggcgccgaagtctattcgattgaacgactcggcgcgattcttgaccaagcaagacgcaatctgcgcgccgccaagctggtccacgcccggctggtgcacggcgacggcaacgcgggcctgcccgaggccgcgccgttcgacggcatcatcatcaccgccgccgcgcgcgcggtgccggcgccgctggtggaccagctggccgagggcggccggatggtgctgccgcttggcgacgccgagcaacacctgtggctgctggaaaaaacggcgcaaggcctgcagaagacccggctggatccggtcaagttcgttccgctgctgggcggacgcggctga

SEQ ID NO: 143182 - protein, 222 aa, Chromobacterium violaceum ATCC 12472
MAAPLTPNAQAYGMLSERTRRRMSDRLRQHGISDERVLSAMHEVPRHLFVDQALATRAYDDVSLPIGHGQTISQPLTVARMTELLIQGRQPGKILEVGTGCGYQTAVLLKTGAEVYSIERLGAILDQARRNLRAAKLVHARLVHGDGNAGLPEAAPFDGIIITAAARAVPAPLVDQLAEGGRMVLPLGDAEQHLWLLEKTAQGLQKTRLDPVKFVPLLGGRG

SEQ ID NO: 143183 - DNA, 630 bp, Wolinella succinogenes DSM 1740
  CDS (1)..(630): transl_table=11
atgaatcacatcaaaaccgcacggatggtggaggagattcatgctcgattccccctctctcctgaggtttacaaagcccttcttaaagtcgatcgggagctttttgtccctagcggtcttaggcatttggccttcatgctcgatgcactccccatgagtgaaaaccagtggattagctcccctttaacggtggccaagatgagcgaatacttagagccaaaaggggctgatagcgtgctagagattgggtgtgggagcggttatcaggcggtggtgctaagccacctctttcgccgtgtctttagcattgagagaatcgagcgcctcctccttgaggctagaggtcgcctcaaaacctcccaaatctccaatgtcaacaccaaactcgatgatggacaaaagggatgggcgcaatacgccccctatgatcgcattctcttctccgcctccatcccctccatccctcaagccatcgcggatcagctagaggagggggggatactcatcgcccccatcgaggagggtaatgctcaggtgatcaagcgctttgagaaatatcgaggccaactcaaagagaccaaaatcctagagcgctgcgtctttgttcccattaagagcggaattgcctaa

SEQ ID NO: 143184 - protein, 209 aa, Wolinella succinogenes DSM 1740
MNHIKTARMVEEIHARFPLSPEVYKALLKVDRELFVPSGLRHLAFMLDALPMSENQWISSPLTVAKMSEYLEPKGADSVLEIGCGSGYQAVVLSHLFRRVFSIERIERLLLEARGRLKTSQISNVNTKLDDGQKGWAQYAPYDRILFSASIPSIPQAIADQLEEGGILIAPIEEGNAQVIKRFEKYRGQLKETKILERCVFVPIKSGIA

SEQ ID NO: 143185 - DNA, 705 bp, Gloeobacter violaceus PCC 7421
  CDS (1)..(705): transl_table=11
gtgttcgctccccccttcggaccgcttgagcccccagtgggtcatctggcccaacaagccgaccaccgccagttccagagacaacggatggtcgacgaacagttgcggccccgcggcgtcgaggcgcaggcggtgctcgcggcgatggcgaaggtgccgcgccaccgctttgtcccgccgccctatacccggcttgcctacgaggaccggccgctgcccatcgggcatagccagacgatttcccagccgtttattgtcgcctacatgagcgaggccgcccgcatcacaccgggtgcgaaggtgctcgaaatcggcacaggctccggttaccaggctgccgtgctggccgaaatgggggcagaggtttacaccgtcgagattgtaccggaactggccaagcgggcggagcgcaccctggaggaactgggctaccgcagtgtgcgcgtgaggagcggggacggttatcaaggctggccgcagcacgccccgttcgatgcgatcgtggtcaccgccgccccggagcgcatcccgcagccgctcatcgatcagctcgcggtgaacggccggctgatcgttccggtgggcacccagacggaagaccagcggatgacggtactgaccagaacgcccggcggcatcgtcgagcaaaaaacatttccggtgcgctttgtgcccctgacccgggagaagcctcaggaacattga

SEQ ID NO: 143186 - protein, 234 aa, Gloeobacter violaceus PCC 7421
MFAPPFGPLEPPVGHLAQQADHRQFQRQRMVDEQLRPRGVEAQAVLAAMAKVPRHRFVPPPYTRLAYEDRPLPIGHSQTISQPFIVAYMSEAARITPGAKVLEIGTGSGYQAAVLAEMGAEVYTVEIVPELAKRAERTLEELGYRSVRVRSGDGYQGWPQHAPFDAIVVTAAPERIPQPLIDQLAVNGRLIVPVGTQTEDQRMTVLTRTPGGIVEQKTFPVRFVPLTREKPQEH

SEQ ID NO: 143187 - DNA, 852 bp, Nasonia vitripennis
  CDS (1)..(852)
atgttcctgattgagtgtgtcgagaagagaccacttttatatgataaaagtgatgactcgtttggaaaggtcagttctaaccaaaaatatgaaatttttgaccaaatcgcctatgagatttttgagattctggggattatgacgacagttagtgtaaacgctttcggtatgtttcaattcggccgttttcacggtaaaggaaatttagaattagttcaacatcttagaaaatctggagtaatcaaatcagaaagagtgtttgacgcaatgagtaaagtggacagaggaaaatacacagaaccttgtgatgcatatatcgattcacctcaaagcatcggatttggtgcaacaattagtgcaccacatatgcatggctatgcactggaatttctcgcagataaattaaaagatggcagtagagcattagatgttggatctggttctggctatttaactgcatgtatggcactgatggttggtcctaaaggtgttgccgtgggtattgagcatgtgccgaaacttcaagaacgagctagaagaaatattcaaagtgatcatcctgaattattggaaagcaaacaacttgaattgatagttggtgatggtagactgggttacccaaataaagcaccatacgatgctattcacattggagcagcagctccggaagcaccagaaatacttattaatcagctagctcctggtggccgtatgatcgtaccaattggaaagacgaacgctgaccaaaccttgtttcaaatagataaaactatggatggcaaaattcagaagacatcattaatgggagttgtctatgtcccgttatgtgataagagtcgacaagtattatga

SEQ ID NO: 143188 - protein, 283 aa, Nasonia vitripennis
MFLIECVEKRPLLYDKSDDSFGKVSSNQKYEIFDQIAYEIFEILGIMTTVSVNAFGMFQFGRFHGKGNLELVQHLRKSGVIKSERVFDAMSKVDRGKYTEPCDAYIDSPQSIGFGATISAPHMHGYALEFLADKLKDGSRALDVGSGSGYLTACMALMVGPKGVAVGIEHVPKLQERARRNIQSDHPELLESKQLELIVGDGRLGYPNKAPYDAIHIGAAAPEAPEILINQLAPGGRMIVPIGKTNADQTLFQIDKTMDGKIQKTSLMGVVYVPLCDKSRQVL

SEQ ID NO: 143189 - DNA, 690 bp, Nasonia vitripennis
  CDS (1)..(690)
atggcatggcactgctctggaactacaaacgaagaaatggtaatcaagttaaaagaagctggaataattggaacggacaaagcaaaagctgcaatgttagcagttgacagagctaaatattgccacaaatcggatccttaccaggattgccctagacaaattggatacaatgtcactatcagtgctccacatatgcatgcatatgccttaacatttctgactgaacaacttttcgatggtgctaaagctttggacgttggttcaggatcaggatacctcactgcatgtatggctcatatggtggggcctgagggacacgttgtcggcgttgatcatatcccagagcttgtagaactatcaatcaaaaatgttcaagatggtaatccagaatttttagaaaaaggacgaataacatttttagagggagatggcagattgggagttgcagctcatgggccctacaatgctattcatgttggtgcagctgctgatacactaccacaagaacttgtcgatcagttagctcctggaggaagattgatctgtccagttgttgcaatagaaggattcaacagatttcaacatctaatgcaagtagataaaaatttagatggttctgttaagaaagaaaaactaatggacgtgtcttacgtccttttgactgatgcaaatactcaactaagcaattaa

SEQ ID NO: 143190 - protein, 229 aa, Nasonia vitripennis
MAWHCSGTTNEEMVIKLKEAGIIGTDKAKAAMLAVDRAKYCHKSDPYQDCPRQIGYNVTISAPHMHAYALTFLTEQLFDGAKALDVGSGSGYLTACMAHMVGPEGHVVGVDHIPELVELSIKNVQDGNPEFLEKGRITFLEGDGRLGVAAHGPYNAIHVGAAADTLPQELVDQLAPGGRLICPVVAIEGFNRFQHLMQVDKNLDGSVKKEKLMDVSYVLLTDANTQLSN

SEQ ID NO: 143191 - DNA, 1446 bp, Nasonia vitripennis
  CDS (1)..(1446)
atggctcatacggaccgcttttgcgctgaaaataatgataaattaatagaatatcttaaaaataaaggtattattaaatcttcaattgttacgaaaactatgtgcttggtggatcgcaaaaattatgtcggcagttccaattgtttaaacaatgaacaatacaccgatgcaccgctaaaaataagtcataatagaaccatcagttctccacacatgcatggcatgatcttcgaaattcttgcagaaaaattgtcgactgcgaaaaatgtattatgcattagatgcaatacaggatatgtaagtagctgtatggcatcaatgatgggaccacatggaactgtatttcatatagaatctataccagatttaaaagaaaaagttaagaagactattaaaaagactaacccatttttactatggactaaaagaatgcagttattagatgtggagaatgagagtgctgggtatccgcaacccaaagtacgttatgatgttatttacgttggggcagcagccgcagaaataccacaagcactgattgaccaactagcttatggtgggcgcctcgtcatacccatagggccaaaagacttacaacaactcatgcaaatcgataagaatttagatggaacaattgtgaaaaagacagtaacttccgttcgatatgaatatttggatagtcctagggaaatcacgaatgctaacaataatacagaaataaaagcagaaaatgattcaaataaaacatcaatatctaatttaaatactgtatgcctaaataatctaataagtgaaaaggtacaaacccaatcatcaacagaaatacccaataggtcgccaacaaagcctgtcaaaaatcacttcaacaataactgtatgaaagatcaccttttgcaaacaatcgccgacaaatttgagactaaaactgacgaaatatacgcacagccgagtgtcaaagatcccgaagaaaatgttcacaagatattgcaggatattcggacgttaatgacaaaattagagttacaatacgattcacgaagtgttgaaaagattaaagatactcaagaaaaagcgacatctaatgatagaagtagtgaaagccgcatttctcatgaaacgaaaatgcaaaatacttcggcgataaagcctgtgcaaaagaaagatgaagtcctgtcgataacaaaggagaaattaaataataaaaatgacgaagctgatacacagtcaagtatcaaggaatccgaagaaaatattcacaagacattgcaggaatcacagacgttagaagaaaaattagtattagactcaaaggatgatccgcgaaatatcgaagagatagaagatacgcaagaaaaatcaagacctgattcgagtagcgaaagccgcatttttcatgaaataatgaaagcgcaatcatcggtgaatgagttaagcaaacaagactaa

SEQ ID NO: 143192 - protein, 481 aa, Nasonia vitripennis
MAHTDRFCAENNDKLIEYLKNKGIIKSSIVTKTMCLVDRKNYVGSSNCLNNEQYTDAPLKISHNRTISSPHMHGMIFEILAEKLSTAKNVLCIRCNTGYVSSCMASMMGPHGTVFHIESIPDLKEKVKKTIKKTNPFLLWTKRMQLLDVENESAGYPQPKVRYDVIYVGAAAAEIPQALIDQLAYGGRLVIPIGPKDLQQLMQIDKNLDGTIVKKTVTSVRYEYLDSPREITNANNNTEIKAENDSNKTSISNLNTVCLNNLISEKVQTQSSTEIPNRSPTKPVKNHFNNNCMKDHLLQTIADKFETKTDEIYAQPSVKDPEENVHKILQDIRTLMTKLELQYDSRSVEKIKDTQEKATSNDRSSESRISHETKMQNTSAIKPVQKKDEVLSITKEKLNNKNDEADTQSSIKESEENIHKTLQESQTLEEKLVLDSKDDPRNIEEIEDTQEKSRPDSSSESRIFHEIMKAQSSVNELSKQD

SEQ ID NO: 143193 - DNA, 684 bp, Anopheles gambiae str. PEST
  CDS (1)..(684)
atggcctggcgatcgaagggctcgacacaggcggaactgatccggctgatgcaggagtttaacgtgatcaagacggaagcggtagcgcagacaatgatagcgaccgatcggaagtactacgtgccggcgaacgtaccccagtaccaggacgaaccgcagcgaatcgggcacggtgccaccatcagtgcgccccacatgcacgcgtacgcactggagctgctgcaatcgtacctgaagccgaacagcaaggtgctggacgtcggttccggttcgggctacctgaccgcctgcttcgcccgcttcatacaccgggacccggcggcgaccgggtacgcggtcggcatcgagcaccatccgcagctggtgacgctcggccgccagaacatcggccaggacgaccaatcgctgatcgatacgggcaaaattgttctcatcgagggtgacggacggcggggctgcaaggaccacgcaccgtacgattgcatacatgtcggggcggccgcgccggaaataccgcaagagctcgtcgagcagctgaagcccggcggccgcatgatcataccggtcggcccggagggaggcaaccagcgcctggtgcagatcgacaaaacgtccgacggcgagatccagaacacgaagctgatggacgtgatgtacgtgccgctcaccgatctgcgcaaatga

SEQ ID NO: 143194 - protein, 227 aa, Anopheles gambiae str. PEST
MAWRSKGSTQAELIRLMQEFNVIKTEAVAQTMIATDRKYYVPANVPQYQDEPQRIGHGATISAPHMHAYALELLQSYLKPNSKVLDVGSGSGYLTACFARFIHRDPAATGYAVGIEHHPQLVTLGRQNIGQDDQSLIDTGKIVLIEGDGRRGCKDHAPYDCIHVGAAAPEIPQELVEQLKPGGRMIIPVGPEGGNQRLVQIDKTSDGEIQNTKLMDVMYVPLTDLRK

SEQ ID NO: 143195 - DNA, 906 bp, Apis mellifera
  CDS (40)..(729)
cgttggtctttgataagtttattgtttcctgtatttgaaatggcctggtttgcgagatttaatggaagaactaatcaagatcttgtagaatatcttaggacatcaagaataattaaaactgaaagagtttatgaagcaatgtctgctgtagataggggacattatgttcgttctggatatgcatattttgatgctccacaacagattggttatggtgcaactataagtgctcctcatatgcatgcatatgcattggaaatacttgaagaaaagttatttaatggtgcaagagcattagatgtgggttctggttctggatatttaacagcatgtatggcattgatgacaggatcaaatggattggttgtgggaattgaacatattcctgaattaaatttatttgctatagaaaacattaagaaggataatccagaacttgttgaatatggtcgtgttcaatttgttgatggagatggaagattaggatatccacaactagcaccatatgatgctattcatgtaggagctgctgctaaagaattgccacatgcgttaattgatcaattagctcttggaggacgtatggtattaccagtaggttcaggaatagcagatcaaatgttaatacaggttgacaaaacacatgatgggagcattacacaaaagcctcttacaggtgtagcttttgttccactaactagtagagataatcaatattatatttcatgaaatagatgtgtgctccaataagtgagtaatttttttctgaattaaatttaaaatagtaatttaaaatttatagttttagttatatttattctaatatatgcacaaaatgacaaattatattaaataaaatttaaattatatttattatgtgtataaataaaattcaaattgtatatg

SEQ ID NO: 143196 - protein, 229 aa, Apis mellifera
MAWFARFNGRTNQDLVEYLRTSRIIKTERVYEAMSAVDRGHYVRSGYAYFDAPQQIGYGATISAPHMHAYALEILEEKLFNGARALDVGSGSGYLTACMALMTGSNGLVVGIEHIPELNLFAIENIKKDNPELVEYGRVQFVDGDGRLGYPQLAPYDAIHVGAAAKELPHALIDQLALGGRMVLPVGSGIADQMLIQVDKTHDGSITQKPLTGVAFVPLTSRDNQYYIS

SEQ ID NO: 143197 - DNA, 729 bp, Aspergillus nidulans FGSC A4
  CDS (1)..(729)
atggcgtggtactgttccggatcaacaaactcagaactgattgagaacctatgcagagaaggactgataaagaacgagagagttaaacaagcaatgatggcagtcgaccgcggtcattatgcacctgctagaccgtactcagactcgccgcagccgatcggccatggagcgacaatttccgctccccatatgcatggacatgcgtgcgagtatcttatcaactaccttcgacctggcgcccatgtcctagacattggctctggctctggttatctaacccatgtatttgccaaccttgtcgtggatacgtcatcgagcgatggcccaaaaggacaagtcatcggcgtcgaccacatacaagaactcgtaaacctggcacacgacaatatgatgaagtcagaggatggaagaaaactgctagaaaatggaggcgtgaagtttgtcaaggccgatggccgccgtggatggctagatggcgcgccatatgatgcgatccacgttggcgcagcagcacaagagctacaccctctgctaatcgagcagctgcgagcgcccggacgtatgttcatacccgtcaatgccgaggacgaccaagggaccctgttcagtaccgcattcggcggtgggcagtatatatgggtagtggacaagaagaaagatggcactatacacaaagagaaagtgtttcaagttagctacgtccctctcactgacccaccaaagcattga

SEQ ID NO: 143198 - protein, 242 aa, Aspergillus nidulans FGSC A4
MAWYCSGSTNSELIENLCREGLIKNERVKQAMMAVDRGHYAPARPYSDSPQPIGHGATISAPHMHGHACEYLINYLRPGAHVLDIGSGSGYLTHVFANLVVDTSSSDGPKGQVIGVDHIQELVNLAHDNMMKSEDGRKLLENGGVKFVKADGRRGWLDGAPYDAIHVGAAAQELHPLLIEQLRAPGRMFIPVNAEDDQGTLFSTAFGGGQYIWVVDKKKDGTIHKEKVFQVSYVPLTDPPKH

SEQ ID NO: 143199 - DNA, 1500 bp, Ustilago maydis 521
  CDS (1)..(1500)
atgaagaaggaggaggaatcggcaaagaagaagaagccaaaaacgtcgccagcacagctacgcgtgcagaaaggtaggtcacagcagcaaagagcctctacagagacgactttatcaaatactcaccgtcgcgaacgacgatcatcttcgacttgcgctcgcttgcttccagatctgaccgaactcgaattgccaaagacgatgaagaccgacttccctgacccagcagatgtgctcaacttttctctcacaatcgagccagatgagggcatgtacaagagcggatcgttcaaattcactttcgccatcaacagcaattatccacacgatcctcctaaggtcaagtgcacacaaaagatctatcaccctaacgtcgacctggatggcaacgtgtgtctcaatatccttcgtgaggactggaaacctgtccttaatctcaactcggtcatggttggtctgcagtacttgttcctcgagccgaatgccgatgatccactcaacaaagaggccgcagaagaccttcgcaaggatcgatctgttttcgcgagcaatgtacgaagaagtcttgccggcggagctatcaattggaccctgcatgctgagcagacatgccgcgaactaagtgacttggtgctttcgcacgtccccacgtctcgtcttgataagctgaggcaatcactgtcgcactgcgcttgtctcgaaaggacagcctgtcgagctgtgacgattgtgatccagctcgcaccgcatttcgcacacaaacgcacgctgcgctatcagcctgggacattggccttgctcgtaaacaggatggcctggcgctgttcaggcggcacgaatgccgagctgattgccaacatgcgcaatgcatcgctcatcacctcatctcgcgtctacgaagctatgctcaaagtgaaccgagccaactatgtgccttcccaactaagcgcgtaccaagactctccgcaaacgatcggctttggcgccaccatatctgccccacacatgcatgcacatgcagccgaagccctgctgcctttcctccactcccaagcaaacgtcctcgacgtcggctctggatctggctacatgctggccatcttccaccacctcgtcgacaacgggaaagtgatcggcatcgaccatattccgggactcgtggatcaggccaatgcgaatctagagcacgatggtctcggtgcagaactcaagaatggaaagattgtgaatgtttgcgcggatggcagaaacggcgtcgaggcacaagcaccgttcgatgcgatccatgtcggagctgctgcccctggcatcccacagtcgttgctgcatcagttgaaagctcccggaaggatgtttatcccagtagcagagcaggacggatcgggcgaacagaacatctatcaagtcgacaagtccgagacaggcgagatcacaaagaccaaaatctgtggcgtgctctatgtgccccttacggatgctgccaagcagtggagagcgtaa

SEQ ID NO: 143200 - protein, 499 aa, Ustilago maydis 521
MKKEEESAKKKKPKTSPAQLRVQKGRSQQQRASTETTLSNTHRRERRSSSTCARLLPDLTELELPKTMKTDFPDPADVLNFSLTIEPDEGMYKSGSFKFTFAINSNYPHDPPKVKCTQKIYHPNVDLDGNVCLNILREDWKPVLNLNSVMVGLQYLFLEPNADDPLNKEAAEDLRKDRSVFASNVRRSLAGGAINWTLHAEQTCRELSDLVLSHVPTSRLDKLRQSLSHCACLERTACRAVTIVIQLAPHFAHKRTLRYQPGTLALLVNRMAWRCSGGTNAELIANMRNASLITSSRVYEAMLKVNRANYVPSQLSAYQDSPQTIGFGATISAPHMHAHAAEALLPFLHSQANVLDVGSGSGYMLAIFHHLVDNGKVIGIDHIPGLVDQANANLEHDGLGAELKNGKIVNVCADGRNGVEAQAPFDAIHVGAAAPGIPQSLLHQLKAPGRMFIPVAEQDGSGEQNIYQVDKSETGEITKTKICGVLYVPLTDAAKQWRA

SEQ ID NO: 143201 - DNA, 711 bp, Cryptococcus neoformans var. neoformans B-3501A
  CDS (1)..(711)
atggcatggttatcaagtgggcgcaccaatgttgaacttattgagaacatgaaaagctctggcttaattcactcttctcgggtggcagctgctatgatgaaggtggatagaaaacactatgtaccacttcgtacatttgcctatgaggattcccctcagaaaatcggatttggagcaactatatccgctcctcacatgcatgctcatgcatgtgaaaacctccttgagctcctgcctcagacccagaatggtggggaagagcctcctcggatcttggatgtgggaagcggatctggttacttgacggccgtctttcactatctatcacccaagtctctagttgttggcatagatcatattcaaggtctggtatctcaatcgatacgcaaccttgccgatgatggagtcaaagtcctcgacaagcataatgttgaaggcgggggggttctgatgctttgcggtgatgggcgaaaaggatcaaaagaatatgctcccttcacggtcattcacgttggagcagctgctccagaatttcctgacgagttggtagaccaactagccaagcctgggaggatgtttattcctgttggaaaaggatcacaagatgtgtggcaagtcgacaagtcagctaacggtgacgtgaccaagaagaaactgtttggagtcatgtatgttccccttacggatgctgacaagcaatggcaagaatga

SEQ ID NO: 143202 - protein, 236 aa, Cryptococcus neoformans var. neoformans B-3501A
MAWLSSGRTNVELIENMKSSGLIHSSRVAAAMMKVDRKHYVPLRTFAYEDSPQKIGFGATISAPHMHAHACENLLELLPQTQNGGEEPPRILDVGSGSGYLTAVFHYLSPKSLVVGIDHIQGLVSQSIRNLADDGVKVLDKHNVEGGGVLMLCGDGRKGSKEYAPFTVIHVGAAAPEFPDELVDQLAKPGRMFIPVGKGSQDVWQVDKSANGDVTKKKLFGVMYVPLTDADKQWQE

SEQ ID NO: 143203 - DNA, 687 bp, Strongylocentrotus purpuratus
  CDS (1)..(687)
atggcgtggagatcaagcggagaatctcacgaagagctcattacgagactaaaagaaaatggaatcatcaagaatgatttagtcttgaaagcaatgcgaggtgttgatcgcaaacattacagcagtaatagtccatatgctgactctccacagagtattggatatgctgtaactataagcgcacctcatatgcatgcacatgcccttgaacttctcaaagatcatcttagtgaaggcaaagcagcactggatgttggatcaggaagtggctatttgacatcctgtatggcaatcatggtaggatccagcgggaaggtagtaggaatagaccacatcaaagaactggtagataaatctaggaagaatatagagaaagataatcctgatttactgacatcgggcagaatacagctaatagttggcgatggtaggcaaggatatccagctggtgccccatatgatgctatccatgttggtgctgcagctccaacattaccacaggcactcatcgagcagctgaagcctggtggtcgtctcatcatccccgtaggaccacagggtgcggctcagaatctagagcagtacgacaagacaccagaaggacaggtcactaagaagaccctcatgggcgtggtctatgtaccccttaccggtaaagaacagcagtggcctggcaagatgaagtaa

SEQ ID NO: 143204 - protein, 228 aa, Strongylocentrotus purpuratus
MAWRSSGESHEELITRLKENGIIKNDLVLKAMRGVDRKHYSSNSPYADSPQSIGYAVTISAPHMHAHALELLKDHLSEGKAALDVGSGSGYLTSCMAIMVGSSGKVVGIDHIKELVDKSRKNIEKDNPDLLTSGRIQLIVGDGRQGYPAGAPYDAIHVGAAAPTLPQALIEQLKPGGRLIIPVGPQGAAQNLEQYDKTPEGQVTKKTLMGVVYVPLTGKEQQWPGKMK

SEQ ID NO: 143205 - DNA, 684 bp, Tribolium castaneum
  CDS (1)..(684)
atggcgtggaggtcccacggtaaaaccaacgccgaactaattcgaaatctgagagcgaacggaattataaggagcgatgccgtcgaaagtgcgatgctgtcagtggacaggggcaactattccagaaacaacccctacatggacgctccgcaaggcataggttacggggtcaccatcagtgccccccatatgcacgcccatgctttggagctcctcaaagacaaacttttaaatggtaatagggctctggatgtgggttctgggagtggctaccttaccgcatgcatggccatcatgttgggggagaaaggaattgccgtcggaattgaccacatgccagaactggtcgaaatgtccatcaaaaatattgaaagagaccaaccagaattattacagtctggccaactgaggcttctgttaggtgatgggcggcaagggtaccccgatttggggccctatgacgctatacacgtgggggcagctgccccaactttgccccaaccccttgttgatcaactgaaggttgggggcaggctaataatccccgtgggccccgctgggggcgatcaacagttagagcaaattgataaattaccagatggttccattcaacgtaaatctcttatgggtgttgtctatgtacctcttactgataaatccaaccagtggcctcgttcgtattga

SEQ ID NO: 143206 - protein, 227 aa, Tribolium castaneum
MAWRSHGKTNAELIRNLRANGIIRSDAVESAMLSVDRGNYSRNNPYMDAPQGIGYGVTISAPHMHAHALELLKDKLLNGNRALDVGSGSGYLTACMAIMLGEKGIAVGIDHMPELVEMSIKNIERDQPELLQSGQLRLLLGDGRQGYPDLGPYDAIHVGAAAPTLPQPLVDQLKVGGRLIIPVGPAGGDQQLEQIDKLPDGSIQRKSLMGVVYVPLTDKSNQWPRSY

SEQ ID NO: 143207 - DNA, 867 bp, Herminiimonas arsenicoxydans
  CDS (1)..(867): transl_table=11
atgacggacaaggccaagcgttttccactgtcgctttcctccctttcggaaaaagcaccacgcaacggtgcgcgcagcgatcctcagcatgttgcgggaaagactgctacgccgcagacggcgacgctgaatgcctcccggcacggcaaagcaccggtagtaccacggcagcaggacgtaccgcacaagatcgccgcgccgactgcgccgcgtagcgcatcgctggtgtcggatgcgatccgcaaggccatgacggcgcgcgtggccaaacagggggtgacagacagcaaggtgctggcggcgatggaagcggtgccgcgtcatttgttcatggagccggcgttggccagccaggcgtatatcgatgcttcgttgccaattggctatcaccagacaatctcgcagccgtatatcgtggcaagaatgattgaagtcatgcggaacaatagcaatgccggcgtactcaattgtgttctggaaattggcacgggctgcggttatcaggcggcggtgctgtcgctagtggccaaggaagtctattccatcgaacgcatcaagggtttgcacgaactggcgaaatccaacttgcggcccatgcgcgtggcaaatatccgcttgcattacggagatggtatgcttggcctgcctcaggcagcgccgtttgacggcattattttggccgccgccggactggaagtgccgcaggccttgctggaacaactgacaataggcggccgactggttgccccggttggcgaccgtcatcaggttctgcaactgatagagcgcgtcagcaaatttgaatggaaaagttcgacgctggaggattgccattttgtgccgctccgtccgggtaccgtaacttga

SEQ ID NO: 143208 - protein, 288 aa, Herminiimonas arsenicoxydans
MTDKAKRFPLSLSSLSEKAPRNGARSDPQHVAGKTATPQTATLNASRHGKAPVVPRQQDVPHKIAAPTAPRSASLVSDAIRKAMTARVAKQGVTDSKVLAAMEAVPRHLFMEPALASQAYIDASLPIGYHQTISQPYIVARMIEVMRNNSNAGVLNCVLEIGTGCGYQAAVLSLVAKEVYSIERIKGLHELAKSNLRPMRVANIRLHYGDGMLGLPQAAPFDGIILAAAGLEVPQALLEQLTIGGRLVAPVGDRHQVLQLIERVSKFEWKSSTLEDCHFVPLRPGTVT

SEQ ID NO: 143209 - DNA, 930 bp, Burkholderia vietnamiensis G4
  CDS (1)..(930): transl_table=11
atgagcggcgagcgcgcgaagcggtttccgctcgcgctcgaagatctcaagcgagcgccacgcaaatccgacggtcgggccggcgaacgccatgcggcaatcgcggcgccgaaggccgccgacaagccggccgccgtgccgaagccggtcgcgctgaagcccggcgtcgcgcgcatgccgcccggcacggccgccgcgaagccggccaccgcgctgaagccgaccgtgccgaagcccgcgatgcccaagccgatcgccgcgaacgccgcaccggccggcgcgttcgcgctcacgtcggaacgcgtgcgcgagcgcatggtcgaacgcctgcgcgcgaacggcgtgaccgatccgcgcgtgctggacgcgatggcggcggtgccgcgccatctgttcgtggacgcgggcctcgcgacgcaggcctacgaagattccgcgttgccgatcggccatcagcaaaccatttccaagccgtcggtggtcgcgcgcatgatcgagctcgcgatggccggccgcacgctcgagcgcgtcctcgagatcggcaccggttgcggctatcaggccgccgtgctgagccacgtggcgcgcgacgtgtattcgattgaacgcatcaagccgctctacgagcgcgccaagctgaacctgcggccgctgcgcgtgccgaacatccgtctgcactacggcgacgggcgggtcgggctgccatccgcggcgccgttcgacgcgatcgtgatcgcggcggccgggctcgacgtgccgcaggcgctgctcgagcagctcgcgatcggcggccggctcgtcgcgccggtcggcgcgcagagcgggcagccccaggtgctcacgctgatcgagcgcgtcgcgcacgcgcagtggcgggagtcgcggcttgatcgcgttttctttgtccctttaaaatccggagtgatttga

SEQ ID NO: 143210 - protein, 309 aa, Burkholderia vietnamiensis G4
MSGERAKRFPLALEDLKRAPRKSDGRAGERHAAIAAPKAADKPAAVPKPVALKPGVARMPPGTAAAKPATALKPTVPKPAMPKPIAANAAPAGAFALTSERVRERMVERLRANGVTDPRVLDAMAAVPRHLFVDAGLATQAYEDSALPIGHQQTISKPSVVARMIELAMAGRTLERVLEIGTGCGYQAAVLSHVARDVYSIERIKPLYERAKLNLRPLRVPNIRLHYGDGRVGLPSAAPFDAIVIAAAGLDVPQALLEQLAIGGRLVAPVGAQSGQPQVLTLIERVAHAQWRESRLDRVFFVPLKSGVI

SEQ ID NO: 143211 - DNA, 648 bp, Bradyrhizobium sp. ORS278
  CDS (1)..(648): transl_table=11
atgcccccgaccgctccgcccgaaaagatgatgtttcagctgatcttgcgtcggcggggtatcagcgatcaggcggtgctgcgcgccatggaggaggtcccccgggaagagttcgtgctgccggccgaccgcgccgacgcctatcgtgacagtgcaatggcgatcgcctgcggccagaccatcagccaacccttcgtggtcgcctacatgactgagcagctcaagctgcagaagagccatcgcgtgctcgaaatcgggaccggctcaggctaccaggccgcggtcctggctcggctgaccgaccatgtgctgacagtcgagcgtttccggacgcttgccgatcgggcgagagagcgactggagaagctgaactgcttcaacgtcgaggtgatgctcggcgacggctacgcgttaccggccggggccggccaattcgaccgcatcattgtgaccgcggccatggaagacatcccgcagagcctgctcgaccggctggagccggacggtatcctgatcgcgcctgtcggacctcaccacggtgtccagcggctcgtgcgggtgacccggacgggcgatcgcttcgaccgcaaggagctcgtcgacgtgcgatttgtgcccgcaattccggggattgcgcgcgaactttga

SEQ ID NO: 143212 - protein, 215 aa, Bradyrhizobium sp. ORS278
MPPTAPPEKMMFQLILRRRGISDQAVLRAMEEVPREEFVLPADRADAYRDSAMAIACGQTISQPFVVAYMTEQLKLQKSHRVLEIGTGSGYQAAVLARLTDHVLTVERFRTLADRARERLEKLNCFNVEVMLGDGYALPAGAGQFDRIIVTAAMEDIPQSLLDRLEPDGILIAPVGPHHGVQRLVRVTRTGDRFDRKELVDVRFVPAIPGIAREL

SEQ ID NO: 143213 - DNA, 666 bp, Leptospira interrogans serovar Copenhageni str. Fiocruz L1-130
  CDS (1)..(666): transl_table=11
atgttttcttcgtctaaagtctgtaatccgattcttcgtgaacaagaaagaaaaaatatggtcgatcttcaaatcgcctctcgaggaattagagataaaaaaattctctctgcaatgctttcgattccaagagaatgttttgttccgaattcccatattttgcaagcatacgaagataaaccacttccaatcggttgtaatcaaaccatctctcagccgtttatggtagcatggatgtctttacttcttgaagttcgaaaaggagaccgtatctttgaaattggaaccggctcgggttatcaaagcgccgttttaatttttttagaagccacgttatactccgttgaattctttgactctctttctaaaaccgctactcaaaatttagaatgttggaatccaggctgtactcaaacgaatcgttttatgatcggaagtgcgactgaaattctaaaaccggaacttcaatttgataagatgatttcttgcgctgcacttccgaatcttccagatacaaaaagctcctactttcaatctcttataccgggaggaatttttatcttcccaatgggaaaacgagatcaatatttgatcttcgcaaaaagaaatctcaacgactggtcctttgaatccaaaggtggggttcgatttgttcctttactttaa

SEQ ID NO: 143214 - protein, 221 aa, Leptospira interrogans serovar Copenhageni str. Fiocruz L1-130
MFSSSKVCNPILREQERKNMVDLQIASRGIRDKKILSAMLSIPRECFVPNSHILQAYEDKPLPIGCNQTISQPFMVAWMSLLLEVRKGDRIFEIGTGSGYQSAVLIFLEATLYSVEFFDSLSKTATQNLECWNPGCTQTNRFMIGSATEILKPELQFDKMISCAALPNLPDTKSSYFQSLIPGGIFIFPMGKRDQYLIFAKRNLNDWSFESKGGVRFVPLL

SEQ ID NO: 143215 - DNA, 660 bp, Bartonella quintana str. Toulouse
  CDS (1)..(660): transl_table=11
atgaatcaaaagggtattttacgatttcatgaggagttggccggtcttgtgctgaaaatgcgcagcaaaggaattgatgatgttcgcttttttgcagcattggagaaagttccgcggcagcagtttgtggcttctccttggtgtaacagcgcatatgataataaagttatcccaattgagtgtggtgaatatattgagcgtttggaagagcagcttttgatcctttttgctttatcgttgaaaaagaaacatcgcatcttagaaattggtacgggttctggtttttgtactgcccttatggcatgtcttagtgaacgtgtaataacaattgatcgctataaaacacttattgatttggcgcgtcaaaaatttcaaactttgggaattgagaatattgttttacgacaggttgatggaagccgtactgttacaggttttggatcgtttgatcgtattcttatttggccatcacgctctgatgaaccaaaggaatttttagaacttttaactgaaaatggcattctcattcaagccataggacccgatgaaggggtacaaacgattacgcgttatacaaaaattggtagccgatttgagtgcttagaaatgtttcaagtgcgctatcaaccctttattgaaggtattgcggaaacactttga

SEQ ID NO: 143216 - protein, 219 aa, Bartonella quintana str. Toulouse
MNQKGILRFHEELAGLVLKMRSKGIDDVRFFAALEKVPRQQFVASPWCNSAYDNKVIPIECGEYIERLEEQLLILFALSLKKKHRILEIGTGSGFCTALMACLSERVITIDRYKTLIDLARQKFQTLGIENIVLRQVDGSRTVTGFGSFDRILIWPSRSDEPKEFLELLTENGILIQAIGPDEGVQTITRYTKIGSRFECLEMFQVRYQPFIEGIAETL

SEQ ID NO: 143217 - DNA, 660 bp, Methylococcus capsulatus str. Bath
  CDS (1)..(660): transl_table=11
atgaacgtccgcctgcagggcatcggcatgacgtcgccgcgcacccgcgagcgcatggtcggccgcctacgggaactggggatccgccaccccagggtgctgaccgccatgcgcagcatcccccgccacatcttcgtcgaagaggctttcgccagccgggcgtacgaagacatggccctgccgatcggcttcggccagaccatctcgcggccttacacggtcgcccgcatgaccgaactcctgctcgaggacggccccttgcgccgcgtgctggaagtgggcaccggctccggctaccagaccgccgtcctggcccaactggtcggcaccgtctattcggtggagcgcgtccatgccctacaggagcgggccatccgcagcctggccgacctgaacctccggaacgtgcggctgaaacacggcgatggccatctgggctggcgcgaatccggcccgttcgacgggatcatcgtgaccgccgccccgccgcgcctgccggctgcgttgctggaccagctcaatcccggcggcgtgctcgtcgctccgatcggcgtgggccggcaacagacgctcgaacgcatcatgcgtaccgacgcgggctacgaagcccgctccgtggagccggtcgtgttcgttccgctgctggccggcacggtgtaa

SEQ ID NO: 143218 - protein, 219 aa, Methylococcus capsulatus str. Bath
MNVRLQGIGMTSPRTRERMVGRLRELGIRHPRVLTAMRSIPRHIFVEEAFASRAYEDMALPIGFGQTISRPYTVARMTELLLEDGPLRRVLEVGTGSGYQTAVLAQLVGTVYSVERVHALQERAIRSLADLNLRNVRLKHGDGHLGWRESGPFDGIIVTAAPPRLPAALLDQLNPGGVLVAPIGVGRQQTLERIMRTDAGYEARSVEPVVFVPLLAGTV

SEQ ID NO: 143219 - DNA, 657 bp, Azoarcus sp. EbN1
  CDS (1)..(657): transl_table=11
atgagcatgcgccccccggaccccgggcaggcctcgagccgggcccgtgcccgcatggtcgagcggctccgtgcacagggaatcgccgacgagaaggtcctcgcggcgatgatgcagattccgcgccacgcgtttgtcgatgaaggcctcgccttcagcgcgtacgacgacacggcgctgccgatcggataccagcagacgatttcgcaaccgctggtggtcgcgcgcatgatcgagatcctgcgcgcgggccgcgaactgggacggacgctcgaagtcggcgccggctgtggctaccaggccgcggtactgtccctcgtggcgaccgaagtgtttgccgtggagcgcattcgcccccttctcgaccgggcacgcgaaaacctgcggcccttgcggctgccgaacgttcgtctcaaatacgccgacggcaatctgggattgcccgaagccgctccttttgacaccattatcgtggctgctgcggcggccggcatcccgggctcgctgaaggagcaactggctccgggcgggcggctgatgatcccgctcgggagcgccgaccagcgtctcgtgatgaccgagcggcacggcaatattttcagggaaagccggttcgaagccgtgcgcttcgtccccttgctcactggtacggaatga

SEQ ID NO: 143220 - protein, 218 aa, Azoarcus sp. EbN1
MSMRPPDPGQASSRARARMVERLRAQGIADEKVLAAMMQIPRHAFVDEGLAFSAYDDTALPIGYQQTISQPLVVARMIEILRAGRELGRTLEVGAGCGYQAAVLSLVATEVFAVERIRPLLDRARENLRPLRLPNVRLKYADGNLGLPEAAPFDTIIVAAAAAGIPGSLKEQLAPGGRLMIPLGSADQRLVMTERHGNIFRESRFEAVRFVPLLTGTE

SEQ ID NO: 143221 - DNA, 648 bp, Silicibacter pomeroyi DSS-3
  CDS (1)..(648): transl_table=11
atgagcggacccgatcccgaaaccaagatgcagttcctgtttgctctccgatccaagggggtgaccgacaagcgggtgctggcggcgatggaagaggtggatcgcggcctgttcgtgcggggcctgttttccgggcgcgcctatgaggatatgccccttcccatcgcctgtggtcagaccatcagccagccctcggttgtcggtttgatgacccaggcgctggaggtcaatccgcgtgacaaggtgctcgaggtcggtaccggctcgggctaccaggcggcgatcctggcaaagctggcgcggcgggtctatacggtcgaccgccacgcccggctggtgcgcgcggcgcagctggtgttccagcagttgcagctggtcaatatcaccaccatgaccgccgacggatcctttggtctgcccgatcaggcgccctttgaccgcatcatcgtcaccgccgccgccgaggatgcgcccggcccgctcttggcgcagctcaagatcgggggtatcatggttttgcccgtggggcagtcggacacggttcagaccctgatccgggtgcgccgcaccgaacagggctttgactatgatgaattgcgcccggtccggttcgtgccattgctcgaagggttgggcaaggatgggtga

SEQ ID NO: 143222 - protein, 215 aa, Silicibacter pomeroyi DSS-3
MSGPDPETKMQFLFALRSKGVTDKRVLAAMEEVDRGLFVRGLFSGRAYEDMPLPIACGQTISQPSVVGLMTQALEVNPRDKVLEVGTGSGYQAAILAKLARRVYTVDRHARLVRAAQLVFQQLQLVNITTMTADGSFGLPDQAPFDRIIVTAAAEDAPGPLLAQLKIGGIMVLPVGQSDTVQTLIRVRRTEQGFDYDELRPVRFVPLLEGLGKDG

SEQ ID NO: 143223 - DNA, 678 bp, Pseudomonas syringae pv. syringae B728a
  CDS (1)..(678): transl_table=11
atgtcacgcgagcaggatgatttattgcgtcgagggatcggaatgacgtcgcagcgtacccgcgagcgtctgattcaacgcctctgtgaagagggcatttccaatcagcgggtactggacgtcattcgcaagacgccccggcatctgtttgtcgatgaagcgctggcgcatcgcgcctacgaagacaccgcattgcccatcggccacaaccagacgatatcccagccctacatggtcgcgcggatgagcgagctgctgctggcagcagggccgctggacaaggtcatggagatcggtacagggtccggctatcagaccgctgtgctcgcccagctggtagagcgagtgttttcggtcgagcgcatcaaggggctgcaggatcgcgccaaggagcgtctggtcgagctcaatctgcgcaacgtggtttttcgctggggtgacggctgggagggctggccagccctggcgccgtataacggcatcatcgtcacggcggtggcaaccgatgtaccgcaggcattgctcgatcaactggcaccgggaggccgtctggtcatccctgttggctctggggaggttcagcagttgatgctgatcattcgtgaagaaaacggtttttcccggcatgtgctgggggctgtgcgcttcgtacccttgctcaacgggcccatcgcttga

SEQ ID NO: 143224 - protein, 225 aa, Pseudomonas syringae pv. syringae B728a
MSREQDDLLRRGIGMTSQRTRERLIQRLCEEGISNQRVLDVIRKTPRHLFVDEALAHRAYEDTALPIGHNQTISQPYMVARMSELLLAAGPLDKVMEIGTGSGYQTAVLAQLVERVFSVERIKGLQDRAKERLVELNLRNVVFRWGDGWEGWPALAPYNGIIVTAVATDVPQALLDQLAPGGRLVIPVGSGEVQQLMLIIREENGFSRHVLGAVRFVPLLNGPIA

SEQ ID NO: 143225 - DNA, 678 bp, Pseudomonas fluorescens Pf-5
  CDS (1)..(678): transl_table=11
atggctcgcgagcaagacgatctgctgcggcggggaatcggcatgacttcccagcgtacccgcgaacgcctgatccagcgcctgtatgacgaggggttgtccaaccctcaggtactggaagtgattcggcgcacaccgcggcatctgtttgtcgatgaggccctggcccatcgtgcctatgaagacacggcgctgccgatcggccacaaccagaccatctcccagccttatatggtggcccgcatgagtgagctgctgctggcggccgggccgctggacaaggtactggagatcggtaccggctcgggctaccagacggcggtgttgtcgcagctggtggagcgggtgttttcggtggagcggatcaaggtcctgcaagaccgggccaaggagcgcctgcaggaattgaacctgcgcaacgtcgtgtttcgctggggcgacggctgggaaggctggccggcgctggcgccctataacggcatcatcgtcactgccgtcgccaccgatatcccgcaggccctgctcgatcaactcgcgcctggcgggcgcctggtgattccggtgggggcaggggaggtgcagcagttgatgctgatcatccgtgaagaacagggctttgcccggcacgtcctgggggcggtgcgttttgtgccgttgctcaatggtcccctggcctga

SEQ ID NO: 143226 - protein, 225 aa, Pseudomonas fluorescens Pf-5
MAREQDDLLRRGIGMTSQRTRERLIQRLYDEGLSNPQVLEVIRRTPRHLFVDEALAHRAYEDTALPIGHNQTISQPYMVARMSELLLAAGPLDKVLEIGTGSGYQTAVLSQLVERVFSVERIKVLQDRAKERLQELNLRNVVFRWGDGWEGWPALAPYNGIIVTAVATDIPQALLDQLAPGGRLVIPVGAGEVQQLMLIIREEQGFARHVLGAVRFVPLLNGPLA

SEQ ID NO: 143227 - DNA, 651 bp, Colwellia psychrerythraea 34H
  CDS (1)..(651): transl_table=11
atgtctagtcgcataggcggaaaatcaaagcgcagtggagagttattggcgcaaaaattacagagtgaaggtattagtaatcctgctgttctaaaggctatagctcattctcctaggcatatatttgtgcctgaaattttggcacataaagcttatgacaatactgccttgcccattgggcaagggcagactatttcacagccttacattgtggctaagatgtctgagttactattagcagatggccggccgcaaaatatattagaaataggtactggttctggttatcaaaccgctattttagctcagctaacagataaggtcttttcggttgagcgaatcaaagcgttacagtggcaagcaaaacgctgtttacgcgcaatggatttacacaatgtagcaatgaagcatggtgatggttggcagggctggcgaagcaaaggcccctttgacgccatcatagttactgcggcaccttcgagtgtaccacccgccttattagatcagttagctgatggtgggcgtttagttatccccgttggagagcaaactcaaattttaaaaattatcacccgagaaggtgatgtttataacgagcagcaagttgaagctgtgcgttttgtacctttagtacccggagatttattgtag

SEQ ID NO: 143228 - protein, 216 aa, Colwellia psychrerythraea 34H
MSSRIGGKSKRSGELLAQKLQSEGISNPAVLKAIAHSPRHIFVPEILAHKAYDNTALPIGQGQTISQPYIVAKMSELLLADGRPQNILEIGTGSGYQTAILAQLTDKVFSVERIKALQWQAKRCLRAMDLHNVAMKHGDGWQGWRSKGPFDAIIVTAAPSSVPPALLDQLADGGRLVIPVGEQTQILKIITREGDVYNEQQVEAVRFVPLVPGDLL

SEQ ID NO: 143229 - DNA, 678 bp, Pseudomonas syringae pv. phaseolicola 1448A
  CDS (1)..(678): transl_table=11
atgtcgcgcgagcaggatgatctattgcatcgcgggatcgggatgacctcgcagcgcacccgtgaacgtctgatccagcgcctctgcgaagagggtatttccaaccagcgggtgctggacgtcattcgcaagacgccccggcatctgtttgtcgatgaagcgctggcgcatcgcgcttatgaagacacagcgctgcccatcggccacaatcagacgatttcccagccttacatggtcgcgcggatgagcgagctgctattggcagcaggtccgctggacaaggtcatggagatcggtacagggtcgggctaccaaaccgcggtgctggcgcagctggtggagcgtgtattttcggtcgagcgtatcaaagtccttcaggaccgcgccaaagagcgtctggtcgagctcaatctgcgtaatgtggttttccgctggggcgacggctgggaaggctggcctgctctggcaccttataacggcatcatcgtcacggcagtggcaaccgacgtaccgcaggcgctgcttgatcaactggcacctggaggtcggctggtcataccggtgggttcgggagaggttcagcaattgatgctgatcatccgtgaagaaaacggtttttcccggcacgtactgggggctgtgcgcttcgtgccactgctcaacgggccaatcgcgtga

SEQ ID NO: 143230 - protein, 225 aa, Pseudomonas syringae pv. phaseolicola 1448A
MSREQDDLLHRGIGMTSQRTRERLIQRLCEEGISNQRVLDVIRKTPRHLFVDEALAHRAYEDTALPIGHNQTISQPYMVARMSELLLAAGPLDKVMEIGTGSGYQTAVLAQLVERVFSVERIKVLQDRAKERLVELNLRNVVFRWGDGWEGWPALAPYNGIIVTAVATDVPQALLDQLAPGGRLVIPVGSGEVQQLMLIIREENGFSRHVLGAVRFVPLLNGPIA

SEQ ID NO: 143231 - DNA, 651 bp, Dechloromonas aromatica RCB
  CDS (1)..(651): transl_table=11
gtgttgcacggtattggcatgacttcgcagcggacgcgggcgcgcatgattgagcgcctgcgcgagaaggggattcgcaacgaggcggttctcaaggcaatggcggctgttcctcggcatgtcttcgttgaagaggctttggcttcgcgggcttatgaagacactgcgctaccgcttggcatggggcagactatttcccagccttttgtcgtggctcggatgatcgaactcttgctcaacgggcgaagttctttgggtaaaaccctggaggtcggtgcaggttgtggttatcaagctgccgttctggcgcaattgaccaaggatgtctatgccgttgagcggcttggtccattgctggaaaaggccaaagccaacatgcggatcttgcagcagttcaatgttcgccttaaacatgccgatggacaacttggcttgcccgaagccgggccatttgacagtatcatagtcgctgctgccggttcccacgttcctcctgcactgctcgaacagcttgcgccaggtgggcgtttggtcttgccagttggggctggtgaacagtatcttagctttatcgaacatacgcctcagggatatgtcgaaacgcggcttgatgccgtacgtttcgtcccgctactttcaggaacgcaatga

SEQ ID NO: 143232 - protein, 216 aa, Dechloromonas aromatica RCB
MLHGIGMTSQRTRARMIERLREKGIRNEAVLKAMAAVPRHVFVEEALASRAYEDTALPLGMGQTISQPFVVARMIELLLNGRSSLGKTLEVGAGCGYQAAVLAQLTKDVYAVERLGPLLEKAKANMRILQQFNVRLKHADGQLGLPEAGPFDSIIVAAAGSHVPPALLEQLAPGGRLVLPVGAGEQYLSFIEHTPQGYVETRLDAVRFVPLLSGTQ

SEQ ID NO: 143233 - DNA, 894 bp, Ralstonia eutropha JMP134
  CDS (1)..(894): transl_table=11
atgagtcccacaccccctcgcagcaagtttcccctgccgctggatgcggtagtccagcgcaagccagcaccggcgcgtaccgccggcatgcccgcggtcggtgcgccgggccctgcgcaggcgcaggccaaagcccgcgacaagcagccgtcggcgcccacggccgcggccagcgccgtagaggcgcgtgcctcggcggcgacggcgggcggggggggcatggcatcggaccgcgcgcgcggcgcgctggcggcgcggctgcgcgcctcgggtatccgcgacgaacgcgtgctggccgccattggcactgtgccgcgccatctgtttgtcgagcccgggctggcatcgcaggcgtatgaagatgcagcgctgcccatcggccatcagcagacgatctcgaagccttccgtggtggcgcgcatgatcgaactgctgcgcgagggcctttcggcggacacgccggtcgagcgcgtgctggagatcggcaccggctgcggttatcaggccgcggtgctgagcctggtggcgcgtgaagttttttccatcgagcgcatccggccgttgcacgagcaggccaaggcgaacctgcggccgctgcgtgtgccgaacctgcggctgcactatggcgacggcatgctaggcctgccgcaggctgcgccgttttcggccatcatccttgccgccgccggcatggaggtgccgcaggccctgctcgagcagcttgccatcggcggcaggctgatcgcgcccgtggcggtggttccgccagcgggcggatcgggccagacggtcacgcagcagttgctgctgatcgagcggctcaatcggcatcgttttcaccggaccgcgcttgaagccgttttctttgtgcccttaaaatcgggcaccatctga

SEQ ID NO: 143234 - protein, 297 aa, Ralstonia eutropha JMP134
MSPTPPRSKFPLPLDAVVQRKPAPARTAGMPAVGAPGPAQAQAKARDKQPSAPTAAASAVEARASAATAGGGGMASDRARGALAARLRASGIRDERVLAAIGTVPRHLFVEPGLASQAYEDAALPIGHQQTISKPSVVARMIELLREGLSADTPVERVLEIGTGCGYQAAVLSLVAREVFSIERIRPLHEQAKANLRPLRVPNLRLHYGDGMLGLPQAAPFSAIILAAAGMEVPQALLEQLAIGGRLIAPVAVVPPAGGSGQTVTQQLLLIERLNRHRFHRTALEAVFFVPLKSGTI

SEQ ID NO: 143235 - DNA, 681 bp, Thiobacillus denitrificans ATCC 25259
  CDS (1)..(681): transl_table=11
gtggctgaaaccctgaacccgcgcgccggcatcggcatgacctcggcgcggacccgcggccgcatggtcgagcgtctgcgcgagcagggcatcaaggacgaaatggtgctggcggcgatgggcatggtcccgcgtcacctctacgtcgaccaggcgctcgagtcgcgcgcctacgaggacacggccctgccgatcggcttcggccagaccatatccaatccctacatcgtcgcgcgcatggccgagctcgcccgccacggcgaaaacggcaaggggcagacgctcggccgcgtgctcgagatcggcctcggctgcggctaccaggccgcggtgctcggcaagcttgcgcgcgaggtggtgtcgatcgagcgcatcgctgcgctcgtcggcaagacgcgcgcccgcctgcgcgaactgcgcgtcaacaacgtcaagccgaagcacggcgacggcatgaacggcgcccgggatttcgcgcccttcgatgccatcgtgctcgcggcggccttcgccgaggtcccgcaggccttgcttgcgcagctggccgatggcggccgcctggtgatgccgctcggcaacgccacccagacgctgtgcctgatcgagcgtcaaggcgaagccttcgtcgaacagcgcctcgaaggggtgaaattcgtgccgctgctgccgggggtcgcgtga

SEQ ID NO: 143236 - protein, 226 aa, Thiobacillus denitrificans ATCC 25259
MAETLNPRAGIGMTSARTRGRMVERLREQGIKDEMVLAAMGMVPRHLYVDQALESRAYEDTALPIGFGQTISNPYIVARMAELARHGENGKGQTLGRVLEIGLGCGYQAAVLGKLAREVVSIERIAALVGKTRARLRELRVNNVKPKHGDGMNGARDFAPFDAIVLAAAFAEVPQALLAQLADGGRLVMPLGNATQTLCLIERQGEAFVEQRLEGVKFVPLLPGVA

SEQ ID NO: 143237 - DNA, 678 bp, Pseudomonas fluorescens PfO-1
  CDS (1)..(678): transl_table=11
atggctcgtgaacaagacgacaggctgcgcagcggcatcgggatgacgtcccagcgaacccgtgagcgcctgatccagcgtctgtacgaagagggcgtttccaacgccagcgtgctggaagtgatccgccgcaccccgcgacacctgttcgtcgatgaagcgctggcgcatcgtgcctatgaagacaccgcgctgccgatcggcaacaaccagaccatttcccagccttatatggtggcgcgcatgagcgagctgctgctggaagccgggccgctggataaggtgctggagatcggcaccggatccggttaccagacggcagtgttgtcgcagttggtcgagcgggtgttctcggtagagcgcatcaaggtgctgcaggatcgggccaaggaacgcctgatcgagctcaacctgcgcaacgtggtatttcgctggggcgatggttgggaagggtggccggcgctagcgccgtacaacggcatcatcgtcacggcggtcgccaccgatgtgcctcaggctttgcttgatcaactggcaccgggtgggcggatggtgatcccggtcggttcgggcgaagtgcagcaattgatgctgatcgtgcgcgaagaaaacggtttctcccgacacgttctgggggcggtgcgtttcgtgccattgctcaacggtccgctggcctga

SEQ ID NO: 143238 - protein, 225 aa, Pseudomonas fluorescens PfO-1
MAREQDDRLRSGIGMTSQRTRERLIQRLYEEGVSNASVLEVIRRTPRHLFVDEALAHRAYEDTALPIGNNQTISQPYMVARMSELLLEAGPLDKVLEIGTGSGYQTAVLSQLVERVFSVERIKVLQDRAKERLIELNLRNVVFRWGDGWEGWPALAPYNGIIVTAVATDVPQALLDQLAPGGRMVIPVGSGEVQQLMLIVREENGFSRHVLGAVRFVPLLNGPLA

SEQ ID NO: 143239 - DNA, 660 bp, Rhodobacter sphaeroides 2.4.1
  CDS (1)..(660): transl_table=11
atgacggcagaggcagacggggaggatccggccgaacgcaagatgcggttcctgttcgccgtccgctcgcggggcgtcacggatgcccgcgtgctcgccgccatggagcggatcgaccgcggcgccttcgtccgcggcatcttcgccgaccgtgcctatgaggacatgccgctgcccatcgcctgcggccagaccatcagccagccctcggtcgtggggctgatgagccaggcgctggcggtgaacccgcgcgacaaggtgctcgaggtgggaaccggctcgggctatcaggccgccgtcctgagccagctcgcccgccgcgtctacaccgtcgaccgtcatcgccgcctcgtgcgcgaggcgaccgaggtcttccaccgcctgtccctgaccaacatcaccgcgctcattgcggacggcagtttcggcctgccggaacaggccccgttcgaccggatcctcgtcactgccgcggccgaggacccgcccggccccctgttggcacaattgaagatcggcggtatcatggtcgtcccggtcggccagaccgatgcggtgcagaacctgatcaaggtgacccggctcgagcagggttacgattacgaggaacttcgtccggtgcgcttcgtgcctctggtcgaaggcatcgggtcggactga

SEQ ID NO: 143240 - protein, 219 aa, Rhodobacter sphaeroides 2.4.1
MTAEADGEDPAERKMRFLFAVRSRGVTDARVLAAMERIDRGAFVRGIFADRAYEDMPLPIACGQTISQPSVVGLMSQALAVNPRDKVLEVGTGSGYQAAVLSQLARRVYTVDRHRRLVREATEVFHRLSLTNITALIADGSFGLPEQAPFDRILVTAAAEDPPGPLLAQLKIGGIMVVPVGQTDAVQNLIKVTRLEQGYDYEELRPVRFVPLVEGIGSD

SEQ ID NO: 143241 - DNA, 651 bp, Geobacter metallireducens GS-15
  CDS (1)..(651): transl_table=11
atgaattttgacatcgcacgaaaacggatggttgaaacgcaaattatctctcgcggcgtgaaagaccggcgccttatagaggcgatgctaaaggtcccccgtcacgtttttgtcgaagaggcgatggcagcccaagcttacagcgacaccccgcttccaatcggggagaagcaaaccatctcgcagccttacatggttgctctcatgaccgaattgcttgagctttcgggccgggagaaggtgctagagatcggcactggctcagggtatcaagcggcaatacttgcaaccctcgcagatcgcgtttacaccgttgagcggatccggcccttggcactcaaggctcgtagggcacttgaccgtctcggcctcctgaatgtgaacataaaaatttctgatgggaccatcggttgggaggaagaagccccctttgacgccatcatcgttacggctggagcgccggatgtcccggataaactggctgaacagcttgctgttggtggaaggcttgttattcctgtagggaatcagttcgatcaggttcttgtcaggattaccaagcaggaagatggttctctcatcagagaaaatgtaacaggatgcagattcgttaaactggtgggcaaatacggatggggtactgaagagtaa

SEQ ID NO: 143242 - protein, 216 aa, Geobacter metallireducens GS-15
MNFDIARKRMVETQIISRGVKDRRLIEAMLKVPRHVFVEEAMAAQAYSDTPLPIGEKQTISQPYMVALMTELLELSGREKVLEIGTGSGYQAAILATLADRVYTVERIRPLALKARRALDRLGLLNVNIKISDGTIGWEEEAPFDAIIVTAGAPDVPDKLAEQLAVGGRLVIPVGNQFDQVLVRITKQEDGSLIRENVTGCRFVKLVGKYGWGTEE

SEQ ID NO: 143243 - DNA, 642 bp, Desulfovibrio desulfuricans G20
  CDS (1)..(642): transl_table=11
atgattgataaaaggcgcagcagagaacgtatggtgcgcgagcagctaacagcgaggggaataacagaccccgccgtgctggccgccatgcgcaagatacccagacatctttttgttcaggaggctctgcaggcgcaggcctatgaggaccatccgcttcccataggctatggtcagaccatctcgcagccgttcatcgtggcgctgatgtcacagattctgcgagtcactccgggaatgcgtgtgcttgaaatagggacagggtccggctatcaggcggccgtgctggctgaaatgggagccgaagtctataccgtggaaagaattgcgggactgcaggcccatgcacgcggcctgctgcgcaggctgggatacgccagaatacggacaaagctggatgacggcaccatgggctggccgctggcagccccttttgacagaatcatcgtcacggccggagggcccggcattcccgagccgctggcggaacagctggcagaccccggcaccatggccatacctgtgggcgcttcgcggcgcgaacaggagctttatttgatgcataagaacgacggcgcattgtcgtatgaaaattatggcaaggtggcctttgtggaccttgtcggcaaccacgggtggtag

SEQ ID NO: 143244 - protein, 213 aa, Desulfovibrio desulfuricans G20
MIDKRRSRERMVREQLTARGITDPAVLAAMRKIPRHLFVQEALQAQAYEDHPLPIGYGQTISQPFIVALMSQILRVTPGMRVLEIGTGSGYQAAVLAEMGAEVYTVERIAGLQAHARGLLRRLGYARIRTKLDDGTMGWPLAAPFDRIIVTAGGPGIPEPLAEQLADPGTMAIPVGASRREQELYLMHKNDGALSYENYGKVAFVDLVGNHGW

SEQ ID NO: 143245 - DNA, 660 bp, Rhodospirillum rubrum ATCC 11170
  CDS (1)..(660): transl_table=11
gtgagcgttccatcgcgcaagatccggctgatcatggagttgcgccagaacggcgtatcggccactcccgttctcgccgccatcgagcgggtgccacgcgacgccttcgtttcggcgcccttctccgatcaggcctatgagaacaccgccctgcccatcggctgcggccaaacgatcagccaaccgctggtggtcggcttgatgacccaggccctggatttgaacgaccgccacaaggtgctggaaatcggcaccggatcgggataccagaccgccgttctcgcccgcttgtgccggcgggtttatacgatcgaacgccatggcgcgctgctgcgcgaggccgaggcccggctgaccgccctgggcctgcatcgcaccgtggtcacccgcgagggcgatggcggacgcggctggcccgaacaagccccctttgaacgcatcctggtcaccgccgccgccctggatatccccaaggtgctggtcgcccagttggccatcggcggggtgatggttttgcccgtgggcaaggagagcggcgcccaggaggtggttcgcgtgcgccgcaccgccgaggacgccctggtgaccgaacgcctgttccccgtgcgcttcgttccgctggtcgatggcctgccgccgcgcgacgcgcccggggcatga

SEQ ID NO: 143246 - protein, 219 aa, Rhodospirillum rubrum ATCC 11170
MSVPSRKIRLIMELRQNGVSATPVLAAIERVPRDAFVSAPFSDQAYENTALPIGCGQTISQPLVVGLMTQALDLNDRHKVLEIGTGSGYQTAVLARLCRRVYTIERHGALLREAEARLTALGLHRTVVTREGDGGRGWPEQAPFERILVTAAALDIPKVLVAQLAIGGVMVLPVGKESGAQEVVRVRRTAEDALVTERLFPVRFVPLVDGLPPRDAPGA

SEQ ID NO: 143247 - DNA, 984 bp, Burkholderia thailandensis E264
  CDS (1)..(984): transl_table=11
atgagcggcgagcgcgcgaagcggtttccgctcgcgctcgaggatctgaagcgcgagccgcgcaagcccgaagggcgcgcggccgagcgtcaggccgcgggcgacgccgcccgtcagcgcctcatcgccgcggcggcggccgcgcccgccgccgcctccccgatcgcgcccgaacgcctcgcgccgcgcgcggccggcgcgtcggggagcggcgtgcccgttgcgaaaccggcgcgtgcgaaaccgcccacgacgcccggcgtcgcaaagagcgcgccgtcctccggcgtgaagaacggcgacaagagcgcgacgccgaacgtcgcgttgagcggcgcgctcgcgctgacttcggaacgggtgcgcgagcgcatggtcgaacggcttcgggcaaacggcgtggccgatccgcgcgtgctcgccgcgatgtcggccgtgccgcgccacatgttcgtggatccggggcttgcggcccaggcgtacgaggacgccgcgctgccgatcggccatcagcagacgatctcgaagccgtcggtcgtcgcgcggatgatcgagctcgcggcggcgggccgcacgctcgagcgcgtgctcgaaatcggcacgggctgcggctatcaggccgcggtgctgagtcgcgtcgcgcgcgacgtgtattcgatcgaacgcgtgaagccgctctacgagcgcgcgaaactgaatttgcggccgctgcgcgtgccgaacatccgcctgcactacggcgacggacgcgtgggcctgcccgccgcggcgccgttcgacgcgatcgtgatcgccgcggcggggctcgacgtgccgcgggcgctgttggaacaattggcgatcggcggcaggctcgtcgcgcctgtcggagaacaggcgggcgagcaggtgctcacgctcgtggagcgcgtcgcacccgcgcagtggcgtgagtcgcggcttgatcgcgttttctttgtccctttaaaatccggagtgatttga

SEQ ID NO: 143248 - protein, 327 aa, Burkholderia thailandensis E264
MSGERAKRFPLALEDLKREPRKPEGRAAERQAAGDAARQRLIAAAAAAPAAASPIAPERLAPRAAGASGSGVPVAKPARAKPPTTPGVAKSAPSSGVKNGDKSATPNVALSGALALTSERVRERMVERLRANGVADPRVLAAMSAVPRHMFVDPGLAAQAYEDAALPIGHQQTISKPSVVARMIELAAAGRTLERVLEIGTGCGYQAAVLSRVARDVYSIERVKPLYERAKLNLRPLRVPNIRLHYGDGRVGLPAAAPFDAIVIAAAGLDVPRALLEQLAIGGRLVAPVGEQAGEQVLTLVERVAPAQWRESRLDRVFFVPLKSGVI

SEQ ID NO: 143249 - DNA, 657 bp, Syntrophus aciditrophicus SB
  CDS (1)..(657): transl_table=11
atgatggaccgatttcaaaaacagcgattgcgaatggtggatacccagatccgggcaagaggagttttaaatccccgcattctggaggcgatgtccagaattccccgtcatctcttcgtagaagaggcccttgccgatcaggcatataacgataaccctctgcccatcggcgatatgcagacgatttcgcagccttacattgtagcgctgatgacggatgccctggatctcaagggcagggaaaaagtattggagattggtacgggttcaggatatcagaccgccctgctggccgaactggcggatcaggtattttccatcgaaaggattgcgtcactggccaacaacgcccgtcgcatactcgatcagctgggttattataatgtggcgatacgaatcggggacggcacctatggctggaaagaggaatctccttttgatgcgattctggttacagcgggtgcacctgatatccccatgccactgattgaacaattgaagatcgggggccgactggtcctgcccgtagggggaaggcatattcaggatctcgtgaaagttacgagactgtctgaggacatcaatgagttaaagaaagaaaatctgggaggctgccgctttgtagatcttatcggagagtatggctggtccggctga

SEQ ID NO: 143250 - protein, 218 aa, Syntrophus aciditrophicus SB
MMDRFQKQRLRMVDTQIRARGVLNPRILEAMSRIPRHLFVEEALADQAYNDNPLPIGDMQTISQPYIVALMTDALDLKGREKVLEIGTGSGYQTALLAELADQVFSIERIASLANNARRILDQLGYYNVAIRIGDGTYGWKEESPFDAILVTAGAPDIPMPLIEQLKIGGRLVLPVGGRHIQDLVKVTRLSEDINELKKENLGGCRFVDLIGEYGWSG

SEQ ID NO: 143251 - DNA, 1233 bp, Frankia sp. CcI3
  CDS (1)..(1233): transl_table=11
atgaccattcagcatgaggagagttccaccgcggctgctgtgttgcgcgcggccatggttgacgagctgcgggaactcggcgcggtccgtgacccgagggtggcgcgtgcgttggccgtggtgccgcggcatttgttcgcgccgggcgcagatctggcagcggcgtacgcggctacagggacggtcgtcccggtgcgcgacgcggtgggtcggatggtcagtacggtgtcggcgccgcacatccaggcgatgatgctggagcaggcgcgggtggcgccggggatgcgggtccttgaggtcggttcggcgggctacaacgcggcgctgctcgcggagctcgtcggcgagacaggcgaggtcactaccgtcgacattctgcccggggttgccgagcgcgcccggcgttgtctggacgcggcgggctatggccgggtgcgggtggtgctggccgacgccgagggtggcgtgcccgaccacgcgccctatgacctggtgctggtgacgacggcggtccgtgacattccctccgcgtggacggaccagctcgcgcccggcggccggctggttgtgccgctgcggctgcggggccagacacgctcggtcgtgttcgaggccgacggcgggcggctggttggccacgacgcccaggtctgtagttttgtcccgctcgcgggtgctggggctttcccggagcaggtgctggcgttggacggggacgatgtcgtggtccggctggacgacgcggccccggtggacgtggacgaggtccgccaagcgctgacctggccgcgggtgaagacctggtcgggtgtccacagcggcgaagaaccgttcgatgacctgctgctgtggctcgcggtcggcctggagaactctggtctgctgctggcccggcaggctgcggtcacgcgggggacagtcgcccacgcgtggagcctcggcatgccggcggtcgtaggaaaaggcagtctcgcctacttctcgctcagtgcgaaggttcccggccgtgtgtcccgcgagtttggcgttcaggcccagggtcccgccgccgagctgctgacctcccagttcatcgaacggatccgcgcgtggaaggccgatcggccggcccgtatcgaggcattccccgcgggtactccggacgccgcgctgcccgccggcggcgtgtttctcgatcgccctcatcggcgtgtcgtcgtctcctggccgtccggcccggaggttcccgtctga

SEQ ID NO: 143252 - protein, 410 aa, Frankia sp. CcI3
MTIQHEESSTAAAVLRAAMVDELRELGAVRDPRVARALAVVPRHLFAPGADLAAAYAATGTVVPVRDAVGRMVSTVSAPHIQAMMLEQARVAPGMRVLEVGSAGYNAALLAELVGETGEVTTVDILPGVAERARRCLDAAGYGRVRVVLADAEGGVPDHAPYDLVLVTTAVRDIPSAWTDQLAPGGRLVVPLRLRGQTRSVVFEADGGRLVGHDAQVCSFVPLAGAGAFPEQVLALDGDDVVVRLDDAAPVDVDEVRQALTWPRVKTWSGVHSGEEPFDDLLLWLAVGLENSGLLLARQAAVTRGTVAHAWSLGMPAVVGKGSLAYFSLSAKVPGRVSREFGVQAQGPAAELLTSQFIERIRAWKADRPARIEAFPAGTPDAALPAGGVFLDRPHRRVVVSWPSGPEVPV

SEQ ID NO: 143253 - DNA, 672 bp, Saccharophagus degradans 2-40
  CDS (1)..(672): transl_table=11
gtggatcgattaaaactagaaggcgtggggatgacctctaaacgcactcgtgaccgtttggtcgagcgtttgctcgagcaaggggtaactagtcagtttgtgttggagttaatagccaatacgccacggcatttattcttagatgaagcgctttcccaccgcgcttatgaagatgcgtccctccctataggcttcggccaaaccctttcccagccctacattgttgcccgaatgaccgaaatattgctcggtgccgctggcgaccccaagcgcgtgctcgaaataggcactggctctggctaccaaacctgcattttggcgcaagccgttgaacatgtgtggagcgtggaacgaattaagccattgcaggacaaagcaaaacagcgcttaaggcacctagggctaaataatgtcacctataagcacgcggatggcggcttcggttggcccgagcaggggcccttcgatgcaattctttctgccgcggcacctcgcgatattcctaaaagtctgctacagcaattggcgcacaatggcgtgctggttatccccgtgggtgctgatgagcaggtgcttaccctagtgataagggatggcgaagaagacaaattcataacccaaaaattagaacctgttaagtttgtaccactactatctggagtaacacgttaa

SEQ ID NO: 143254 - protein, 223 aa, Saccharophagus degradans 2-40
MDRLKLEGVGMTSKRTRDRLVERLLEQGVTSQFVLELIANTPRHLFLDEALSHRAYEDASLPIGFGQTLSQPYIVARMTEILLGAAGDPKRVLEIGTGSGYQTCILAQAVEHVWSVERIKPLQDKAKQRLRHLGLNNVTYKHADGGFGWPEQGPFDAILSAAAPRDIPKSLLQQLAHNGVLVIPVGADEQVLTLVIRDGEEDKFITQKLEPVKFVPLLSGVTR

SEQ ID NO: 143255 - DNA, 672 bp, Methylobacillus flagellatus KT
  CDS (1)..(672): transl_table=11
atgagcagcgcggcattaagcggcattggcatgacctcgcagcgcacgcgcgagcgtatgctgaggcgcctgagcgagaaaggcatcaaggacgaagtggtgctggcggcgctgggcgccatcccccgtcatatcttcgtcgacgaggcgctgtcctcacgcgcctatgaagacggctcgctgccgatcgggttcggacagaccatttcccagccctatatcgtggcccgcatgaccgagatcttgcgcaacggcggcccgctcggaaaagtactggaaatcggcaccggctgcggttaccagactgccgtactttccaaagtgtccaaggaggtctactcggtagagcgtatccgcccgctgttgatgaaggcacgtggccatttgcgggaattgcgcctcgccaatattaagctcaagcatgccgatggcaccatgggcttgccggaactggcaccttttgacggcatcatggtcacagcggctgcacgtcatatcccgcaagagctgctagagcagcttgccgtcgggggacgcatggtcatccctgtcggcactgaagaacaaatcctgtacctggtcgagcatctcaagactgcatcaggctcggaatacagacaaagtaaactggaagcggtgaaattcgtaccgctgctaggtggaaccaactaa

SEQ ID NO: 143256 - protein, 223 aa, Methylobacillus flagellatus KT
MSSAALSGIGMTSQRTRERMLRRLSEKGIKDEVVLAALGAIPRHIFVDEALSSRAYEDGSLPIGFGQTISQPYIVARMTEILRNGGPLGKVLEIGTGCGYQTAVLSKVSKEVYSVERIRPLLMKARGHLRELRLANIKLKHADGTMGLPELAPFDGIMVTAAARHIPQELLEQLAVGGRMVIPVGTEEQILYLVEHLKTASGSEYRQSKLEAVKFVPLLGGTN

SEQ ID NO: 143257 - DNA, 669 bp, Acidobacteria bacterium Ellin345
  CDS (1)..(669): transl_table=11
atggcagctagtcccgatctcaccggcttcgcgctcgatcgtgcccgcatgatcgatacccaactccgccagcgcggcattcgcgacgagcgggtgctcaacgccatggccaccattccgcgcgaagaatttgtcgtcgcgcgatatcatcccgatgcctacgccgaccatccgctgcccattccgctcgggcaaacgatatcgcagccctacatcgtcgcccgcatgctcgaagccgcccagatcgctcccgccgataaggttctcgaagtcggcaccggtaccggataccaggccgcattgctgggcgcgctcgctgcacaggtcttcaccatcgagcgccatgccgagttggccgccctggcgcgcatccacctcgaacatcttggctacaccaacatcagcgtcatcaccggcgatggcagcgaaggcctcgccgaccaggctcccttcgacgttatcctcgtcgccgccgccgttcccgattttccgcccgcactcttccaccaactcgcagaaggcggacgaatggtgatccccgtcggctcaccggagttgcaagcgctatacgtggtccgcaaacaagcaggccgcctgcagcgcacgaaactcgacgactgccgtttcgtccctctcatcggcaaccagggctatagccccgcccgctaa

SEQ ID NO: 143258 - protein, 222 aa, Acidobacteria bacterium Ellin345
MAASPDLTGFALDRARMIDTQLRQRGIRDERVLNAMATIPREEFVVARYHPDAYADHPLPIPLGQTISQPYIVARMLEAAQIAPADKVLEVGTGTGYQAALLGALAAQVFTIERHAELAALARIHLEHLGYTNISVITGDGSEGLADQAPFDVILVAAAVPDFPPALFHQLAEGGRMVIPVGSPELQALYVVRKQAGRLQRTKLDDCRFVPLIGNQGYSPAR

SEQ ID NO: 143259 - DNA, 639 bp, Myxococcus xanthus DK 1622
  CDS (1)..(639): transl_table=11
atgggtgactggggaagggccgactacctgtcgcggcacggcatcaaggacgcgcgagtcctggaggccatcgctcggctgaaccgcgcggacttcgtgccggaggacctgcgcgaagaggcgagcgcggactcgccgctgcccatcgggcatgggcagaccatcagccagccctacgtcgtggcgctgatgacggaggcgctccagctccagggggacgagcgcgtcctcgaaatcggcaccggctcgggctaccagacggcgctgctgtccctgctgtgcagagaggtctactccgtggaaatcgtccccgagctggcccaatcggcgcgagaggtgttggggcggcagggcttcgaaaacgtctcgttccgggaaggagacggctcactgggctggccggaccaggcgcccttcgacgccatcctcgccgccgcggcgccaccagacgttccgcttcagctcctttcacagctcaagccgggcgggcgcatgatcattccggtggggccaagggggggcacccagcaactgttgcgcatccagcgagccctccggcccggagaggtgccccaggtggagtccctgctgtcggttcgcttcgttcccatgacggggcagccgctctcgcaggggtga

SEQ ID NO: 143260 - protein, 212 aa, Myxococcus xanthus DK 1622
MGDWGRADYLSRHGIKDARVLEAIARLNRADFVPEDLREEASADSPLPIGHGQTISQPYVVALMTEALQLQGDERVLEIGTGSGYQTALLSLLCREVYSVEIVPELAQSAREVLGRQGFENVSFREGDGSLGWPDQAPFDAILAAAAPPDVPLQLLSQLKPGGRMIIPVGPRGGTQQLLRIQRALRPGEVPQVESLLSVRFVPMTGQPLSQG

SEQ ID NO: 143261 - DNA, 645 bp, Rubrobacter xylanophilus DSM 9941
  CDS (1)..(645): transl_table=11
gtgccgggctccccggaggatctcgtccgggccgccgcggccgccggggtgggggaccggagggtgctggaggcgctgcgccgggtcccccgggagctgttcgtcccgccggagcgcgccgcggaggcgtacctggaccgccccgtccccatcccgcacgggcaggtgaccacccagccctcgctggtggcgcggatggtggaggccctggggctcgggggcgaagagagggtgctggagatcgggacgggctacggtttccagacggcgctgctcgcccgcctgtgcgccttcgtgtggagcgtcgagcgccacccggacgtggcggaggcggcgcgtcagaacctctcccgccacggcgtctctaacgcccgcgtggtggtcggcgacggcacgcggggcctccccggagaggcccccttcgacgccatcctggtctcggcggccttcacccgggtcccggagcccctggcccggcagctcgcccccggcgggcggctggtccagccggtggggccgggcggggaggaggaggtggtgctcttcgagaagggccgggacggggcgctggtgcgccgcgccgggatctcgggcgcgcgcttcgtgcggctctacggggactacgggttcgagcccccgccctga

SEQ ID NO: 143262 - protein, 214 aa, Rubrobacter xylanophilus DSM 9941
MPGSPEDLVRAAAAAGVGDRRVLEALRRVPRELFVPPERAAEAYLDRPVPIPHGQVTTQPSLVARMVEALGLGGEERVLEIGTGYGFQTALLARLCAFVWSVERHPDVAEAARQNLSRHGVSNARVVVGDGTRGLPGEAPFDAILVSAAFTRVPEPLARQLAPGGRLVQPVGPGGEEEVVLFEKGRDGALVRRAGISGARFVRLYGDYGFEPPP

SEQ ID NO: 143263 - DNA, 666 bp, Cytophaga hutchinsonii ATCC 33406
  CDS (1)..(666): transl_table=11
gtggaagattcctatttacacaaaggactacgaagaaagctcattaagatactaagagacaagggtattcaggatgaattggtattacaggccattgatcgggtaccccggcatatttttcttgacaatgcttttttagaacacgcctatcaggataaagcttttccaattggtgatggacaaaccatttctcaaccctatacggttgcctctcagacaagcttgctgaagctgagtccgggaatgaaagtacttgaaatcggtacaggttccggttatcaatgttctgttcttcttgaaatgggtgtaaatgtttttaccattgaataccataaaagtctgtttgagaaatcaaaaaaaatgcttcagtcgcttggctacaaagctcagttcttttgcggagacggcagcgaaggtttagcgcgcttcggcccgtatgaccgtatacttgctactgccggcgcaccgtatgtgccgcaaaagttattggaacagttaaaagttggcggcatattggttattccggttggagatcagaaaacacaaaaaatgctgcgcctcactaaagtaactgaaaaagaaatcacacaagaagagtgcggcgacttccgttttgtaccattggtaggcaaagacggctggaacgctaaaacaaataaattatga

SEQ ID NO: 143264 - protein, 221 aa, Cytophaga hutchinsonii ATCC 33406
MEDSYLHKGLRRKLIKILRDKGIQDELVLQAIDRVPRHIFLDNAFLEHAYQDKAFPIGDGQTISQPYTVASQTSLLKLSPGMKVLEIGTGSGYQCSVLLEMGVNVFTIEYHKSLFEKSKKMLQSLGYKAQFFCGDGSEGLARFGPYDRILATAGAPYVPQKLLEQLKVGGILVIPVGDQKTQKMLRLTKVTEKEITQEECGDFRFVPLVGKDGWNAKTNKL

SEQ ID NO: 143265 - DNA, 636 bp, Shewanella sp. MR-4
  CDS (1)..(636): transl_table=11
atgactcgagttgccttaacatcggcggtgaatttagctaaaaagcttcaggaggcggggatccgtcatccagccgttcttaaggcaatatcccataccccgcgagaactgtttcttgataatgcgctggcccataaagcctacgaaaataccgccttgcccataggccaaggacaaaccatttcgcagccgtatattgttgcacgtatgactgagttactgctgcaacatcagccgcaaaaggtgcttgaggtggggacgggctctggctaccaagcggctattctcgcacaactggtgccagaactgtgcaccattgagcgtattaaaggtttacagatccaagcgaggcaaagattaaagcgactcgatctgcataatgtgtcattcaaatatggcgatggctggcagggctggccgaatcgcagcccctttgatggcattatggtcacggcagcagcggccaaggttcccgaggccttattatcccagttagccgaaggcggcgtgctgatcatccctgtgggtgaagagacgcaacaattgatgcgctttacccgccgctcggatcgttttagttctgaagtgatagaaaccgtcaaatttgttcccttggtcaatggcgaactcgcttaa

SEQ ID NO: 143266 - protein, 211 aa, Shewanella sp. MR-4
MTRVALTSAVNLAKKLQEAGIRHPAVLKAISHTPRELFLDNALAHKAYENTALPIGQGQTISQPYIVARMTELLLQHQPQKVLEVGTGSGYQAAILAQLVPELCTIERIKGLQIQARQRLKRLDLHNVSFKYGDGWQGWPNRSPFDGIMVTAAAAKVPEALLSQLAEGGVLIIPVGEETQQLMRFTRRSDRFSSEVIETVKFVPLVNGELA

SEQ ID NO: 143267 - DNA, 666 bp, Alkalilimnicola ehrlichei MLHE-1
  CDS (1)..(666): transl_table=11
atggacccaaaccgctaccagggcatcgggatgacctcgcgccgcacccgcgaacgcctggtcagccgcctggccgaggagggcatccgcgacccgcgggtgctccaggccatcctcgaggtgccgcgccacctgttcgtggatgaggccctggccagtcgggcctacgacaacacgccgttgcccatcggccacggccagaccatctcgcagccctgggtggtggcccgcatgacggagctgctgatcgagcaatcgatcccggagcgggtgctggaactgggcacgggctccggttaccaggcggccgttctggcttacctgggggtcgaggtgtacaccatcgagcggatcaaggcgttggccgaccaggcccggcagcgcatgcgcgatctcaggctccaccgcgtccatgtccgttatggcgatggtagcgaggggtgggcgcaacacgcgccctaccagggcatcattgtcaccgccgcgcccgaggaggtgcccgaccccttatgggaccagctggacgagggtggacggctggtggcgcccctgggcggggccggccggccccaggagctggtgttgatcgagcgcgtggatggggagctgcgccgtcgccacgtcgcctcggtcagcttcgtcccgctgctgggtgggtgccgttga

SEQ ID NO: 143268 - protein, 221 aa, Alkalilimnicola ehrlichei MLHE-1
MDPNRYQGIGMTSRRTRERLVSRLAEEGIRDPRVLQAILEVPRHLFVDEALASRAYDNTPLPIGHGQTISQPWVVARMTELLIEQSIPERVLELGTGSGYQAAVLAYLGVEVYTIERIKALADQARQRMRDLRLHRVHVRYGDGSEGWAQHAPYQGIIVTAAPEEVPDPLWDQLDEGGRLVAPLGGAGRPQELVLIERVDGELRRRHVASVSFVPLLGGCR

SEQ ID NO: 143269 - DNA, 828 bp, Rhizobium leguminosarum bv. viciae 3841
  CDS (1)..(828): transl_table=11
atggatatgacgcgcatccgagatcgcatggtggagcaccacgtgacgcgtcgcggcattcgcgatcaaagcgtcatcggggcgatgcgcatggtgccacgcgaaaatttcgttcctccaggctccgaggaattcgcctatgaggatgcaccgctgtcgatcggcgagggccagacaatttcgcagccgttcatcgtggctctgatgctcgaaaaggccaatctgaatgccggtgacaaagtgctcgaggtcggaacgggctccggctatgcttcggccctcatcagccggatagcaaggcatgtctactctatcgagcgccatgaaaagctggcgcttcaggctagggaacggttcgagaagctgggataccgcaacattgacgttcacgtcggcgatggcagcaagggcttggcaaaagccgctccgttcgatgccattatcgtttccgcgggcgcacccaaggtgccaaccgccttgaaagaacagctgcacctcggagggcggctcatcatcccggtcggcggcggtgaagggcagcgcctgaaacggttcacgcgcaccagcgccgccgcattcgaggaagaagatctcggcggggtgcgcttcgttcccttgatcggcgaagacgcctggacagcttcacatccgatgtacacggcaacggccccctcattgccgggaacggttgcctccgaaccaagttctccgcatgacggacagggagaggggatggaaaatcacaaattgcctgcgttgccgcatcagcatcatcaagaagcagaaatccggctgacaatcgacgacgaaggagacatcgcgagttaa

SEQ ID NO: 143270 - protein, 275 aa, Rhizobium leguminosarum bv. viciae 3841
MDMTRIRDRMVEHHVTRRGIRDQSVIGAMRMVPRENFVPPGSEEFAYEDAPLSIGEGQTISQPFIVALMLEKANLNAGDKVLEVGTGSGYASALISRIARHVYSIERHEKLALQARERFEKLGYRNIDVHVGDGSKGLAKAAPFDAIIVSAGAPKVPTALKEQLHLGGRLIIPVGGGEGQRLKRFTRTSAAAFEEEDLGGVRFVPLIGEDAWTASHPMYTATAPSLPGTVASEPSSPHDGQGEGMENHKLPALPHQHHQEAEIRLTIDDEGDIAS

SEQ ID NO: 143271 - DNA, 615 bp, Solibacter usitatus Ellin6076
  CDS (1)..(615): transl_table=11
atggtggaaacgcaacttcgccggcgcggcatccgcgaccagcgggtgctggcggccatgctgcaaatcccgcgcgaacagttcgtttcgccggagacccggttgctggcatatagcgacgaaccccttcaaatcggcttcggccagaccatctcgcaaccctacatgacggcgctaatggcgcaggagcttgggttacaggggggtgaaagcgtgctcgaagtaggtgccggctgcggctatgcggcggccgtgctgggagcgctcgcggcatacgtgatcacggtcgagatcatacccggactggcggcactggcggagcgtaacctcttgcgaacggggctggcgggcaatgtccgcgtggtcccgggcgatggttcctggggttacgccgcgggcgcgccatatgatgccatttcggtggcggcgggcgcccccgatattcctctggcgctgatgcagcagctcaacgatcccgggatcctgataattccggtcggcgatttcaaggatcaggaattgcgggtgcttcgcaagcgcgacgggcgagtggaacagagcgtggctacgctctgccgttttgtcccgctgcgcggcggcgaaggctggcactag

SEQ ID NO: 143272 - protein, 204 aa, Solibacter usitatus Ellin6076
MVETQLRRRGIRDQRVLAAMLQIPREQFVSPETRLLAYSDEPLQIGFGQTISQPYMTALMAQELGLQGGESVLEVGAGCGYAAAVLGALAAYVITVEIIPGLAALAERNLLRTGLAGNVRVVPGDGSWGYAAGAPYDAISVAAGAPDIPLALMQQLNDPGILIIPVGDFKDQELRVLRKRDGRVEQSVATLCRFVPLRGGEGWH

SEQ ID NO: 143273 - DNA, 687 bp, Magnetococcus sp. MC-1
  CDS (1)..(687): transl_table=11
atggtcgctgtttcgctaaagatgagccaaccggctgctccaccaccacccatgggggagcgtgcccgtacccgcatgttgctcgccctgcaaagtcgggggattcatgatccacgggtgctggaggtgatgggtgccctaccccgtcatgactttgtggatgaagccctcgcgggccacgcttatggtgatgccaccctgcccattggcgagggtcagacgctctcccagccctataccgtggcccgcatgagtcaggccctggagttggggtatggcatgcatgtgctggagatcggcaccggatcggggtatcaaaccgctgtcttggcggcgctctgtcggcgggtttacacggtggagcgtatcccctcactggcactgctggcacgggagcggttggagcgcatgggcatcaccaatgtacgctaccgggtgggcgatggcaccctaggctggccagagccgcgcccctttgagcgcattattgtcaccgcgggtgcccccgccaccccagagcgtctgaaaagacagctcgaaattgggggacgcatgattatccctgaagggggtaaactcaaccagcagttaatttgcattcagcgcaccggtcctgaaagttggcaacgtgacgtgctggaggcgtgtcgttttgtgcccctcgtgggccaacaggggtgggaatag

SEQ ID NO: 143274 - protein, 228 aa, Magnetococcus sp. MC-1
MVAVSLKMSQPAAPPPPMGERARTRMLLALQSRGIHDPRVLEVMGALPRHDFVDEALAGHAYGDATLPIGEGQTLSQPYTVARMSQALELGYGMHVLEIGTGSGYQTAVLAALCRRVYTVERIPSLALLARERLERMGITNVRYRVGDGTLGWPEPRPFERIIVTAGAPATPERLKRQLEIGGRMIIPEGGKLNQQLICIQRTGPESWQRDVLEACRFVPLVGQQGWE

SEQ ID NO: 143275 - DNA, 636 bp, Shewanella sp. ANA-3
  CDS (1)..(636): transl_table=11
atgactcgggttgccttaacatcggcggtgaatttagctaaaaagcttcaggaggcggggatccgccatccagccgttcttaaggcaatatcccgtaccccgcgcgagttgtttcttgataatgcgctggcccataaagcctacgaaaataccgccttgcctataggccaaggacaaacgatttctcagccttatatcgtcgcgcgtatgacagaattactgctgcaacatcagccgcaaaaggtacttgaggtaggaacgggctctggctaccaagcggcgatcctcgcgcaattagtgccagaactgtgcaccattgaacgtatcaaagggttacagatccaagcgagacaaagattaaagcgactcgatctgcataatgtgtcatttaaatatggcgatggctggcagggctggccgaatcgcagcccctttgatggcattatggtcacggcggcagcggctaaggttcccgaagccttattgtcccagttagctgaagggggcgtgctgatcatccctgtgggggaagagacgcagcaattgatgcgctttacccgccgctcggaccgttttagttctgaagtgatcgaaaccgtcaaatttgttcccttgatcaatggcgagctcgcttaa

SEQ ID NO: 143276 - protein, 211 aa, Shewanella sp. ANA-3
MTRVALTSAVNLAKKLQEAGIRHPAVLKAISRTPRELFLDNALAHKAYENTALPIGQGQTISQPYIVARMTELLLQHQPQKVLEVGTGSGYQAAILAQLVPELCTIERIKGLQIQARQRLKRLDLHNVSFKYGDGWQGWPNRSPFDGIMVTAAAAKVPEALLSQLAEGGVLIIPVGEETQQLMRFTRRSDRFSSEVIETVKFVPLINGELA

SEQ ID NO: 143277 - DNA, 567 bp, Nocardioides sp. JS614
  CDS (1)..(567): transl_table=11
atggcgcccgaccgggtcgacgaggcgttcgcggcggtgccgcgcgagtggttcctgcccgtgagcgagcgcgaccgggcgtcgtacgacgggccgatcgagatcggccacgggcagaccaactcccagccgcgcacggtcgccgcgatgctgcggctactggaggtccggcccggcgaccgggtcctcgacgtcggctcgggctcgggctggaccaccgggctgctggccgagctgaccggatccgccggccgggtgctgggcctggagctggagcccgagctggtggcgttcggacgggccaacctgacccacggcggctgggactgggcgcggatcgaccaggcgacgcccggcgtgtacggcgcaccggcgggcgcgccgtacgaccggatcctggtgtcggccgaggcgcgcgagctgccgacctccctggtcgagcagctggcccggcccggccggctggtggttccggtgaacggcgagatgctgctggtcgtcgtggacgccggcgcggagccgaccgtcaccaagcacggctggtaccggttcgtgccactgcgctga

SEQ ID NO: 143278 - protein, 188 aa, Nocardioides sp. JS614
MAPDRVDEAFAAVPREWFLPVSERDRASYDGPIEIGHGQTNSQPRTVAAMLRLLEVRPGDRVLDVGSGSGWTTGLLAELTGSAGRVLGLELEPELVAFGRANLTHGGWDWARIDQATPGVYGAPAGAPYDRILVSAEARELPTSLVEQLARPGRLVVPVNGEMLLVVVDAGAEPTVTKHGWYRFVPLR

SEQ ID NO: 143279 - DNA, 771 bp, Acidovorax sp. JS42
  CDS (1)..(771): transl_table=11
atgcagcggcggccaggttttcctgcgcggatcgactggcgccaacccggtgcacccaccgcggcgccaccggtaggcgcgcgccgcgaggtgcagccgcccacgccgcacggcgtggggctggactccgctgccgtgcgcgcacgcatggtgcagcgactcgcagcctcgggcatctcggcgggggcggttcttcaggccatgggaatgattgagcggcatcgttttgtcgacaccgccttggccaaccaagcctatgaggacaccagtctgcccatcggactgggtcagaccatttccaaacccagcgtcgtagcacgcatgatcgaattgttgctgggggccgagtgcgcgcgcggaaagggaatgggccgggtgctggagatcggcacgggctgcggctatcaggcagcggtgctgtcgcgtgtctcgcgcgaggtgtataccgttgaacgcttgcgcgcgttgcatgaaaaggcgcgagaccacttgcgccccctgcgcctggccaacgtgcacctgatcctgggcgacggaatgttgggttaccccagcggcgcgccctatgcgggcattattgccgcggcggggggggatagccttcccgccgcgtggtgcgagcaacttgccgtgggtggccggctggtcgccccactggcgggcgccgacggccaacagatgctgctggtcgttgataaaactgcgcaaggcttcaagcagggcattctggaagccgtgcatttcgtccccctaaaatcggggatcgcctga

SEQ ID NO: 143280 - protein, 256 aa, Acidovorax sp. JS42
MQRRPGFPARIDWRQPGAPTAAPPVGARREVQPPTPHGVGLDSAAVRARMVQRLAASGISAGAVLQAMGMIERHRFVDTALANQAYEDTSLPIGLGQTISKPSVVARMIELLLGAECARGKGMGRVLEIGTGCGYQAAVLSRVSREVYTVERLRALHEKARDHLRPLRLANVHLILGDGMLGYPSGAPYAGIIAAAGGDSLPAAWCEQLAVGGRLVAPLAGADGQQMLLVVDKTAQGFKQGILEAVHFVPLKSGIA

SEQ ID NO: 143281 - DNA, 609 bp, Magnetospirillum magnetotacticum MS-1
  CDS (1)..(609): transl_table=11
atggaattgcggcggatgggggtggtcgacacccgcgtcctgtcagccatcgagcgtattccccgcgccctcttcgtcgccgagcccttccttgatcaggcctatgagaatacggcgctgcccatcggctgcgcccagaccatcagccagcccctggtggtcggcctgatgagccaggccctggacgtgggtgagcgcatgaaggtccttgaagtgggcacggggtcgggctatcaggcggcggttctggccaagctttgccgccggctctattcggtggagcggcacaagccgctgctggccgaggcggaggcccgtttcaaacatctgcgaatccataacatcacctgccgggccggtgacggttcgcgcggatggccggaacaggcgcccttcgaccgcatcatggtcacggcggccgcccccgatattccgcccgccctggtggatcagctgaagcccgacggcatcatggtgctgccgctgggggatttgggtggcgtcgatcaggaattggtgcggatcaccaagaccgatcgcggcatcgatatccaacccttccttcccgtgcgcttcgtacccctggtggagggggtgccggaggaatga

SEQ ID NO: 143282 - protein, 202 aa, Magnetospirillum magnetotacticum MS-1
MELRRMGVVDTRVLSAIERIPRALFVAEPFLDQAYENTALPIGCAQTISQPLVVGLMSQALDVGERMKVLEVGTGSGYQAAVLAKLCRRLYSVERHKPLLAEAEARFKHLRIHNITCRAGDGSRGWPEQAPFDRIMVTAAAPDIPPALVDQLKPDGIMVLPLGDLGGVDQELVRITKTDRGIDIQPFLPVRFVPLVEGVPEE

SEQ ID NO: 143283 - DNA, 612 bp, Prosthecochloris aestuarii DSM 271
  CDS (1)..(612): transl_table=11
atgcgatacgggatctccgataagcgggtacttgatgcttttcttcaggtgccccggcatctttttttcgatattgccgacagaacgtatgcttacgatgacggggcatttcctattggattcggtcagaccatctcccagccctatactgtggcctatatgacggctatattgtccaaacggtgtcctgcaggaaaggtgctcgaaataggtaccggttcggggtatcaggcagctattctcgatgcgatgggctatcgggtctacaccgttgaacgcattgaggggctctatgagcgttcaggaagggtattcgatcgtcttggtctccatgtacagcagatgctgggcgatggttcaggtggctggctctctgaggccccgtttgatggtattatcgttacagcaggagctcctgatgtgccgcattctcttgtctctcagctgaaagtggggggctgccttgtcattcctgtcggcgggagtgacggacagtggatgacagtggtgaccaaaaccgctgcagggtttcggcgtgaagtctatgaacgttttgctttcgttcctctgataggcagggagggctggaacgaggtggatgacgggggataa

SEQ ID NO: 143284 - protein, 203 aa, Prosthecochloris aestuarii DSM 271
MRYGISDKRVLDAFLQVPRHLFFDIADRTYAYDDGAFPIGFGQTISQPYTVAYMTAILSKRCPAGKVLEIGTGSGYQAAILDAMGYRVYTVERIEGLYERSGRVFDRLGLHVQQMLGDGSGGWLSEAPFDGIIVTAGAPDVPHSLVSQLKVGGCLVIPVGGSDGQWMTVVTKTAAGFRREVYERFAFVPLIGREGWNEVDDGG

SEQ ID NO: 143285 - DNA, 633 bp, Xylella fastidiosa Ann-1
  CDS (1)..(633): transl_table=11
atgacgtcgcaacgcgtccgagaccgcctggtcgaacgactacgcgaatgcggcatccaagacgaacgggtactcagcaccattcgcatcgtgccacgccatttattcattgatgaagccttggcactgcgcgcttacgaagacaccgcattgcccatcggccatggacagaccatctcgcaaccctgggtcgtcgcacggatgaccgaagctgtcatgcaggttgccccaaaaaaaatactcgagatcggtacaggttccggctaccagagcgccattctggcctcactaggattggaggtgtacaccattgagcgtatcggcaaactactgcgtcaagcacgtaagcgtttccgccagcttggcataaaaatacgcagcaaacacgatgacgggagcaccggctggacagagcatgcaccttacaacgccatcttggtcacagcagcagccccgacactgatcgacactctcatcgaacaacttgcaataggcggacgcctggtggctcctgtcggcaccgcttcagagcaagccctagtgcagctcacacgaacaatcgacggtagcatcacacacgagattttagaaccagtcacatttgtatccctgctaccagggatgttggattaa

SEQ ID NO: 143286 - protein, 210 aa, Xylella fastidiosa Ann-1
MTSQRVRDRLVERLRECGIQDERVLSTIRIVPRHLFIDEALALRAYEDTALPIGHGQTISQPWVVARMTEAVMQVAPKKILEIGTGSGYQSAILASLGLEVYTIERIGKLLRQARKRFRQLGIKIRSKHDDGSTGWTEHAPYNAILVTAAAPTLIDTLIEQLAIGGRLVAPVGTASEQALVQLTRTIDGSITHEILEPVTFVSLLPGMLD

SEQ ID NO: 143287 - DNA, 642 bp, Croceibacter atlanticus HTCC2559
  CDS (1)..(642): transl_table=11
gtgaaagattcccatagacaacaaggcaaacgccaacagctcgtaaagattgtacaagagaaaggtattgaagaccagaaggttttaaaggccataggtagtataccaagacatttatttatggatagtagttttgaagatcatgcctatcaagacaaagcttttcctattgctgcagaccaaaccatatctcaaccctatacagttgcttttcaaacagaacttttacaaattaaaagaggtgacacagttttggaaataggtacaggtagtggttatcaaactgcggtgctttgttacttaggtgccaaagtttacactgttgaacgccaaagagaattgtttaagaaaacagaacgctttcttcctaaattagggtataggccaaaatatgccacatttggagatggttatttaggactgccagattatgcaccatttgataagattatagttactgctggtgcaccgtttataccaaaacctttaatgcaacagttaaaagtaggaggcaggttagttattcctgtaggagatgaagttcagataatgacattgttagaaagaaaaagccaaaaggagtttaagaaaaccacttttggcgagtttaggtttgttcctcttttggaggataaaaattaa

SEQ ID NO: 143288 - protein, 213 aa, Croceibacter atlanticus HTCC2559
MKDSHRQQGKRQQLVKIVQEKGIEDQKVLKAIGSIPRHLFMDSSFEDHAYQDKAFPIAADQTISQPYTVAFQTELLQIKRGDTVLEIGTGSGYQTAVLCYLGAKVYTVERQRELFKKTERFLPKLGYRPKYATFGDGYLGLPDYAPFDKIIVTAGAPFIPKPLMQQLKVGGRLVIPVGDEVQIMTLLERKSQKEFKKTTFGEFRFVPLLEDKN

SEQ ID NO: 143289 - DNA, 654 bp, Oceanicola batsensis HTCC2597
  CDS (1)..(654): transl_table=11
atgaccgaccacgggacgagtgccgaacgcaagatgcagttcctcttcgcgctgcgctcgcgcggggtgacggatgcccggaccctggcggcgatggagaaggtcgatcgcggcgctttcgtccggggcatcttttccgaccgcgcctacgaggacatgccgctgccgatcgcctgcggccagacgatctcgcagccgtcggtggtcgggctgatgacccaggcgctgctgatcgaaccgcgccaccgcgtgctcgaggtaggcaccggatcgggctatcaggcggcgatcctggcgcagatggcgcgccgggtctacaccatcgaccggcaccagcgtctggtgcgcgaggcccaggcggtcttcgaccggatggagctgggcaacgtgacgaccttcgttgcggacggcagccacggcctgcccgatcaggcgcccttcgaccgcatcatcgtgaccgccgcggccgaggacgcgccggggccgctcttggctcagttgaagattgacggtatcatggtgctgccggtcggccagtcggatacggtgcaaagcctgatccgggtgcgccggctcgagacggggtacgattacgaagagctccggccggtgcggttcgtgccgctggtcgaggggctggccaaggaagattga

SEQ ID NO: 143290 - protein, 217 aa, Oceanicola batsensis HTCC2597
MTDHGTSAERKMQFLFALRSRGVTDARTLAAMEKVDRGAFVRGIFSDRAYEDMPLPIACGQTISQPSVVGLMTQALLIEPRHRVLEVGTGSGYQAAILAQMARRVYTIDRHQRLVREAQAVFDRMELGNVTTFVADGSHGLPDQAPFDRIIVTAAAEDAPGPLLAQLKIDGIMVLPVGQSDTVQSLIRVRRLETGYDYEELRPVRFVPLVEGLAKED

SEQ ID NO: 143291 - DNA, 639 bp, Pseudoalteromonas tunicata D2
  CDS (1)..(639): transl_table=11
gtgctcagcaattatgatcgtagtgcacaggcactagcgcataaactatcgcaagatggcattaccaatcatttagtattaaacgcaattgcagcaacaccaagacatgtatttgtcgatgatgtactaaagcatcaggcatatcaaaatacagcattgcctatcggccttggtcaaacgatttcgcagccatacattgttgctaaaatgacacaattattattagatgctggtgtgaaagataaggtgcttgaaattggcactggctcaggctaccaaagtgctattttggctcagttgtttaaagaagtgtattctgttgagcggattaaatccttgcaatggcaggcaaaaagacggctacagcagctcgacttttataatgtgatgatgaagcacgccgatggttggcaaggctggcctgctaaaggtccgtttaatggcatcattgtgaccgcagctgctgcgcgcgtgccagaagcgcttttaacgcaattggctaatgaaggggtattgattgcaccgattggcgaaaaggagcagcaattaatcattgtgcaacgacaaggtgataattttgttcatcatcaactagagtctgttcgttttgtgcctttgattgatggtgacatcgaataa

SEQ ID NO: 143292 - protein, 212 aa, Pseudoalteromonas tunicata D2
MLSNYDRSAQALAHKLSQDGITNHLVLNAIAATPRHVFVDDVLKHQAYQNTALPIGLGQTISQPYIVAKMTQLLLDAGVKDKVLEIGTGSGYQSAILAQLFKEVYSVERIKSLQWQAKRRLQQLDFYNVMMKHADGWQGWPAKGPFNGIIVTAAAARVPEALLTQLANEGVLIAPIGEKEQQLIIVQRQGDNFVHHQLESVRFVPLIDGDIE

SEQ ID NO: 143293 - DNA, 630 bp, Photobacterium sp. SKA34
  CDS (1)..(630): transl_table=11
atgcggtatcaaaatcaagtagatagcttgataacatttttaaacaataaagggatcagtaatcaacgcgttctcaatgcgatagcaacagtgcctcgcgaacgctttattgatgaagctttttcctatcaggcatacgagaacaatgcgttgcctataggtagcggacaaacgatttctcagccttatattgtagcaagaatgacagagttacttgggttaacctatcaatcgtcagtattagaggttggtactggctctggatatcaaaccgccgtattagcacaactggttgagcatgtttattctgtcgaacggatcaaagcgttacagtggcaggcaaaacgacgcttcaagcagttagagttacataatatatcaactaaacatggcgatggatggcaaggatgggcaagcaaaggcccttttgatgctattatcgtgacagctgcagcaagtgagatcccccagagcttacttgctcaacttgttgatggtggacgattaattttacctgttggttgccaacagcaagaattgaaattgattgttcgaaatggcgaagcattttgcgaaaccgtgattgaacccgtaagatttgtgcctttattggctggagatttggcttaa

SEQ ID NO: 143294 - protein, 209 aa, Photobacterium sp. SKA34
MRYQNQVDSLITFLNNKGISNQRVLNAIATVPRERFIDEAFSYQAYENNALPIGSGQTISQPYIVARMTELLGLTYQSSVLEVGTGSGYQTAVLAQLVEHVYSVERIKALQWQAKRRFKQLELHNISTKHGDGWQGWASKGPFDAIIVTAAASEIPQSLLAQLVDGGRLILPVGCQQQELKLIVRNGEAFCETVIEPVRFVPLLAGDLA

SEQ ID NO: 143295 - DNA, 669 bp, Oceanospirillum sp. MED92
  CDS (1)..(669): transl_table=11
ttgaatgatcagcagttgcgcggtattggaatgacctcgcaaagaacccgtgatcgcttaataaatcgtttacgcgatcaaggtatcaaggatgaaagagtattagaggtaatgcgtaatacccctcggcatatctttattgatgaagcgttgtcgcatcgggcatatgaagatactgcgctgcctatcggctataaccagacgatttcgcagcccttcatagtcgccagaatgactgaaatgttattggccgagggggaattgcaaagggttttagaagtaggaacaggttctgggtatcagacttcaatccttgctccattggtgggcgagttattcagtgttgagagaattaagccgctacaagataaagcgcggcagcgcctgaaaactttggagcttaaaaatgtacaactaaagcacactgacggtggtatgggctgggcaggcaaagcaccttatgatggaattctggctgcttgtgctcctgaagaggtgcctgaagagttaaagcagcagttagctgtcggtggtcgtcttattattcctgtcggtggaagtgaaaatcaggaattgaagttagttatccggctttcggaggatgaattttccacagaagtgctggaaggtgtgaaatttgtacctttgttaagtggtacggtacgttaa

SEQ ID NO: 143296 - protein, 222 aa, Oceanospirillum sp. MED92
MNDQQLRGIGMTSQRTRDRLINRLRDQGIKDERVLEVMRNTPRHIFIDEALSHRAYEDTALPIGYNQTISQPFIVARMTEMLLAEGELQRVLEVGTGSGYQTSILAPLVGELFSVERIKPLQDKARQRLKTLELKNVQLKHTDGGMGWAGKAPYDGILAACAPEEVPEELKQQLAVGGRLIIPVGGSENQELKLVIRLSEDEFSTEVLEGVKFVPLLSGTVR

SEQ ID NO: 143297 - DNA, 594 bp, Flavobacteria bacterium BBFL7
  CDS (1)..(594): transl_table=11
ttgatgcgtgagaaaggaatcaaggaccagcgcgtgttggatgccatgaataaagtgccgcgccacgtatttttggacagctcttttctagaacatgcttatcaaaacaaagcatttcctataggtgctgaccagactatatcacatccttatacagttgcttttcaaagcgagcttttacaagtaaagcctaatgataagattctagagataggaaccggtagcggttatcaatgcgccgtcctattagaaatgggagcgcaagtttatactattgaacgtcagaatgaattgtacaaaaagaccaatctgattttcagaaaattaaattataggcccaaaagatatttctttggtgatggttataaaggcatgccagaagatgcaccatttgattctattatagtcacgtgtggtgcgcctcaaatccctcaaactttattaagtcagcttaaaataggtggtcgcatggtcataccagtaggtgatgatccacaaattatgaccttattgatcagagaaacggcaacgcaattttctaaagaaacctttggagagtttagatttgtcccatttttagatggtaaacaataa

SEQ ID NO: 143298 - protein, 197 aa, Flavobacteria bacterium BBFL7
MMREKGIKDQRVLDAMNKVPRHVFLDSSFLEHAYQNKAFPIGADQTISHPYTVAFQSELLQVKPNDKILEIGTGSGYQCAVLLEMGAQVYTIERQNELYKKTNLIFRKLNYRPKRYFFGDGYKGMPEDAPFDSIIVTCGAPQIPQTLLSQLKIGGRMVIPVGDDPQIMTLLIRETATQFSKETFGEFRFVPFLDGKQ

SEQ ID NO: 143299 - DNA, 666 bp, Oceanobacter sp. RED65
  CDS (1)..(666): transl_table=11
gtgactccgctacagctccagggcattggtatgaccagccaacgtacgcgcgatcgattggtcgatcggttaaaggaacgtggcatacgtaatccagatgttttagaggtgattgcgaatacgcctaggcatatttttgtggacgaagcattaagtcatcgagcttatgaagacaccgcgctgccaattggttttgggcaaaccattagccaaccctatattgtcgctcgtatgaccgaaattttgctagagcaagggccacttgaatcggttcttgaaataggaacgggctgtggatatcaagcggtcgtgcttgcccagttggtgaatcgtgtttacagcgtcgagcgtattgcgccgcttcaacaaaaagcgaaagataggatgaaactcctgcgggccaataacgtcaaactgaagcatgcagatggtaattggggttggtcagacgaaggcccattcgatgcaattctttctgctgcggcaccagaccacattcctgttcagttagcagagcaattgaaagtgggaggtcagttaattattcctattggcgatgaacgcaagcaagtattgactttggtcacccgcaatgaagacggctttagtaaaaaaatcatagaagatgtgatgtttgttcctatgttatcaggcacacagaagtaa

SEQ ID NO: 143300 - protein, 221 aa, Oceanobacter sp. RED65
MTPLQLQGIGMTSQRTRDRLVDRLKERGIRNPDVLEVIANTPRHIFVDEALSHRAYEDTALPIGFGQTISQPYIVARMTEILLEQGPLESVLEIGTGCGYQAVVLAQLVNRVYSVERIAPLQQKAKDRMKLLRANNVKLKHADGNWGWSDEGPFDAILSAAAPDHIPVQLAEQLKVGGQLIIPIGDERKQVLTLVTRNEDGFSKKIIEDVMFVPMLSGTQK

SEQ ID NO: 143301 - DNA, 639 bp, Alteromonadales bacterium TW-7
  CDS (1)..(639): transl_table=11
gtgctcgctaattacacgcgaagtgcgaaagcgttatcagatttacttaaacgtgaaggtgttgaggatcaaggcgtacttgatgccattgcaggtatacctcgtcatttatttattgacgacgtgttgcagcataaagcttatgaaaatacagcgctacctattgggcaagggcaaactatttcgcagccttatattgtagcccgtatgacggagcttctgaggttggccggtgtgcgcgataaagtattagaaatcggcacgggctctggctatcaaacagcggtattggctaaaacgtttactaacgtttattctgttgagcggatcaaagctttgcaatggcaggctaaacggcgtctgcagcagcttgatttatacaatgtaacaatgaaacatggagatggctggcaaggttggcaatctcaagcaccatttgacggtattattgttaccgctgcggctgctaccttacctcaaggtttgttaagtcaactcgccgatggcggtgtattattagcgccggttggcgaagctgatcaaaaattaataatggttattcgaaagggcgaaagctttacagagcatgttattgcaccagtaagatttgtacctttggtacctggtgatattgaatag

SEQ ID NO: 143302 - protein, 212 aa, Alteromonadales bacterium TW-7
MLANYTRSAKALSDLLKREGVEDQGVLDAIAGIPRHLFIDDVLQHKAYENTALPIGQGQTISQPYIVARMTELLRLAGVRDKVLEIGTGSGYQTAVLAKTFTNVYSVERIKALQWQAKRRLQQLDLYNVTMKHGDGWQGWQSQAPFDGIIVTAAAATLPQGLLSQLADGGVLLAPVGEADQKLIMVIRKGESFTEHVIAPVRFVPLVPGDIE

SEQ ID NO: 143303 - DNA, 666 bp, marine gamma proteobacterium HTCC2143
  CDS (1)..(666): transl_table=11
gtgagtaaattgaatttagccggtgttggcatgacgtcgcagcgcacccgtgatcgactggtacagcgtttatgtgatcagggtattagtaattttgaggtgctcgaagtgatgcgcaccacaccccgacatatctttcttgatgaagcattggcccaccgagcctatgaagacgcggcgctgccgatcggttttcaacagaccttgtcacaaccttatacggtggcgcgaatgaccgagctgctgttggcggcaggccctttgaagcgtgtactggaagtgggtacagggtctggttttcaaacaacggtactggcgcaattggttgacagaatctacagtgttgaacggataaaaccgttacaggaaaaagcgcggcagcggtttcggacgctgggtgtgaataacgtacatttgaaacatgcggatggcggcttcggctggcctgaaaaagggctgtttgacggtattatatcaacggcggcgcccgaacaggtgcccgcggaactggtggaacagttggatattggcggtagactgatcatcccagtgggcgataataaaagccagcagcttacgctggtggtcaaaacggaacagggcgcggtgaccaccattattgagccggccttttttgtgcccttaaaatcaggtgtcatacgctag

SEQ ID NO: 143304 - protein, 221 aa, marine gamma proteobacterium HTCC2143
MSKLNLAGVGMTSQRTRDRLVQRLCDQGISNFEVLEVMRTTPRHIFLDEALAHRAYEDAALPIGFQQTLSQPYTVARMTELLLAAGPLKRVLEVGTGSGFQTTVLAQLVDRIYSVERIKPLQEKARQRFRTLGVNNVHLKHADGGFGWPEKGLFDGIISTAAPEQVPAELVEQLDIGGRLIIPVGDNKSQQLTLVVKTEQGAVTTIIEPAFFVPLKSGVIR

SEQ ID NO: 143305 - DNA, 654 bp, marine gamma proteobacterium HTCC2080
  CDS (1)..(654): transl_table=11
atggatcgtgatggtataggcatgacttccatgcggacgcgccagcggctggtgcagcgtctggctgagcaaggtatttcatcggttgaagtcctcgaagctgtccgctcgacaccacgacatttgtttgttgatgaagcccttgcgcatcgtgcttatgaagataccgcattgccaatagggtggaaccagacgctttcacaaccttacattgtggctaaaatgacagaactcgctctggcaaacggcacacctaaaaaggtgcttgaaatcggtagtggctcgggctaccaaaccgcgatactggcgcaagtgtctacagaggtcttcgcgatggagcgaatcaaagggctctcagatcgttctcgcaagcgttttagagatttacgcttacgtaatgtgcagctgcgatttggagatggtctggcaggctggcctgataagggcccttttgatgtgattttgtcggcagcggcaccggacgaggtgcccgcagtgttgcttgagcagttagccatagggggacgtttgattatgccagtgggtaaccgtgaacaggatttgattgtggtctacgcaggtgaatcgggctttgagaccgaagttgttgagcccgtaaactttgtacctatgctgcccggagtggagcgataa

SEQ ID NO: 143306 - protein, 217 aa, marine gamma proteobacterium HTCC2080
MDRDGIGMTSMRTRQRLVQRLAEQGISSVEVLEAVRSTPRHLFVDEALAHRAYEDTALPIGWNQTLSQPYIVAKMTELALANGTPKKVLEIGSGSGYQTAILAQVSTEVFAMERIKGLSDRSRKRFRDLRLRNVQLRFGDGLAGWPDKGPFDVILSAAAPDEVPAVLLEQLAIGGRLIMPVGNREQDLIVVYAGESGFETEVVEPVNFVPMLPGVER

SEQ ID NO: 143307 - DNA, 666 bp, Candidatus Desulfococcus oleovorans Hxd3
  CDS (1)..(666): transl_table=11
atggttatggaaaacgaagaaataagatatgtgcgccggcgcaaacagatggtggaaaaccagatcgcgcggcgcggcatcaacgacccttttgtgctgggcgccatgggcacggtgcccaggcacctgtttgtcagcgaggccctgatggaccaggcctacggcgattttccccttcccatcggtgagcagcagaccatctcccagccctatatcgtggcggaaatgacccaggcactggaacccaccggtaacgatcgggttctggagatcggcacgggatcgggatatcaggcggccatactctcccgcatcgtgtcccgcgtttataccgttgagcggatacactccctttacattcgggcaagggccctgtttgacaggctgggttactacaacatcgccacccggtactccgacggcaccaccgggtggaaggcggaaagcccttttgaccggattatcatcaccgccggtgccccggacattccttcggtgctggtggatcaactggctgtgggcgggcggctggtagcgccggtgggaaccgagtccgtgcagagcctgatcaagctggtcaaggaaaaaaccggggttcggtccaccgatctgggcgggtgccggtttgtcaagctaatcggcgaacatgggtggaaagaaaattag

SEQ ID NO: 143308 - protein, 221 aa, Candidatus Desulfococcus oleovorans Hxd3
MVMENEEIRYVRRRKQMVENQIARRGINDPFVLGAMGTVPRHLFVSEALMDQAYGDFPLPIGEQQTISQPYIVAEMTQALEPTGNDRVLEIGTGSGYQAAILSRIVSRVYTVERIHSLYIRARALFDRLGYYNIATRYSDGTTGWKAESPFDRIIITAGAPDIPSVLVDQLAVGGRLVAPVGTESVQSLIKLVKEKTGVRSTDLGGCRFVKLIGEHGWKEN

SEQ ID NO: 143309 - DNA, 657 bp, Marinobacter sp. ELB17
  CDS (1)..(657): transl_table=11
atgagtgcgcacatgcaaggaataggcatgacgtccaggcgcacccgcctgcgcctgatccagcgtctgaaagacaaaggcatttcgtcaccacaggtattagacgccatagccgaggttccacgccatatttttctcgatgaagctttggcgcacagggcctatgaagatactgctttgccgattggccacaaccagaccttgtcgcaaccctatattgttgcccgtatgaccgaattgctatacggccaccaaccgaagaaagtgttggaattgggcactggctctggctatcagaccgcggtgctgtgcaacttgtttgccgaggtgttcagcgttgaacgcataaaaccacttcaggaccgagcaagggagcgcctgcgcgatctaaagtgtcgcaacgctgtgctgcgccacgctgatggtggtatgggctggcccgaacgtggcccgtacgacggcattattgtaaccgccgcacccaccgaggtgcccgtcgagttgttgcaacagcttgcagacaacggtgttctgatctccccggtgggggctgaacgacaggtactggttcaaattgtgcgccgcggcgatcgttttgaacgcacggaattggaagctgtcaagtttgtgcctttgttgggcggcgtggtgcgctga

SEQ ID NO: 143310 - protein, 218 aa, Marinobacter sp. ELB17
MSAHMQGIGMTSRRTRLRLIQRLKDKGISSPQVLDAIAEVPRHIFLDEALAHRAYEDTALPIGHNQTLSQPYIVARMTELLYGHQPKKVLELGTGSGYQTAVLCNLFAEVFSVERIKPLQDRARERLRDLKCRNAVLRHADGGMGWPERGPYDGIIVTAAPTEVPVELLQQLADNGVLISPVGAERQVLVQIVRRGDRFERTELEAVKFVPLLGGVVR

SEQ ID NO: 143311 - DNA, 1968 bp, Erythrobacter sp. SD-21
  CDS (1)..(1968): transl_table=11
ttgagcggcgctgactatgccggccagcgcaagctgatggtccgcaaccagattgccgcgcgcggtattcgcgacgaagcgatcttgtccgccttggcagaagtcccgcgcgaaatcttcgtcgaccccgggatggaagaattcgcctatgaggataccgcgttacccatcccttcgggccagacgatcagccagcccttcatcgtcgcctgcatgatggatgcggcggaagtcgggacaggcgaccgcgtgctcgaagtcggggccggatcgggctatgccgcagccgtcctctcccgcattgccggtcatgtccatgcgatcgagcggcacgaggcgctggcaaggcaagcggcggcgcggatcgagcaactcggctacgacaattgcgagatcattgcgggcgatggtctgaacggactgccggacgaggctcccttcgacgcgattgtggtcgcggcgcggtttgacagcgtacccgagacgctcaagcgccagcttaaggtaggcgggcggctggtcattcctgtcggcgaggaggaagtccagcaactcaccgcgatcatgcgtactggagaggacgaatggaccagccaagccataacaccggtgcgctttgtcccgttgctcgacggggtggtggccgaagacgggtcgcgttcggccagcgatcatcgtagcatgcggaatgtgccgttgcccgaagcgatcgcaagggcgtgcgagccgcttcccgaaatcgacgacgaggatttcgccgccgcctttgaccggttctcggacaagcgcgtcgtcatgctgggcgaatgcagccacggcacgcacgagttctacgcggcgcgagcagctatcacgcagcggctggtcgaacgccacggatttacgatcgtcgcggtcgagggcgactggcccgatgccgccgcctatcaccgatttatcctcgggcaggatcagcccgaaggcgcgcaggcgcctttccggcgctttccgacttggatgtggcgcaacaccgtcatgccgtcattcctgcataagttgcgcgccataaacgcgaacttgccggagccgaggaaagccgggttccacggtctcgacatctataacatgtcggactcgatcgaggcgatcctgacctatctcgacgagaaagatccagaggcagcacaaaccgcgcgtgagcgttatggctgccttcatccttggcagtccgatccggccgtctatggccgggtggcgctgcgcaaggggttcgccgcatgcgaggaggcggtggtgcggcaatgccgtgacctgctagacgaggccctcgatagcgaaagtttttcggcggcgatgaacgcgcggctggtcgcctcggcggagcggtattaccgcgtcatgtactacggcggggccgatagctggaacctgcgtgacagccacatgaccgacacgctggaacatctgctcgatcaaggtgggtccgacagcaaggcgcttgtctgggcgcacaatagccatatcggcgaagcacgcgccacggatatgggcgcggtgcgcggcgagcacaatctcggccaacttgcgcgcgaacgctggggcgatgatgtcgcgctggttggtttcggcacgcatagcggcaccgtcagcgcggcgagtgactgggacggcaagcgcgaagtgaagtccgtcgtaccctcgcgccgcgatagctatgagcgcttgtgccacgatagcgggatggagcggttcctgctggaattcgcggccgatcccgcgctgtcggagcggctcgccgaaccgctcattgaacgcttcatcggtgtcatctaccgcccggagaccgagcgatggagccactacagtgaagccgtgctgccgcaccaattcgatgcctattgctggttcgacgagaccagcgcgctcgaaccactggaagagcatgaagatcacgagggcgcggcagacacctttcccttcgggctgtga

SEQ ID NO: 143312 - protein, 655 aa, Erythrobacter sp. SD-21
MSGADYAGQRKLMVRNQIAARGIRDEAILSALAEVPREIFVDPGMEEFAYEDTALPIPSGQTISQPFIVACMMDAAEVGTGDRVLEVGAGSGYAAAVLSRIAGHVHAIERHEALARQAAARIEQLGYDNCEIIAGDGLNGLPDEAPFDAIVVAARFDSVPETLKRQLKVGGRLVIPVGEEEVQQLTAIMRTGEDEWTSQAITPVRFVPLLDGVVAEDGSRSASDHRSMRNVPLPEAIARACEPLPEIDDEDFAAAFDRFSDKRVVMLGECSHGTHEFYAARAAITQRLVERHGFTIVAVEGDWPDAAAYHRFILGQDQPEGAQAPFRRFPTWMWRNTVMPSFLHKLRAINANLPEPRKAGFHGLDIYNMSDSIEAILTYLDEKDPEAAQTARERYGCLHPWQSDPAVYGRVALRKGFAACEEAVVRQCRDLLDEALDSESFSAAMNARLVASAERYYRVMYYGGADSWNLRDSHMTDTLEHLLDQGGSDSKALVWAHNSHIGEARATDMGAVRGEHNLGQLARERWGDDVALVGFGTHSGTVSAASDWDGKREVKSVVPSRRDSYERLCHDSGMERFLLEFAADPALSERLAEPLIERFIGVIYRPETERWSHYSEAVLPHQFDAYCWFDETSALEPLEEHEDHEGAADTFPFGL

SEQ ID NO: 143313 - DNA, 681 bp, unidentified eubacterium SCB49
  CDS (1)..(681): transl_table=11
atgggtttttattactttgtgaactccaaaaaccaccttttgaaagatacatttacacaccaaggattacgaaaaaaactagttgaaacccttcagaaaaaagggattatgaataaagaggtattgcttgccatcagtaaaataccgagacacctatttatggatagtagttttgtagcacatgcatatgcagataaagcatttcctattgcagcagaccagaccatctctcatccttataccgtagcacgacaaacagagctcttagatgtgaaaaaaggaggtaaagtactagaaataggaacaggaagtgggtatcaaaccgcagttttacttgagcttggattaaaagtgtatagtatagaacgacaaaatgaattgtttaaaaaaaccaaattgtttttaccaaaaataggataccgtgctaaacaactaatatttggtgatggttatattggttataaatcagaagctccttatgatggtattgttgttacagcaggcgctccttttgtgccaaaacctttgttagcacaactaaaagtaggagcaaggttagtgatccctgtaggtgatgcgtctcaaattatgactgtttttacacgaacttctgaaactgaatttgagaaagaaacttttggagaattcaaatttgtacctttattggaagataaaaattga

SEQ ID NO: 143314 - protein, 226 aa, unidentified eubacterium SCB49
MGFYYFVNSKNHLLKDTFTHQGLRKKLVETLQKKGIMNKEVLLAISKIPRHLFMDSSFVAHAYADKAFPIAADQTISHPYTVARQTELLDVKKGGKVLEIGTGSGYQTAVLLELGLKVYSIERQNELFKKTKLFLPKIGYRAKQLIFGDGYIGYKSEAPYDGIVVTAGAPFVPKPLLAQLKVGARLVIPVGDASQIMTVFTRTSETEFEKETFGEFKFVPLLEDKN

SEQ ID NO: 143315 - DNA, 642 bp, Moritella sp. PE36
  CDS (1)..(642): transl_table=11
atgatccaacttggtaatacaggtgtagcagggcagcgtataaaagcgttgcttgaacaacaaggcattagtgcaccaagtgtattgactgccatacaagatacgcctcgtgactatttcgttgaggaagcgtttgcattgcaggcatggggcaatcaggccttgccaattggggctgggcagaccatctctcagccttatattgttgccagaatgactgaactgttaatgaaaaacaatccacaacgggtgctggaaattggcacgggttcgggttatcaaacggctattttagcgcaggtttttccgcgtgtttattcggttgaacggatccaagcattacagtggcaagcgaaacgtaggttaaagaatcttgacctgcacaacgtcatgatgaaatacggcgatggttggcaaggttggtcaagtaaggggccgtttgatgcgattatagtgactgctgcacccgctgcagtaccacaagcattattaacgcagttaacggatggtgggcaacttattctgccattgggtgtcgaatctcaagtattacaaattattactcgtaatggcgataactataccagtcagaatgttgaaagtgtacgctttgtgccgttggttcaaggcgaattagcgtga

SEQ ID NO: 143316 - protein, 213 aa, Moritella sp. PE36
MIQLGNTGVAGQRIKALLEQQGISAPSVLTAIQDTPRDYFVEEAFALQAWGNQALPIGAGQTISQPYIVARMTELLMKNNPQRVLEIGTGSGYQTAILAQVFPRVYSVERIQALQWQAKRRLKNLDLHNVMMKYGDGWQGWSSKGPFDAIIVTAAPAAVPQALLTQLTDGGQLILPLGVESQVLQIITRNGDNYTSQNVESVRFVPLVQGELA

SEQ ID NO: 143317 - DNA, 759 bp, Ostreococcus tauri
  CDS (1)..(759)
atgctgactcgccccgcgtcgtctcgcgcgttcacccgccgagccctcatctccgcctccgcgatggcctggcgctcgcacggcgtggataaccaagacctcgttcgcgccttgaccgcgaacgccatcgtccgccataaacgcgtcaaggaggccatgttactcgtcgaccgaggtcgttacgttcccaagaatgaaatgcaatccgcgtacgaagaccgcccgctcgcgatcgggcacggcgcgacgatatccgcgccgcacatgcacgcggcgtgtttggaactcctggagacgcgcgtgcgagcgggctcgcgggtgctggacgtcggaagtgggaccgggtatctcagcgcgtgcttggcgtcgatggcgagcgaacgaggcgaagtggtcggcgtcgaacacatagaggagttagtcgagacgtcgatcgagaacgtgcgagcggatggaaagagtgcgtggttggcgaacgggcggttgacgttgcgatgtggagacgggcggttggggtatccggagaaggcgccgtacgacgcgattcacgtcggcgcggcttcgagggaggttccgagggcgctgatcgatcagttggcgatcggtggacggttggtgataccggtcggggatgagggtgggcaggcgctcatggtgatcgataagctcgaggacggcagtctgatgaagaagatggagatgggggtcgtgtacgtaccgctcacagatcgcgagagccaactcaagcgctggttttga

SEQ ID NO: 143318 - protein, 252 aa, Ostreococcus tauri
MLTRPASSRAFTRRALISASAMAWRSHGVDNQDLVRALTANAIVRHKRVKEAMLLVDRGRYVPKNEMQSAYEDRPLAIGHGATISAPHMHAACLELLETRVRAGSRVLDVGSGTGYLSACLASMASERGEVVGVEHIEELVETSIENVRADGKSAWLANGRLTLRCGDGRLGYPEKAPYDAIHVGAASREVPRALIDQLAIGGRLVIPVGDEGGQALMVIDKLEDGSLMKKMEMGVVYVPLTDRESQLKRWF

SEQ ID NO: 143319 - DNA, 666 bp, Chromatium vinosum
  CDS (1)..(666): transl_table=11
atggacaacagcagtgagttggcccgcttcaacatgatccagcagcagatccggccctggggcgtgctcgacgaccgggtgctggaggtgatgggcacggtcgagcgcgagcgcttcgtgccggatgcctatcgggcgctggcctatgccgacatcgagatccccaacggcaacggcaccctcatgcttgcgcccaaggtggtcggtcatctgttgcaggcgctcgccgtccagccgggcgatcgggcgctggagatcggcacggggtcgggctatgtcgccgcctgtctgagccggctcggggcgcgcgtgatcagtctggagatcgacccgatgcaggcggccgaggcggtcgagcggctcgaagcgctcaagttcgactgggtcgaggttcgcgagggtgatggtctggccggacccgtgagcggggcgccattcgacgcgatcgccgtcaagggctcgatgccgaccgaggacgcgctgccgatgctgcgcgagcagctgaccatcggcggacggctgttctgcatcctgggcacggcacccgcgatggagtgtgtgtgcgtgacccgcgtcgggcgccacgactatcggcgcgagtcgctgttcgaggtcgaggtggcgccgctgcgcaatgcgcccgagccggctggtttcgaattctag

SEQ ID NO: 143320 - protein, 221 aa, Chromatium vinosum
MDNSSELARFNMIQQQIRPWGVLDDRVLEVMGTVERERFVPDAYRALAYADIEIPNGNGTLMLAPKVVGHLLQALAVQPGDRALEIGTGSGYVAACLSRLGARVISLEIDPMQAAEAVERLEALKFDWVEVREGDGLAGPVSGAPFDAIAVKGSMPTEDALPMLREQLTIGGRLFCILGTAPAMECVCVTRVGRHDYRRESLFEVEVAPLRNAPEPAGFEF

SEQ ID NO: 143321 - DNA, 750 bp, Vitis pseudoreticulata
  CDS (1)..(750)
atggagcgattcttttctggaagtgggatcaataagaataaagcaatggtggagcacttgcagcgctatggagtgattaattcgaaaaaggtagctcaagtaatggagactgttgacagagcattgtttgtgcctgatgggaacccgccttatgtcgacagccccatgcagataggttacaatgccactatttcggcacctcatatgcatgccacatgcctcgagctgttgcaggaaaatttgcagcctggaatgcatgctctagatgttggttctggaacggggtatttgacagcctgctttgcactgatggttggaccacaaggttgtgcagttggagtagaacacatacctgagttggttgcttcttcaatcaagaatatcgaaaagagtgcagcggctccgttattaaaagaaggttctctcaaactgcatgccggtgatggaaggctaggttggcctgagtgtgcaccatatgatgcaattcacgtcggagccgcagcacctgagataccacagccacttattgatcagttgaagcccggaggtagaatggtcattcctgttgggaacatattccaggatttgaaggtagtggaacaagaacctggacggctccatcagtatccgcagcgagacttctgtccgctatgttccactgacaagtcgggaggctcagttgcgcaattattgagccttcacggccttaacttgaaaacgtgctctgggcacatagtgctcatgctatag

SEQ ID NO: 143322 - protein, 249 aa, Vitis pseudoreticulata
MERFFSGSGINKNKAMVEHLQRYGVINSKKVAQVMETVDRALFVPDGNPPYVDSPMQIGYNATISAPHMHATCLELLQENLQPGMHALDVGSGTGYLTACFALMVGPQGCAVGVEHIPELVASSIKNIEKSAAAPLLKEGSLKLHAGDGRLGWPECAPYDAIHVGAAAPEIPQPLIDQLKPGGRMVIPVGNIFQDLKVVEQEPGRLHQYPQRDFCPLCSTDKSGGSVAQLLSLHGLNLKTCSGHIVLML

SEQ ID NO: 143323 - DNA, 720 bp, Aspergillus oryzae
  CDS (1)..(720)
atggcatggtattgctctggctcaaccaatgcagaattggttgataatctcttcaaggcgggattggtgaagaatgaaagagttaaaaacgctatgttgggggttgaccgagcccattatgcaccttcgaggccttactcagattccccacaacctatcgggtatggtgcgacaatctccgctcctcacatgcacgttcatgcatgcgagtacctcatcgatttcctcaggccgggttcacgggtactcgatattggctcgggttctggatatctgacccatgtcctcgcaaaccttgttacagatccctccatacctgatgaattggatggccatgttattggaattgaccatataccagaacttgttgacttggctaacaagaatatgcataagtcggaccaagggtgcaaattgttagatacaggaaaggtgaagtttattactgctgacggccgtttgggatggccagagggagcaccgtatgatgctatccacgttggtgcagcagcagaaaagcttcacccggtactaatcgcgcaactccatgcccctggccgaatgtttatccccgttgacacggagtgtgacgggagtcctcatggatttggcggcggccaatatatttgggtagtggacaagagggaggacgggtcagtccacaaagaaaaggtgttccaggttagctacgttccgctgaccgacccgccaaagaagtaa

SEQ ID NO: 143324 - protein, 239 aa, Aspergillus oryzae
MAWYCSGSTNAELVDNLFKAGLVKNERVKNAMLGVDRAHYAPSRPYSDSPQPIGYGATISAPHMHVHACEYLIDFLRPGSRVLDIGSGSGYLTHVLANLVTDPSIPDELDGHVIGIDHIPELVDLANKNMHKSDQGCKLLDTGKVKFITADGRLGWPEGAPYDAIHVGAAAEKLHPVLIAQLHAPGRMFIPVDTECDGSPHGFGGGQYIWVVDKREDGSVHKEKVFQVSYVPLTDPPKK

SEQ ID NO: 143325 - DNA, 1962 bp, Rhizobium sp
  CDS (1)..(1962): transl_table=11
atgctcgactacgcccatgcccggcaccagatggctgaacggcagctcgttcggcgcggcataactgacgcacgcgtgcttgcggcgatgagggccgtgccgcgggaggcttttgtggaagacggcttccaggaattcgcctacgaggattccgctttgccgatcgccgcaggtcaaacgatctcgcagccctacatcgtcgcccgcatggccgaggctgccgaaatcgagcccgacgacagcgtcctcgaggtcggggccggatcgggttatgccgcggccgtactcagccatctcgccgagcgtgtctttgccatcgagcgacaccgcacgcttgccgagacggcgtcggcacggcttttgaagctccggcggagcaacgtagacgtccgtgcaagtgatgggaccaagggatggccggagcgagccccattcgatgccatacttgtcgccgctggcgggcccgtagtcccgcgagcattaaaggagcagctggagattggcggccggctgatcattccagtgggtcgccaagagcaggcacaacggctactccgcatcacccggaccgccgccaatcgctacgaggaggaggatctcggcggcgttctttttgtacctttgatcggcgaaggaggatggagcgaatctagcgagccagacgcacacgcacgaaggcgtgtgccggatttggttgcagaggccgcagatgatctgccactggtcacagacccaggctttgccgacccgttcgagcggtttgcccgtcatcgtatcgttctgctgggtgaagcaacccatgggacatcggagttttaccaggcgcgcgccgtcattacccaacgcctcatagagcggcacggttttgccatcgtcgctgtcgaggcggactggcccgatgccgccgcggtcaacgccgtcgtgcgcacgcgggaagcagcgagtggggagccaccatttcagcgctttcccgcgtggatgtggcgaaatgccgaattcgcggcgttcgtctcctggctgaagactcacaacggaacacagtcgacgcagcggcaggccggcttttacgggctcgatctctacaacatgcggggctcgatcgcggccgtcctctcctatctcgacgagtccgaccgcgaggccgcgaccgtggcacgcgaacgctatggttgtctcactccatggcagaacgagcctggcacctacggccgcgctgtattgacctctggctaccgcagatgcgaggacgcggtcatccgccaatgccaggagctactagcgcgtgctctcgatacggcaggagacgatgcggtgttcgatgcggcgcaaaatgcccgcctcatagcaacggcggaaaagtactaccgcatcatgtattatggcggtgcggacgcctggaacttgcgcgaccggcacatgttcgagacgcttgaccacctcctcgaacgagccgacccgacgtccaaagcaatcgtctgggcgcacaattctcacataggggatgcccgccacaccgacatgggcaagctgcgaggggaactcaatctcggccagctctgccgggagaagtacggagacgaggtcgctcttgtcggctttggcacccacaggggaacggttgccgcagcgagcgaatgggacggccaaatggagatcaaggccgtacgcccttcacttgaggagaccgttgagcgatgttgccacctctccgggaaggaacgatttttactcgatttcgtccgcaaacccgatgtggcacagagcctttcgagcgagcggctggaacgcttcatcggcgtcatctaccgcccagagagtgaactccttagccactacgcccgcgccgagctttcgaagcagttcgatgcatacgtgtggttcgacgaaacgcgggccgtgtcgccgctgcccgtcacagcagggtccgggcacgtgccggacacttttcctttcgggctttga

SEQ ID NO: 143326 - protein, 653 aa, Rhizobium sp
MLDYAHARHQMAERQLVRRGITDARVLAAMRAVPREAFVEDGFQEFAYEDSALPIAAGQTISQPYIVARMAEAAEIEPDDSVLEVGAGSGYAAAVLSHLAERVFAIERHRTLAETASARLLKLRRSNVDVRASDGTKGWPERAPFDAILVAAGGPVVPRALKEQLEIGGRLIIPVGRQEQAQRLLRITRTAANRYEEEDLGGVLFVPLIGEGGWSESSEPDAHARRRVPDLVAEAADDLPLVTDPGFADPFERFARHRIVLLGEATHGTSEFYQARAVITQRLIERHGFAIVAVEADWPDAAAVNAVVRTREAASGEPPFQRFPAWMWRNAEFAAFVSWLKTHNGTQSTQRQAGFYGLDLYNMRGSIAAVLSYLDESDREAATVARERYGCLTPWQNEPGTYGRAVLTSGYRRCEDAVIRQCQELLARALDTAGDDAVFDAAQNARLIATAEKYYRIMYYGGADAWNLRDRHMFETLDHLLERADPTSKAIVWAHNSHIGDARHTDMGKLRGELNLGQLCREKYGDEVALVGFGTHRGTVAAASEWDGQMEIKAVRPSLEETVERCCHLSGKERFLLDFVRKPDVAQSLSSERLERFIGVIYRPESELLSHYARAELSKQFDAYVWFDETRAVSPLPVTAGSGHVPDTFPFGL

SEQ ID NO: 143327 - DNA, 693 bp, Oryza sativa subsp
  CDS (1)..(693)
atggcgcaattctggactcaaggatcactggacaagaacaaagctcttgtcgaatacctgaagcaatatggtgctgttagaactgataaagtggctgaagtaatggaaagcattgacagagcattgttcgtagcagagggccttactccttacactgacagccctatgcctattggttataacgcgacgatatctgctcctcacatgcatgcgacctgcttggagctactgaaggatcacttgcagccaggaatgcatgctctagatgttggatcaggcagcggttacttgacagcttgttttgcaatgatggttggaccagaaggccgtgcagtggggatagaacatattcctgagcttgtcgctgcttcgactgagaatgtccaaagaagtgccgcagcacaattactgaaggatggatctctttctttccatgttgcagatggcaggcttggttggcctgacgatgcaccatacgacgccattcatgtgggcgccgcggcaccggagattcctcagcctctggtcgatcagctgaagaccggcggccggatggtcatacccgtcggcagctacttccaggagctgcaggtggtcgacaagaacgccgacggctcggtgaccgtccagaacgacgcgtccgtccgctacgtccctctgaccagccgctccgctcagctgcaggattcctaa

SEQ ID NO: 143328 - protein, 230 aa, Oryza sativa subsp
MAQFWTQGSLDKNKALVEYLKQYGAVRTDKVAEVMESIDRALFVAEGLTPYTDSPMPIGYNATISAPHMHATCLELLKDHLQPGMHALDVGSGSGYLTACFAMMVGPEGRAVGIEHIPELVAASTENVQRSAAAQLLKDGSLSFHVADGRLGWPDDAPYDAIHVGAAAPEIPQPLVDQLKTGGRMVIPVGSYFQELQVVDKNADGSVTVQNDASVRYVPLTSRSAQLQDS

SEQ ID NO: 143329 - DNA, 684 bp, Arabidopsis thaliana
  CDS (1)..(684)
atggagagtggaactggctcgagcggcaagagagggatggtggaaaatttgaagcggtacggtgtgatatcgtcgaaaagagtagctcaagttatggaggctttagatagaggtctctttgtaccagttggttcttcagcttatgttgatactcctgtacctataggttataatgctaccatttctgctccgcatatgcatgctacttgcttgcagctcttggaagataagctccaccccgggatgcgcgctttagatgtcggctcaggaaccgggtacttgactggctgttttgctttgatggttggagctgagggacgtgttgttggcgtggatcatatccctgaattggttgatatgtctatcaagaatatcgaaaagagtgttgctgcttcctttcttaagaaaggatctctctccttacatgttggggatggaagaaaaggttggcaagagtttgcaccgtatgatgcaatacacgtaggagcagcggcatcagaaatccctcagccccttttggatcagctaaaacccggtggacgaatggtgattccactaggaacctattttcaagagctcaaggtaatcgacaaaaacgaggatggttcaatcaaggtacataccgaaacttcagtccggtatgtgcccctcactagccgtgtcgaacagttaggaggattttga

SEQ ID NO: 143330 - protein, 227 aa, Arabidopsis thaliana
MESGTGSSGKRGMVENLKRYGVISSKRVAQVMEALDRGLFVPVGSSAYVDTPVPIGYNATISAPHMHATCLQLLEDKLHPGMRALDVGSGTGYLTGCFALMVGAEGRVVGVDHIPELVDMSIKNIEKSVAASFLKKGSLSLHVGDGRKGWQEFAPYDAIHVGAAASEIPQPLLDQLKPGGRMVIPLGTYFQELKVIDKNEDGSIKVHTETSVRYVPLTSRVEQLGGF

SEQ ID NO: 143331 - DNA, 813 bp, Rhodocyclus gelatinosus
  CDS (1)..(813): transl_table=11
atgagcggtaagccgccgcggttcccgctcgggctgcagcacgtgcagccgcgctcgccggcgcgcccggccaccgacgtcctgcgcccgcagcggccgctgcacgaagccgcacgcgacgccgcgcgccgcgtcgcgcccagcggcctggggctggactcgcccgcggtgcgcgagcgcatggtcgcccggctgcacgccgacggcctgcgctgcgagccggtgctgcgcgccttcgccgcggtgccgcgccaccatttcgtcgacagcgcgctggcgacccaggcctacgaggacaccagcctgccgatcggtctcggccagacgatctccaagccctcggtcgtcggccgcatgctggcgctgctgttcggcggcgaacgtgccgcggctgccggccacctcggccgcgtgctcgagatcggcaccggctgcggctaccaggcggcgctgctggcgcagatctccaagcgcgtcgtctcgatcgaacggctcaagccgctgcacgacaaggcgcgcgacaacctggccgcgtcgcgccatcccggcgacctgcgcctgctctatggcgacggacgcctgggccatgcgccgctggcgccgtacgacagcatcgtcgccgccgccggcggcgaagacatcccgcaagcctggctggaccagctcgccgaaggcgggcgcctggtcgcgccgatgcacgacccggccgccggcgggcaggtgctcgtcgtcatcgaccggcgtcccgaaggcctgcgccgtcaggttcacgatgccgtccatttcgtccccctaaaatccggcacggcatga

SEQ ID NO: 143332 - protein, 270 aa, Rhodocyclus gelatinosus
MSGKPPRFPLGLQHVQPRSPARPATDVLRPQRPLHEAARDAARRVAPSGLGLDSPAVRERMVARLHADGLRCEPVLRAFAAVPRHHFVDSALATQAYEDTSLPIGLGQTISKPSVVGRMLALLFGGERAAAAGHLGRVLEIGTGCGYQAALLAQISKRVVSIERLKPLHDKARDNLAASRHPGDLRLLYGDGRLGHAPLAPYDSIVAAAGGEDIPQAWLDQLAEGGRLVAPMHDPAAGGQVLVVIDRRPEGLRRQVHDAVHFVPLKSGTA

SEQ ID NO: 143333 - DNA, 756 bp, Methanosarcina acetivorans
  CDS (1)..(756): transl_table=11
ttgccagaaagaaaagagaagggtcaggtcagcgtgggagcagcagaggaccgtggtaaaaaaggccacagcgaaaaaaaggacaaaagaaaacaggaagaaaaccaggaagaactgcatcaactcgaagagatgcgagagcgtctcataagaagaattggaatccacggagcggatgaaaaagtcctcaaagccatgctcagggtccccaggcatttatttgtcccggaatacgcgaaaaaaggggcttatattgatacaccccttgagatcggcttcgggcaaactatctctgcccctcatatggttgctatcatgtgtgatctccttgagctttcggaagggctaaaagtcctggaaattggggcagggtcaggttataacgcagcagtaatgggggagttggtaggaaaaagcgggcatgtttatactgttgaacgcatcgagccccttgtggattttgccagggagaacctgaaaaaagcgggctatgaaaacgttacagtgctgcttgatgacgggtccatgggctactccaaatgtgctccctatgacaggatagttgtaacatgcgcagctcccgatattcccgagcctctgctggagcagttgaaacccggaggaataatgataattcccgtgggggactatatccaggaactggtcagaattaagaaagatcctgaaggcaagatacacgaagaaaaaagagggggagttgttttcgtacctttgataggcaaatacgggttttaa

SEQ ID NO: 143334 - protein, 251 aa, Methanosarcina acetivorans
MPERKEKGQVSVGAAEDRGKKGHSEKKDKRKQEENQEELHQLEEMRERLIRRIGIHGADEKVLKAMLRVPRHLFVPEYAKKGAYIDTPLEIGFGQTISAPHMVAIMCDLLELSEGLKVLEIGAGSGYNAAVMGELVGKSGHVYTVERIEPLVDFARENLKKAGYENVTVLLDDGSMGYSKCAPYDRIVVTCAAPDIPEPLLEQLKPGGIMIIPVGDYIQELVRIKKDPEGKIHEEKRGGVVFVPLIGKYGF

SEQ ID NO: 143335 - DNA, 660 bp, Archaeoglobus fulgidus
  CDS (1)..(660): transl_table=11
atggactacgatgagaaaagagagaggctggcagagagattgaggcaggagcttaacctgagcaggaaagtttacgaggcgataagaaaggtgcccagacacctttttgtgcccgagagctacaaaaatgaagcttacgttgacacacccctcccaataggctacggccagacgataagcgcaccccacatggtcgcgatcatgtgcgagcttctcgatttgagggagggggataaggtcctcgaggtgggcacgggttgcggatatcacgccgctgtgactgcagaaattgtcgggaagagcgggaaggtgatatccatcgagtacattcctgaactggcggagagggctagggcgattctgaaggcgcttgggtacgacaatgttgaggtgatagtcggcgacgggagcaagggctacgagaaagaggctccttacgacaaaatctacgtcaccgctgcggcgcctgacatccccaagccgctgatagagcagctaaagcccagaggcaggatggtcattcctgtaggtgactccgtgcagtggctgataatcgtggaaaaggatgagagcggcaatgtaaggaagaagaactggggttctgtgcgatttgtgcccctaaggggcgagtacggcttcaaaagtgtgaggtatgattaa

SEQ ID NO: 143336 - protein, 219 aa, Archaeoglobus fulgidus
MDYDEKRERLAERLRQELNLSRKVYEAIRKVPRHLFVPESYKNEAYVDTPLPIGYGQTISAPHMVAIMCELLDLREGDKVLEVGTGCGYHAAVTAEIVGKSGKVISIEYIPELAERARAILKALGYDNVEVIVGDGSKGYEKEAPYDKIYVTAAAPDIPKPLIEQLKPRGRMVIPVGDSVQWLIIVEKDESGNVRKKNWGSVRFVPLRGEYGFKSVRYD

SEQ ID NO: 143337 - DNA, 783 bp, Aeropyrum pernix
  CDS (1)..(783): transl_table=11
ttgaaaagcccggtggcaggggctgttttagacccctccacaccccctcctacaaccgggacgtcttggaggtggcctgggttaagggatgccgatccctacagggaggctaggctcaggatggtggagcagcttaggaggagcgggctggtgaccagcaggagggtgctcgaggccatggccagggttccccgccacctcttcgtgcccccggagtacagggggatggcgtatgaggacaggcccctccccataggccacggccagacgataagcgcccccggggtggtggggaggatgctccagctcctcgacccccagcccggggagaaggtcctagacgtgggggcgggcagcggctaccagtccgccctcctcgcagagctcgtaacccccgggggcagggtctacgcggtggagaggatacccgagctggccgagtacgccagggagaacctggagaagacgggctaccggggggtggtggaggttgtcgtgggggacgggagcaaaggcctcccacaacacgccccataccacaggataaaagtggccgccgcagcacccaaaccccccaaacccctggtggaacagctagcccccggcgggagaatggtcatacccataggaacaccagatctccaaatcctaacaatcatagagaaaacccccgacggcagagtgagggagaggagggacatagaggtcctcttcgtacccctaataggggaacacggatacagagaagactggcggaaacaatactggcaatggtggcgatga

SEQ ID NO: 143338 - protein, 260 aa, Aeropyrum pernix
MKSPVAGAVLDPSTPPPTTGTSWRWPGLRDADPYREARLRMVEQLRRSGLVTSRRVLEAMARVPRHLFVPPEYRGMAYEDRPLPIGHGQTISAPGVVGRMLQLLDPQPGEKVLDVGAGSGYQSALLAELVTPGGRVYAVERIPELAEYARENLEKTGYRGVVEVVVGDGSKGLPQHAPYHRIKVAAAAPKPPKPLVEQLAPGGRMVIPIGTPDLQILTIIEKTPDGRVRERRDIEVLFVPLIGEHGYREDWRKQYWQWWR

SEQ ID NO: 143339 - DNA, 693 bp, Arabidopsis thaliana
  CDS (1)..(693)
atgaagcaattctggagtccaagtagtatcaacaagaacaaagctatggttgagaatctgcaaaatcatggtatagttacttcagatgaagttgctaaagctatggaggctgtggatagaggcgtatttgtaacagatcgttcctctgcttatgttgatagtcccatgtctattggttataatgtgactatatcagctcctcatatgcatgcaatgtgtcttcaacttcttgaaaaacatttgaaaccgggaatgcgtgtacttgatgttggctcggggaccgggtacttaactgcttgctttgcggttatggttggaaccgaagggcgtgctattggtgtggaacatattcctgaattggtggcttcttctgttaagaatattgaagcgagtgctgcttcgccatttctgaaagaaaggtctcttgctgttcatgttggtgatgggaggcaaggatgggctgagtttgctccgtatgatgctattcacgtcggagcagcagcaccggagatcccagaggcgttgattgatcagttgaagcccggtgggagactggtgattccggttgggaacatattccaagatctgcaagtggtggataagaactcagatggttctgttagcatcaaggatgaaacttcagttcgttatgttcctttgactagccgtgaagcccagctgagaggggactga

SEQ ID NO: 143340 - protein, 230 aa, Arabidopsis thaliana
MKQFWSPSSINKNKAMVENLQNHGIVTSDEVAKAMEAVDRGVFVTDRSSAYVDSPMSIGYNVTISAPHMHAMCLQLLEKHLKPGMRVLDVGSGTGYLTACFAVMVGTEGRAIGVEHIPELVASSVKNIEASAASPFLKERSLAVHVGDGRQGWAEFAPYDAIHVGAAAPEIPEALIDQLKPGGRLVIPVGNIFQDLQVVDKNSDGSVSIKDETSVRYVPLTSREAQLRGD

SEQ ID NO: 143341 - DNA, 681 bp, Drosophila melanogaster
  CDS (1)..(681)
atggcgtggcgatccgtgggagccaataatgaagacctgattcgccaactgaaggatcacggcgtcattgcaagtgatgcggtggcccaggcgatgaaggaaaccgaccgcaagcactactctccgcgcaacccctacatggacgccccgcaacccattggaggaggtgtcaccatcagtgctcctcacatgcatgccttcgccttggagtatctacgcgaccacttgaagcccggtgcacgtatactggatgtgggctctggatctggctacctcacagcctgcttctatcgttacatcaaggctaagggcgttgatgcggacacccgaatcgtgggcatagagcaccaggcagagctggtgcggcggagcaaggccaacttaaacaccgacgaccgtagcatgctggactccggccagttgctgatcgtcgagggtgacggccgcaagggataccccccgaacgccccgtataatgcaatccatgtaggagcagctgctcccgacacacccaccgaactcatcaaccaactggccagcggcggacgcctgatagttccagtcggtcccgacggcgggtctcagtacatgcaacagtacgacaaggacgccaatgggaaggtggagatgacacgtctcatgggcgtaatgtacgtccctctcacggatcttcgctcctga

SEQ ID NO: 143342 - protein, 226 aa, Drosophila melanogaster
MAWRSVGANNEDLIRQLKDHGVIASDAVAQAMKETDRKHYSPRNPYMDAPQPIGGGVTISAPHMHAFALEYLRDHLKPGARILDVGSGSGYLTACFYRYIKAKGVDADTRIVGIEHQAELVRRSKANLNTDDRSMLDSGQLLIVEGDGRKGYPPNAPYNAIHVGAAAPDTPTELINQLASGGRLIVPVGPDGGSQYMQQYDKDANGKVEMTRLMGVMYVPLTDLRS

SEQ ID NO: 143343 - DNA, 627 bp, Escherichia coli O157
  CDS (1)..(627): transl_table=11
atggtaagcagacgcgtacaagcacttctggatcaattacgtgcgcaaggtattcaggatgagcaggtgctgaatgcacttgccgccgtgccgcgtgaaaaattcgttgatgaagcgtttgaacaaaaagcctgggacaatatcgccttgccgataggtcaggggcagacgatttcgcagccgtatatggtggcgcgaatgaccgaattactcgagctgacgccgcagtcgcgggtgctggaaattggcaccggttcgggatatcaaacggcaatcctggcgcatcttgtccagcatgtttgctcggttgaacggattaaaggcttgcagtggcaggcgcgtcgccgcctgaaaaatcttgatttacataatgtttcaacccgtcatggcgatggatggcaaggttggcaggcacgtgcgccgtttgacgctatcattgttacggcggcaccgccggaaattccaactgcgctaatgacgcagctggacgaaggcgggattctcgtcttacccgtaggggaggagcaccagtatttgaaacgggtgcgtcgtcggggaggcgaatttattatcgataccgtggaggccgtgcgctttgtccctttagtgaagggtgagctggcttaa

SEQ ID NO: 143344 - protein, 208 aa, Escherichia coli O157
MVSRRVQALLDQLRAQGIQDEQVLNALAAVPREKFVDEAFEQKAWDNIALPIGQGQTISQPYMVARMTELLELTPQSRVLEIGTGSGYQTAILAHLVQHVCSVERIKGLQWQARRRLKNLDLHNVSTRHGDGWQGWQARAPFDAIIVTAAPPEIPTALMTQLDEGGILVLPVGEEHQYLKRVRRRGGEFIIDTVEAVRFVPLVKGELA

SEQ ID NO: 143345 - DNA, 627 bp, Erwinia carotovora subsp
  CDS (1)..(627): transl_table=11
atggtaaacaaacgtatagaaacgttgttggcgcagttgcgccagcagggcattgaggacgaacgtctgcttacggcgatagaagccgtacccagagaacgttttgttgacgaagctttcgagcataaagcgtatgaaaacaccgctctgcctatcggttccggtcagactatctcgcaaccctatatggtcgcgaagatgacggaactgcttaacttgacacccgaatcccgcgtgttggagattggtaccggttcaggttatcaaacggcgattttagcgcatttggtgcagcacgtttgctcggttgaacgcatcaaagggctgcaatggcaggctaaacgtcgcttaaagcagcttgatttgcacaatgtttctacccgccatggcgatgggtggcagggctgggcgtcgcgtgggccatttgatgccattatcgttacggcggcaccgccggaaattcctcaggcgctgctggaacagcttgatgagggcggagtgatggtgttgcccgtcggggaacagtcgcaaatactgcaggtcgttcagcgccatgctggtgaatttattattaaaacggttgaagcagttcggtttgttcctctggtcaaaggggaattagcctga

SEQ ID NO: 143346 - protein, 208 aa, Erwinia carotovora subsp
MVNKRIETLLAQLRQQGIEDERLLTAIEAVPRERFVDEAFEHKAYENTALPIGSGQTISQPYMVAKMTELLNLTPESRVLEIGTGSGYQTAILAHLVQHVCSVERIKGLQWQAKRRLKQLDLHNVSTRHGDGWQGWASRGPFDAIIVTAAPPEIPQALLEQLDEGGVMVLPVGEQSQILQVVQRHAGEFIIKTVEAVRFVPLVKGELA

SEQ ID NO: 143347 - DNA, 681 bp, Methanopyrus kandleri; identical to SEQ ID NO: 143125
  CDS (1)..(681): transl_table=11

SEQ ID NO: 143348 - protein, 226 aa, Methanopyrus kandleri
MAEDDKVFRRARERLVERLKSLGYIRSNRVAEAMLKVPRHEFVPEDLRDRAYVDSPLPIGRGQTISAPHMVAIMTELLDPRPGHKVLEVGAGSGYHAAVVAELVKPDGRVITVERIPELADFARNNLKKTGYDRFVKVLVGDGTKGYPPEAPYDRILVTAGAPDVPESLLEQLKPGGKMVIPVGDRHMQELWLVEKTEDGEIRRRRHGGCAFVPLIGEEGFQEPES

SEQ ID NO: 143349 - DNA, 654 bp, Methanobacterium thermoautotrophicum
  CDS (1)..(654): transl_table=11
atgatggatgagagaaggagaatggttcaggacctcatggagaggggatacataaaatctgaggccgtcaggagggccatggagagggtgcccagggaggagtttgtccctgaggatgagatgcacagggcctacatggacatgccgctccccataggtgagggtcagaccatatcggcaccccacatggttgccatgatagctgagatccttgacctggaacccgggatgaaggtccttgagataggtaccggctgcggctacaatgcagctgttatagctgaaatcataggacccgagggacacctctacaccgttgaaaggataggaatcctctatgaaagggcccgcaaaaaactcagaagcctcggatacgataacataacggtcatacacggcgatggcagccagggattcgctgatgaggcaccctacagcaggatatacgtgactgcagcggcaccatacatcccggatcccctcatgaagcagctggagatagggggaaaacttttaatacctgtgggttctgataaattctatcaggaactggttctgattgagaggacctccgccgacgactacaggtccagaaatctcggcggggttgccttcgtcccgctgatagggaaacatggatggaaattccactga

SEQ ID NO: 143350 - protein, 217 aa, Methanobacterium thermoautotrophicum
MMDERRRMVQDLMERGYIKSEAVRRAMERVPREEFVPEDEMHRAYMDMPLPIGEGQTISAPHMVAMIAEILDLEPGMKVLEIGTGCGYNAAVIAEIIGPEGHLYTVERIGILYERARKKLRSLGYDNITVIHGDGSQGFADEAPYSRIYVTAAAPYIPDPLMKQLEIGGKLLIPVGSDKFYQELVLIERTSADDYRSRNLGGVAFVPLIGKHGWKFH

SEQ ID NO: 143351 - DNA, 633 bp, Protochlamydia amoebophila
  CDS (1)..(633): transl_table=11
atggtggagaaacaaatagccgcgagaggaatacaagatcctcgagtattagaggcaatgggaaaagtgccgcgcgagaggtttgtgagtgagcacattgctccactcgcgtatgaagaccgacctttatccattgatgaggggcaaacgatttcacagcctttcattgttgcagtcatggctcagcaggcccaaataactccccaggataaggtgttagagattggtaccggctcaggctattctgctgccattctaagtcaactggcctctcatgtctattctatggagcggtatccaaagcttgcagagctggcaaaaaaacggctgcaagagtttggctataataatgtgacagtatcagttggggatggaagtctaggatgggaagagtttgctccttatgaggttattattgtgacggcaggcgggcctcaaattcctccttctcttttgaaacagctagccataagcggccgtttggtgattcctgtgggacctagtttggagagccagcaattaatgcgtgttatgcgagaggatgctgatcattatcgctacgagaacttaggatctgtacaatttgtaccgctcgttggaaaagaagggtggcaaactacaagctcgtcataa

SEQ ID NO: 143352 - protein, 210 aa, Protochlamydia amoebophila
MVEKQIAARGIQDPRVLEAMGKVPRERFVSEHIAPLAYEDRPLSIDEGQTISQPFIVAVMAQQAQITPQDKVLEIGTGSGYSAAILSQLASHVYSMERYPKLAELAKKRLQEFGYNNVTVSVGDGSLGWEEFAPYEVIIVTAGGPQIPPSLLKQLAISGRLVIPVGPSLESQQLMRVMREDADHYRYENLGSVQFVPLVGKEGWQTTSSS

SEQ ID NO: 143353 - DNA, 627 bp, Photorhabdus luminescens subsp
  CDS (1)..(627): transl_table=11
atgctgagtcgggcaatgaaaaatttgctgacacaattacgccagcagggaatagaagatgaacgtttactggccgccatttctgctgtgcctagagaacgttttgtcgatgaagcactggcacataaagcgtatgaaaatacggctttgcctattggttatgggcaaacgatttctcagccttatattgttgcccgtatgactgaactgcttcaattaacaccagatgctaagattttggaaattggtaccggctctggttatcagacagcaatattagcgcatttggtcaaacatgttttctcggtagaacggatcaagggcttacagtggcaggctaaacggcggttgaaacagctcgatttgcataatgtttcaacccgacatggagatggttggcaaggatggccgtcgcgtgggttatttgatgctattattgtgaccgcagcgcctccgtatatcccacaagaattgatgcttcagcttactgatggtggagtgatggttttgcccgttggcgagcatacacaaattcttaaatccgtgaaacgtcatggcaatggttttcatagtgaagtgatcgaagctgtgcgctttgtgcctcttgtgcaaggggaactggcttaa

SEQ ID NO: 143354 - protein, 208 aa, Photorhabdus luminescens subsp
MLSRAMKNLLTQLRQQGIEDERLLAAISAVPRERFVDEALAHKAYENTALPIGYGQTISQPYIVARMTELLQLTPDAKILEIGTGSGYQTAILAHLVKHVFSVERIKGLQWQAKRRLKQLDLHNVSTRHGDGWQGWPSRGLFDAIIVTAAPPYIPQELMLQLTDGGVMVLPVGEHTQILKSVKRHGNGFHSEVIEAVRFVPLVQGELA

SEQ ID NO: 143355 - DNA, 636 bp, Pseudomonas aeruginosa
  CDS (1)..(636): transl_table=11
atgacctcccagcgtacccgagagcgcctgatccagcgcctgtacgaagaaggcctttccaacgcccacgtgctcgaggtgatccgccgcacgccgcgtcatctgttcgtcgacgaggcgctctcgcatcgcgcctacgaagacaccgccctgccgatcggccacaaccagaccatttcccagccgttcatggtggcgcggatgaccgagttgctgctggcggccggcccgctggacaaggtcatggagatcggcaccgggtccggctaccagaccgcggtgctggcgcaactggtcgagcgggtcttctccgtcgagcggatccaggcgttgcaggacaaggccaaggagcgtcttgcggagctaaacctgcgtaatgttgtctttcgttggggcgatggctgggagggttggtcggcgttggctccctacaatggaatcatcgtcaccgcggcggccacggaagtcccgcagtcgttgctggaccagttggcgcctggggggcgcctggtgatcccggtcggtggcggcgaggtccagcaactgatgctgatcgtccgcaccgaggacgggttcagccgccaggtactcgactcggtacgtttcgtcccgctgctcaacggcccgatcgcctga

SEQ ID NO: 143356 - protein, 211 aa, Pseudomonas aeruginosa
MTSQRTRERLIQRLYEEGLSNAHVLEVIRRTPRHLFVDEALSHRAYEDTALPIGHNQTISQPFMVARMTELLLAAGPLDKVMEIGTGSGYQTAVLAQLVERVFSVERIQALQDKAKERLAELNLRNVVFRWGDGWEGWSALAPYNGIIVTAAATEVPQSLLDQLAPGGRLVIPVGGGEVQQLMLIVRTEDGFSRQVLDSVRFVPLLNGPIA

SEQ ID NO: 143357 - DNA, 696 bp, Pseudomonas putida; identical to SEQ ID NO: 143167
  CDS (58)..(696): transl_table=11

SEQ ID NO: 143358 - protein, 212 aa, Pseudomonas putida
MTSQRTRERLIQRLCEEGVSNTKVLDVIRRTPRHLFVDEALAHRAYEDTALPIGHNQTISQPFMVAHMSELLLEAGPLDKVLEIGTGSGYQTAILAQLVERVFSVERIKVLQDRAKERLVELNLRNVVFRWGDGCEGWPALAPYNGIIVTAVAPEVPQALLDQLAPGGRMVIPVGPAGEAQQLMLIVREEHGFSRRVLGAVRFVPLLNGPLA

SEQ ID NO: 143359 - DNA, 636 bp, Pseudomonas syringae pv
  CDS (1)..(636): transl_table=11
atgacctcgcagcgaacccgcgagcgcctgattcagcgtctgtgcgaagaaggcatcgccaaccagcgtgtgctggacgttatccgcaagacgccccggcacctgtttgtcgatgaagcgctggcgcatcgcgcctatgaagacactgcactgccaatcggtcacaaccagaccatttcccagccttacatggttgcgcggatgagcgagctgctgctggcagccgggccgctcgacaaggtcatggagatcggcaccggttccggctatcagaccgccgtgctgtcgcaactggtggagcgggtgttttcggtcgagcgcatcaagggccttcaggaccgcgccaaggaacggctggtcgaactcaacctgcgcaacgtggttttccgctggggcgacggctgggagggctggccggcgttggcgccctacaacggtatcatcgtgacggcagtcgcgaccgatgtgccgcaggcgctgctcgatcaactggcccccggaggccggctggtcataccggtgggggctggcgaggttcagcaactgatgctgatcattcgtgaagaaaacggtttttcccggcatgtactcggcgctgtgcgcttcgtcccgctgctcaatgggccgattgcgtaa

SEQ ID NO: 143360 - protein, 211 aa, Pseudomonas syringae pv
MTSQRTRERLIQRLCEEGIANQRVLDVIRKTPRHLFVDEALAHRAYEDTALPIGHNQTISQPYMVARMSELLLAAGPLDKVMEIGTGSGYQTAVLSQLVERVFSVERIKGLQDRAKERLVELNLRNVVFRWGDGWEGWPALAPYNGIIVTAVATDVPQALLDQLAPGGRLVIPVGAGEVQQLMLIIREENGFSRHVLGAVRFVPLLNGPIA

SEQ ID NO: 143361 - DNA, 615 bp, Rhizobium meliloti
  CDS (1)..(615): transl_table=11
atggcgctgcggcttcgctcgggcggcatcgtcaatcatgagctgctgaaggctgtggagcagacgccgcggacgctcttcgctccgccgcaataccaggacgaggtctactccaaacggctcattccgctcgagtgcggttccttcatggagggctgcgacatggccgtccggctcctgcactgtctcaatctcaagcctggccagcgcatactcgaggtcggaaccggcagcggctttaccgcggccgtgatggggcggatcgccgagcgcgtgctgacgatcgacaggtatcagacactcgtcgcatcggcgcagaaaaacctggagaaggcgggcctgcgcaacgtcgtcgtccgccaggccgatggcagcgcaggagtgccgggcgagggcaccttcgaccggattctcattaccgccgcattcaacagccttccccggacgttctccgatcatctcgtttcgggcggcaccctgctggtgccgatcatgatgagcgaaacgcattgccgcatcgttcgcgtcaaccgtaccggtagccgcttcgaccgggaagatctgttcgacgcgccttacctcccgatcgtcccacaggtagcgtcgttcctttag

SEQ ID NO: 143362 - protein, 204 aa, Rhizobium meliloti
MALRLRSGGIVNHELLKAVEQTPRTLFAPPQYQDEVYSKRLIPLECGSFMEGCDMAVRLLHCLNLKPGQRILEVGTGSGFTAAVMGRIAERVLTIDRYQTLVASAQKNLEKAGLRNVVVRQADGSAGVPGEGTFDRILITAAFNSLPRTFSDHLVSGGTLLVPIMMSETHCRIVRVNRTGSRFDREDLFDAPYLPIVPQVASFL

SEQ ID NO: 143363 - DNA, 723 bp, Rhodopseudomonas palustris
  CDS (67)..(723): transl_table=11
atgacgtctccagcttcggacttgccgccgctcagcggtcgttcgttcgcggtgctgcgcgaactgatggtcgagcgccagatcgcagcgcgcggcgtgcatgatccgcgcgtgcttgccgcgatgcgcaaggtgccgcgcgaagccttcctgccggaaccgatgcgtgatctggcgtacgaagacgcgccggtgccgatcgccgccgagcagacgatgtcgcagccctacatcgtggcgctgatggtcgaggcgctgttactgcagggcagcgacaacgtgctcgaaatcggcgccggctccggctacgccgccgcggtgctcggcgagatcgccggtcatgtcaccacggtggagcgcatcgctacgctggcggacgctgcggcggcgaagctcgccgagctcggttacggcgatgtcgacgtgcatcggagcgatggcacccgcggttggcccgcagcggcgccttacgacgcgatcgtggtcgccgccggcgggccgcaggtgccggagtcgctgaaggcccagctcaagatcggcggacggctggtgatgccggtcggagccgatcagcaagcccaggaactggtgcgcctgacacggctcggcgaggccgatttcaagcgcgagcacctcggtgatgttcgcttcgtgccgctgctcggcgctgaggggtggcagcagccagagccggccggcaggacggcccgcgaaaaggggtga

SEQ ID NO: 143364 - protein, 218 aa, Rhodopseudomonas palustris
MVERQIAARGVHDPRVLAAMRKVPREAFLPEPMRDLAYEDAPVPIAAEQTMSQPYIVALMVEALLLQGSDNVLEIGAGSGYAAAVLGEIAGHVTTVERIATLADAAAAKLAELGYGDVDVHRSDGTRGWPAAAPYDAIVVAAGGPQVPESLKAQLKIGGRLVMPVGADQQAQELVRLTRLGEADFKREHLGDVRFVPLLGAEGWQQPEPAGRTAREKG

SEQ ID NO: 143365 - DNA, 627 bp, Salmonella typhi
  CDS (1)..(627): transl_table=11
atggtaagtggacgtgtacaggctcttcttgaacaattgcgcgcgcagggcatcagagatgagctggtgcttaatgcgcttgccgcagtgccgcgcgagaaatttattgatgaagcgtttgaacataaggcctgggaaaatatcgctttgccgataggccagggtcagacgatttcgcagccctatatggtggcgcgaatgacggaactgctcgaactgacgccgcaatccagggtgttggaaattggcaccggttccggctatcagacggcgattctagcgcatctggtacatcacgtttgctccgttgagcggattaaggggctgcaatggcaggcgcgccgccgcctgaagcagctcgatttacataatgtttctacccgtcatggcgatggctggcaaggctggcaggcgcgtgcgccgtttgacgctatcattgtgacggccgcgccgccggaaattcctaccgcgctcatggcacagttggatgaaggcggcattcttgttctgcctgtgggcgatgagcagcagtttttgaaacgcgtgcgtcgccggggcggcgaatttattatcgataccgtggaggccgttcgcttcgtcccgttagtcaagggagagctggcctag

SEQ ID NO: 143366 - protein, 208 aa, Salmonella typhi
MVSGRVQALLEQLRAQGIRDELVLNALAAVPREKFIDEAFEHKAWENIALPIGQGQTISQPYMVARMTELLELTPQSRVLEIGTGSGYQTAILAHLVHHVCSVERIKGLQWQARRRLKQLDLHNVSTRHGDGWQGWQARAPFDAIIVTAAPPEIPTALMAQLDEGGILVLPVGDEQQFLKRVRRRGGEFIIDTVEAVRFVPLVKGELA

SEQ ID NO: 143367 - DNA, 627 bp, Salmonella typhimurium
  CDS (1)..(627): transl_table=11
atggtaagtggacgtgtacaggctcttcttgaacaattgcgcgcgcagggcatcagagatgagcaggtgcttaatgcgcttgctgcagtgccgcgcgagaaatttattgatgaagcgtttgaacataaggcctgggaaaatatcgctttgccgataggccagggtcagacgatttcgcagccctatatggtggcgcgaatgacggagctgctcgaactgacgccgcaatccagggtgctggaaattggtaccggttccggctatcagacggcgattctggcgcatctggtacatcacgtttgctccgttgagcggattaaggggctgcaatggcaggcgcgtcgccgcctgaagcagctcgatttacataatgtttctacccgtcatggcgatggctggcaaggctggcaggcgcgtgcgccatttgacgctatcattgtgacggccgcgccgccggaaattcctaccgcgctcatggcacagttggatgaaggcggcattcttgttctgcccgtgggcgatgagcagcagtttttgaaacgcgtgcgtcgccggggcggcgaatttattatcgataccgtggaggccgttcgcttcgtcccgttagtcaagggagagctggcctag

SEQ ID NO: 143368 - protein, 208 aa, Salmonella typhimurium
MVSGRVQALLEQLRAQGIRDEQVLNALAAVPREKFIDEAFEHKAWENIALPIGQGQTISQPYMVARMTELLELTPQSRVLEIGTGSGYQTAILAHLVHHVCSVERIKGLQWQARRRLKQLDLHNVSTRHGDGWQGWQARAPFDAIIVTAAPPEIPTALMAQLDEGGILVLPVGDEQQFLKRVRRRGGEFIIDTVEAVRFVPLVKGELA

SEQ ID NO: 143369 - DNA, 627 bp, Shigella flexneri
  CDS (1)..(627): transl_table=11
atggtaagcagacgcgtacaagcacttctggatcaattacgtgcgcaaggtattcaggatgagcaggtgctgaatgcacttgccgccgtgccgcgtgaaaaattcgttgatgaagcgtttgaacaaaaagcctgggacaatatcgccttgccgataggtcaggggcagacaatttcgcagccgtatatggtggcgcgaatgaccgaattactcgagctgacgccgcagtcgcgggtgctggaaactggcactggttcgggatatcaaacggcaatcctggcgcatcttgtccagcatgtttgctcggttgaacggattaaaggcttgcagtggcaggcacgtcgccgcctgaaaaatcttgatttacataatgtttcaacccgtcatggtgatggatggcaaggttggcaggcacgtgcgccgtttgacgctatcattgttacggcggcaccgccggaaattccaactgcgctaatgacgcagctggacgaaggcgggattctcgtcttacccgtaggggaggagcaccagtatttgaaacgggtgcgtcgtcggggaggcgaatttattatcgataccgtggaggccgtgcgctttgtccctttagtgaagggtgagctggcttaa

SEQ ID NO: 143370 - protein, 208 aa, Shigella flexneri
MVSRRVQALLDQLRAQGIQDEQVLNALAAVPREKFVDEAFEQKAWDNIALPIGQGQTISQPYMVARMTELLELTPQSRVLETGTGSGYQTAILAHLVQHVCSVERIKGLQWQARRRLKNLDLHNVSTRHGDGWQGWQARAPFDAIIVTAAPPEIPTALMTQLDEGGILVLPVGEEHQYLKRVRRRGGEFIIDTVEAVRFVPLVKGELA

SEQ ID NO: 143371 - DNA, 627 bp, Vibrio cholerae
  CDS (1)..(627): transl_table=11
atggctaacccaaaagccgacagactgattcaatttttaactgagcaggggattacctcaccacaagtgttggcggcaatccatgcactgccacgcgagtttttcgtcgcaccggccatgatgcatcaagcttatgacaataatgccctgcccataggtcaaggccagaccatctcgcaaccctatatcgtggcgaagatgacagagctactggcgttaaccccagaaaccaaagtgctagaaattggtacgggctctggttatcaaaccgcagtgctcgccaaactggttaatcatgtgtttactgttgagcggatcaaaaccctgcaatgggatgcgaaaagacgcttgaaacagttggatatctataacgtgtcgacgaaacatggcgatggctggcaaggttggcccgctcgtggaccttttgatgcgatccttgtgacggctgctgcggcaaaagtgccgcaaagtctattggatcagcttgctgagggtggtcgtatggtgatccctgtgggcgaagacgagcaatatctgtacaaaattgtgcgtcaaggtgggcagtttatctctgagcgggttgaagctgtgcgttttgtgccactggtcgcgggagatcttgcctga

SEQ ID NO: 143372 - protein, 208 aa, Vibrio cholerae
MANPKADRLIQFLTEQGITSPQVLAAIHALPREFFVAPAMMHQAYDNNALPIGQGQTISQPYIVAKMTELLALTPETKVLEIGTGSGYQTAVLAKLVNHVFTVERIKTLQWDAKRRLKQLDIYNVSTKHGDGWQGWPARGPFDAILVTAAAAKVPQSLLDQLAEGGRMVIPVGEDEQYLYKIVRQGGQFISERVEAVRFVPLVAGDLA

SEQ ID NO: 143373 - DNA, 693 bp, Triticum aestivum
  CDS (1)..(693)
atggcgcaattttgggctgaaggatcactggagaagaacaacgctctggttgaatacctgaaacagtatggtgttgttcgaaccgataaagtggcagaagttatggaaactatcgaccgagccttatttgtaccggagggctttaccccttacaccgacagtcctatgcctattggttacaatgcaacaatatctgctcctcacatgcacgcaacctgcttagaactgttgaaggattatttacagccaggcatgcatgctctggacgttggatcaggcagtggttacttgactgcttgctttgcaatgatggtcggaccagaaggtcgcgcagtggggattgaacacattcctgaactcgttgttgcttctactgaaaatgtcgaacggagtgctgcagcagcactaatgaaggatggttcactttcttttcatgtttcagatggaaggcttggctggccggatgcggcgccatacgatgctattcatgtgggcgcagcggcacctgagatccctcggccactgctggagcagctgaagcctggcgggcggatggtcatacccgttggcacatactctcaggacctgcaggtgattgacaagagcgccgacggatccaccagcgtccgcaacgatgcctctgttcgctacgtccctctgaccagccgctctgctcagctgcaggacagctga

SEQ ID NO: 143374 - protein, 230 aa, Triticum aestivum
MAQFWAEGSLEKNNALVEYLKQYGVVRTDKVAEVMETIDRALFVPEGFTPYTDSPMPIGYNATISAPHMHATCLELLKDYLQPGMHALDVGSGSGYLTACFAMMVGPEGRAVGIEHIPELVVASTENVERSAAAALMKDGSLSFHVSDGRLGWPDAAPYDAIHVGAAAPEIPRPLLEQLKPGGRMVIPVGTYSQDLQVIDKSADGSTSVRNDASVRYVPLTSRSAQLQDS

SEQ ID NO: 143375 - DNA, 627 bp, Yersinia pestis
  CDS (1)..(627): transl_table=11
atggtaaataaacgcatgcaaacattgttgatgcagttacgtcagcaaggtattcacgatgaacgcctgttacaggcgatcgaagcggtaccgcgtgagcgttttgtcgatgaagcgttggctcataaggcttatgagaataccgctctccctataggtgcggggcaaacgatttctcagccttatatggtggcgcgaatgacagagttactgcaattgacgccaacgtccagagtcttagagatcggaacggggtcaggctaccagacggctattttggcgcatctggtcgatcatgtctgttcagtcgagcgaatcaaagggttacagtggcaggcaaaacgtcgcctaaaacagttggatctgcataatgtgtcgacccgccatggtgatggttggttgggctggcagtctcgtgggccgtttgatgccattattgtaaccgcagcaccgcctgaaattccggatgcattacttgagcaattggatgaagggggaatactggttcttcccgttggtgagcagttccaaacattaaagtacgtgcaacgccgtaacaatgaataccatattgagacggtggaagccgtccgttttgttcctctggttaaaggggaacttgcctaa

SEQ ID NO: 143376 - protein, 208 aa, Yersinia pestis
MVNKRMQTLLMQLRQQGIHDERLLQAIEAVPRERFVDEALAHKAYENTALPIGAGQTISQPYMVARMTELLQLTPTSRVLEIGTGSGYQTAILAHLVDHVCSVERIKGLQWQAKRRLKQLDLHNVSTRHGDGWLGWQSRGPFDAIIVTAAPPEIPDALLEQLDEGGILVLPVGEQFQTLKYVQRRNNEYHIETVEAVRFVPLVKGELA

SEQ ID NO: 143377 - DNA, 753 bp, Oryza sativa
  CDS (1)..(753)
atgttgctgtttttctctgggaagaaccgtttcatgttgctcctggtgctgatactgttgcagcaccgactgtggtcaagcggggctagcgacaagaacaaggcaatggttgagcagctccagaggtacgggattatcaagtcgagcaaggtcgcgcaggtgatggagaccatcgacagggggctgtttgtgcctcctggtgcttctccctatttcgacagcccgatgcccatcggttacaacgccaccatttctgcgcctcacatgcacgcctcttgcttggagctcctggagaagcaccttcagcctggcatgcgtgctctggatgttggatcaggcacagggtacctaacagcttgcttcgcgattatggttggaccagaagggcgagcagttggtgttgaacatatcccagagttggttacttcgtctattgaaaacatcaagaaaagtgcagcggctccacagttaactgatggatccctcagtatacatattaccgatggcagagaaggttggccagagctcgcaccctatgatgccatccatgtcggagctgctgcaccgcagattccacaggcgttgattgagcagctaaagcccggtggcagaatggtgatcccagttgggactatgttccaggagctgaaagtggtggacaagaaccaggatggcaaggtcagcataagagatgagacggctgtgcgctatgtgcccctcacaagcaaggatgcgcagctgcaggctaactga

SEQ ID NO: 143378 - protein, 250 aa, Oryza sativa
MLLFFSGKNRFMLLLVLILLQHRLWSSGASDKNKAMVEQLQRYGIIKSSKVAQVMETIDRGLFVPPGASPYFDSPMPIGYNATISAPHMHASCLELLEKHLQPGMRALDVGSGTGYLTACFAIMVGPEGRAVGVEHIPELVTSSIENIKKSAAAPQLTDGSLSIHITDGREGWPELAPYDAIHVGAAAPQIPQALIEQLKPGGRMVIPVGTMFQELKVVDKNQDGKVSIRDETAVRYVPLTSKDAQLQAN

SEQ ID NO: 143379 - DNA, 696 bp, Oryza sativa
  CDS (1)..(696)
atggagcaccgactgtggtcaagcggggctagcgacaagaacaaggcaatggttgagcagctccagaggtacgggattatcaagtcgagcaaggtcgcgcaggtgatggagaccatcgacagggggctgtttgtgcctcctggtgcttctccctatttcgacagcccgatgcccatcggttacaacgccaccatttctgcgcctcacatgcacgcctcttgcttggagctcctggagaagcaccttcagcctggcatgcgtgctctggatgttggatcaggcacagggtacctaacagcttgcttcgcgattatggttggaccagaagggcgagcagttggtgttgaacatatcccagagttggttacttcgtctattgaaaacatcaagaaaagtgcagcggctccacagttaactgatggatccctcagtatacatattaccgatggcagagaaggttggccagagctcgcaccctatgatgccatccatgtcggagctgctgcaccgcagattccacaggcgttgattgagcagctaaagcccggtggcagaatggtgatcccagttgggactatgttccaggagctgaaagtggtggacaagaaccaggatggcaaggtcagcataagagatgagacggctgtgcgctatgtgcccctcacaagcaaggatgcgcagctgcaggctaactga

SEQ ID NO: 143380 - protein, 231 aa, Oryza sativa
MEHRLWSSGASDKNKAMVEQLQRYGIIKSSKVAQVMETIDRGLFVPPGASPYFDSPMPIGYNATISAPHMHASCLELLEKHLQPGMRALDVGSGTGYLTACFAIMVGPEGRAVGVEHIPELVTSSIENIKKSAAAPQLTDGSLSIHITDGREGWPELAPYDAIHVGAAAPQIPQALIEQLKPGGRMVIPVGTMFQELKVVDKNQDGKVSIRDETAVRYVPLTSKDAQLQAN

SEQ ID NO: 143381 - DNA, 690 bp, Zea mays
  CDS (1)..(690)
atggcgcaatattggactcaaccatcactggacaggaacaaagctatggttgagtacctaaagcagtatggtgctgttagaactgataaagtgaaggaagtaatggaaacgattgatagagcactatttgtaccagagggtaccccttacattgacagtcctatgcctattggtttcaacgcgacgatatctgctcctcacatgcatgcgacctgcttagagctattgaaggatcatttgcaaccaggaatgcatgctctggatgtcggatcaggtagtggctacctgacagcttgttttgccatgatggttggaccagaaggccgtgcagtgggaattgaacacgttcccgagatcgttgcttcttctgttgaaaatgtgcagagaagtgctgcagctccactactgagggatggatcgctctcttttcatgttacagatggcaggcttggctttccagacgcggcaccctacgacgctatccatgttggtgcagcggcacctgagatccctcagcctctgcttgatcagctaaagcctggcggccggatggtgataccggttggcacctactcccaggacctgcaggtggtggacaagaacacggatggatcattcagcgtccggagcgacgcggctgtgcgctacgtcccactgaccagccgcgccgcgcagttgcagggcccctaa

SEQ ID NO: 143382 - protein, 229 aa, Zea mays
MAQYWTQPSLDRNKAMVEYLKQYGAVRTDKVKEVMETIDRALFVPEGTPYIDSPMPIGFNATISAPHMHATCLELLKDHLQPGMHALDVGSGSGYLTACFAMMVGPEGRAVGIEHVPEIVASSVENVQRSAAAPLLRDGSLSFHVTDGRLGFPDAAPYDAIHVGAAAPEIPQPLLDQLKPGGRMVIPVGTYSQDLQVVDKNTDGSFSVRSDAAVRYVPLTSRAAQLQGP

SEQ ID NO: 143383 - DNA, 696 bp, Brassica napus
  CDS (1)..(696)
atgaagcaattctggagcccaaacagtattaacaagaacaaagctatggtggagaatcttcaaagccatggtgtgattacgtctgatgaagtcgctaaagctatggaggctgtcgacagaggcctctttgtaccagaccgttcttacgcttacgtcgatagtcccttgtctattggctataacgtgaccatatcagctcctcatatgcacgcaatgtgccttcaactcctcgaaaagaatctgaaaccagggatgcgtgttcttgatgtcggctctggaaccgggtacttaacagcttgctttgcggttatggttggatccgaaggtcgtgctattggtgtggagcacatccctgaattggtggcttcttccatcaagaacattgaagcgagtgatgctgcttccccattgctgaaacaaggatctctggctattcatgttggcgatggaaggcaaggatgggctgagtttgcaccttatgatgctattcatgtgggagcagcggcacctgagatcccagaggcattgattgatcaactgaaacctggtgggagactggtgatcccggttgggaacttattccaagatctgcaagtggtcgataagaactcagatggttcggttagcatcaggagcgaaacatcagttcgttatgttcctttgactagccgtgaagcccaattgagaggggagtga

SEQ ID NO: 143384 - protein, 231 aa, Brassica napus
MKQFWSPNSINKNKAMVENLQSHGVITSDEVAKAMEAVDRGLFVPDRSYAYVDSPLSIGYNVTISAPHMHAMCLQLLEKNLKPGMRVLDVGSGTGYLTACFAVMVGSEGRAIGVEHIPELVASSIKNIEASDAASPLLKQGSLAIHVGDGRQGWAEFAPYDAIHVGAAAPEIPEALIDQLKPGGRLVIPVGNLFQDLQVVDKNSDGSVSIRSETSVRYVPLTSREAQLRGE

SEQ ID NO: 143385 - DNA, 699 bp, Glycine max
  CDS (1)..(699)
atggagcaatactggtctgggagtgccatcaatgaaaacaaaggaatggtagataatttgcatcgttatggagtaatcacatctagaaaggtagctgaagtaatggaaaccattgatagagctttgtttgtacccagcggcggcggactccaaccttatgtggacagtcctatgccgattggctacaatgccaccatctctgcgccgcatatgcatgccacctgccttcagttgcttgagaagaatttgcaacctggaatgcgtgttcttgacgttggctccggaacgggatacctgacagcatgctttgccttgatggttggaccccaaggccgtgctattggcgtggaacatattcctgagttggtttctttttcaatcgagaatattcaaaaaagtgctgcagctcaaccattgaaagatggttccctttctgtgcatgctggtgatggaaggcaaggttggcctgagtttgctccttatgatgccattcacgttggagcagcggcacccgaaatcccccaaccacttattgaccagttgaagccgggtggtaggatggttattcctgttggaaacatatttcaagatttaaaggtcgtggataagaactccgatggttctatcagtgtccgcactgagacatctgttcgatatgtacccctcactagtcgagaagctcaactgcgaggttactaa

SEQ ID NO: 143386 - protein, 232 aa, Glycine max
MEQYWSGSAINENKGMVDNLHRYGVITSRKVAEVMETIDRALFVPSGGGLQPYVDSPMPIGYNATISAPHMHATCLQLLEKNLQPGMRVLDVGSGTGYLTACFALMVGPQGRAIGVEHIPELVSFSIENIQKSAAAQPLKDGSLSVHAGDGRQGWPEFAPYDAIHVGAAAPEIPQPLIDQLKPGGRMVIPVGNIFQDLKVVDKNSDGSISVRTETSVRYVPLTSREAQLRGY

SEQ ID NO: 143387 - DNA, 843 bp, Zea mays
  CDS (1)..(843)
atgtgcctcgccgccgcgtgcgcgtccgccaccctcgcccgccgcctctcgccctccaccgcgctcccgcgccgcttcctcctcggcgcccccacgaggccttccccgccaccgcctctgctgcggcgctgcctcccgttccacttctaccatatggcgcaatattggactcaaccatcactggacaggaacaaagctatggttgagtacctaaagcagtatggtgctgttagaactgataaagtgaaggaagtaatggaaacgattgatagagcactatttgtaccagagggtaccccttacattgacagtcctatgcctattggtttcaacgcgacgatatctgctcctcacatgcatgcgacctgcttagagctattgaaggatcatttgcaaccaggaatgcatgctctggatgtcggatcaggtagtggctacctgacagcttgttttgccatgatggttggaccagaaggccgtgcagtgggaattgaacacgttcccgagatcgttgcttcttctgttgaaaatgtgcaaagaagcgctgctgctccactactgagggatggatcgctctcttttcatgttacagatggcaggcttggctttccagacgcggcaccctacgacgctatccatgtcggtgcagcggcacccgagatccctcagcctctgcttgatcagctaaagcctggcggccggatggtgataccggttggcacctactcccaggacctgcaggtggtggacaagaacacggatggatcattcagcgtccggagcgacgcggctgtgcgctacgtcccactgaccagccgcgccgcgcagttgcagggcccctaa

SEQ ID NO: 143388 - protein, 280 aa, Zea mays
MCLAAACASATLARRLSPSTALPRRFLLGAPTRPSPPPPLLRRCLPFHFYHMAQYWTQPSLDRNKAMVEYLKQYGAVRTDKVKEVMETIDRALFVPEGTPYIDSPMPIGFNATISAPHMHATCLELLKDHLQPGMHALDVGSGSGYLTACFAMMVGPEGRAVGIEHVPEIVASSVENVQRSAAAPLLRDGSLSFHVTDGRLGFPDAAPYDAIHVGAAAPEIPQPLLDQLKPGGRMVIPVGTYSQDLQVVDKNTDGSFSVRSDAAVRYVPLTSRAAQLQGP

SEQ ID NO: 143389 - DNA, 690 bp, Zea mays
  CDS (1)..(690)
atggcgcaatattggactcaaccatcactggacaggaacaaagctatggttgagtacctaaagcagtatggttctgttagaactgataaagtgaaggaagtaatggaaacgattgatagagcactatttgtaccagagggtaccccttacattgacagtcctatgcctattggtttcaacgcgacgatatctgctcctcacatgcatgcgacctgcttagagctattgaaggatcatttgcaaccaggaatgcatgctctggatgtcggatcaggtagtggctacctgacagcttgttttgccatgatggttggaccagaaggccgtgcagtgggaattgaacacgttcccgagatcgttgcttcttctgttgaaaatgtgcaaagaagcgctgctgctccactactgagggatggatcgctctcttttcatgttacagatggcaggcttggctttccagacgcggcaccctacgacgctatccatgtcggtgcagcggcacccgagatccctcagcctctgcttgatcagctaaagcctggcggccggatggtgataccggttggcacctactcccaggacctgcaggtggtggacaagaacacggatggatcattcagcgtccggagcgacgcggctgtgcgctacgtcccactgaccagccgcgccgcgcagttgcagggcccctaa

SEQ ID NO: 143390 - protein, 229 aa, Zea mays
MAQYWTQPSLDRNKAMVEYLKQYGSVRTDKVKEVMETIDRALFVPEGTPYIDSPMPIGFNATISAPHMHATCLELLKDHLQPGMHALDVGSGSGYLTACFAMMVGPEGRAVGIEHVPEIVASSVENVQRSAAAPLLRDGSLSFHVTDGRLGFPDAAPYDAIHVGAAAPEIPQPLLDQLKPGGRMVIPVGTYSQDLQVVDKNTDGSFSVRSDAAVRYVPLTSRAAQLQGP

SEQ ID NO: 143391 - DNA, 699 bp, Zea mays
  CDS (1)..(699)
atggaggagcatgggctgtggtccagcggggccagcgacaagaacaagtccatggttgagcagctgcagaggtacggggtcatcaggtcgaccaaagtcgcggaggtgatggaggccatcgacagggggttgttcgtgccacctgggggctcgccataccacgatagccccatgccgattgggtacaatgccaccatatcagcaccacacatgcatgcggcttgcctggagctactggagaagaatcttcagcctggaatgcgagctctcgatgttgggtcaggcactggatacctaactgcttgctttgcactgatggttggaccagaagggcgagcagttggtgtcgaacatatcccagagttggttgctacttctactgaaaacatcaagaaaagtgcagcagccccacatctaaatgatggatccctcagtatacacgtttctgatggcagggaaggttggccagaactggcaccctatgaagccatccatgttggagctgcagcaccgcagatcccggaggcgctgatcgagcagctgaagcccggcggcagaatggtgatccctgtcgggacagtcttccaggagctgaaggttgtggacaagaaattggatggcactgtcagcataagagacgaaacgtccgtgcgctatgtgccgctcactagcaaggacgcccagttgcacgcaagctga

SEQ ID NO: 143392 - protein, 232 aa, Zea mays
MEEHGLWSSGASDKNKSMVEQLQRYGVIRSTKVAEVMEAIDRGLFVPPGGSPYHDSPMPIGYNATISAPHMHAACLELLEKNLQPGMRALDVGSGTGYLTACFALMVGPEGRAVGVEHIPELVATSTENIKKSAAAPHLNDGSLSIHVSDGREGWPELAPYEAIHVGAAAPQIPEALIEQLKPGGRMVIPVGTVFQELKVVDKKLDGTVSIRDETSVRYVPLTSKDAQLHAS

SEQ ID NO: 143393 - DNA, 21 bp, Artificial sequence
  primer
atgcgcctccggcccgacgac

SEQ ID NO: 143394 - DNA, 21 bp, Artificial sequence
  primer
tcagaacaaagaaccttggag

SEQ ID NO: 143395 - protein, 281 aa, Artificial sequence
  consensus sequence
  Variant (2)..(5): Xaa in position 2 to 5 is any amino acid
  Variant (6)..(19): Xaa in position 6 to 19 is any or no amino acid
  Variant (21)..(28): Xaa in position 21 to 28 is any amino acid
  Variant (30)..(31): Xaa in position 30 to 31 is any amino acid
  Variant (33)..(36): Xaa in position 33 to 36 is any amino acid
  Variant (37)..(42): Xaa in position 37 to 42 is any or no amino acid
  Variant (45)..(49): Xaa in position 45 to 49 is any amino acid
  Variant (50)..(50): Xaa in position 50 is any or no amino acid
  Variant (52)..(55): Xaa in position 52 to 55 is any amino acid
  Variant (56)..(62): Xaa in position 56 to 62 is any or no amino acid
  Variant (66)..(66): Xaa in position 66 is any amino acid
  Variant (68)..(70): Xaa in position 68 to 70 is any amino acid
  Variant (72)..(76): Xaa in position 72 to 76 is any amino acid
  Variant (78)..(85): Xaa in position 78 to 85 is any amino acid
  Variant (86)..(99): Xaa in position 86 to 99 is any or no amino acid
  Variant (101)..(102): Xaa in position 101 to 102 is any amino acid
  Variant (104)..(104): Xaa in position 104 is any amino acid
  Variant (106)..(106): Xaa in position 106 is any amino acid
  Variant (109)..(110): Xaa in position 109 to 110 is any amino acid
  Variant (112)..(119): Xaa in position 112 to 119 is any amino acid
  Variant (120)..(129): Xaa in position 120 to 129 is any or no amino acid
  Variant (131)..(133): Xaa in position 131 to 133 is any amino acid
  Variant (135)..(138): Xaa in position 135 to 138 is any amino acid
  Variant (140)..(159): Xaa in position 140 to 159 is any amino acid
  Variant (160)..(171): Xaa in position 160 to 171 is any or no amino acid
  Variant (174)..(174): Xaa in position 174 is any amino acid
  Variant (175)..(175): Xaa in position 175 is any or no amino acid
  Variant (177)..(181): Xaa in position 177 to 181 is any amino acid
  Variant (182)..(182): Xaa in position 182 is any or no amino acid
  Variant (184)..(184): Xaa in position 184 is any amino acid
  Variant (186)..(186): Xaa in position 186 is any amino acid
  Variant (188)..(190): Xaa in position 188 to 190 is any amino acid
  Variant (192)..(196): Xaa in position 192 to 196 is any amino acid
  Variant (197)..(198): Xaa in position 197 to 198 is any or no amino acid
  Variant (200)..(201): Xaa in position 200 to 201 is any amino acid
  Variant (202)..(204): Xaa in position 202 to 204 is any or no amino acid
  Variant (206)..(207): Xaa in position 206 to 207 is any amino acid
  Variant (210)..(211): Xaa in position 210 to 211 is any amino acid
  Variant (214)..(217): Xaa in position 214 to 217 is any amino acid
  Variant (219)..(219): Xaa in position 219 is any amino acid
  Variant (221)..(223): Xaa in position 221 to 223 is any amino acid
  Variant (224)..(236): Xaa in position 224 to 236 is any or no amino acid
  Variant (238)..(259): Xaa in position 238 to 259 is any amino acid
  Variant (260)..(278): Xaa in position 260 to 278 is any or no amino acid
GXXXXXXXXXXXXXXXXXXVXXXXXXXXRXXFXXXXXXXXXXAYXXXXXXIXXXXXXXXXXXTISXPXXXAXXXXXLXXXXXXXXXXXXXXXXXXXXXXLXXGXGXGYXXAXXXXXXXXXXXXXXXXXXVXXXEXXXXLXXXXXXXXXXXXXXXXXXXXXXXXXXXXXXXXDGXXGXXXXXXPXDXIXXXAXXXXXXXPXXXXXLXXQLXXGGXXXXPXGXXXXXXXXXXXXXXXXQXXXXXXXXXXXXXXXXXXXXXXXXXXXXXXXXXXXXXXXXXVPL

SEQ ID NO: 143396 - protein, 9 aa, Artificial sequence
  protein pattern
  Variant (2)..(2): Xaa in position 2 is Asp or Glu
  Variant (3)..(3): Xaa in position 3 is Ile or Val
  Variant (5)..(5): Xaa in position 5 is Ala, Ser or Thr
  Variant (7)..(7): Xaa in position 7 is Cys, Ser or Thr
LXXGXGXGY

SEQ ID NO: 143397 - protein, 15 aa, Artificial sequence
  protein pattern
  Variant (3)..(4): Xaa in position 3 to 4 is any amino acid
  Variant (6)..(9): Xaa in position 6 to 9 is any amino acid
  Variant (10)..(10): Xaa in position 10 is Ala or Gly
  Variant (12)..(12): Xaa in position 12 is Phe or Tyr
  Variant (13)..(13): Xaa in position 13 is Asp, Glu, Asn or Ser
  Variant (14)..(14): Xaa in position 14 is any amino acid
DGXXGXXXXXPXXXI

SEQ ID NO: 143398 - DNA, 576 bp, Azotobacter vinelandii
  CDS (1)..(576): transl_table=11
atgacattatgcacagaaccgaagatgagcctatttgaaacagaacgattgatcgtacgccaattgtcccgacaggacttacccgctctcaccgggctcctgggcgatccagaggtaatgaaatactcggtacgaggggcctgtgatgaaaatgccgtacgcaggttcatcgattggactttgaattgctatgcatcgcgcggtgtgggcccttgggcactgctggagaagggctccaatgacttcgtgggcttctgtggcctcgccatggaaatgatcgatggaattgaagaaataaacttgggctatcgattagccaagcgctactggaatcggggcttggcgtcggaggctgcaagagcggcccttgaatatgtcttcgacagaagagaagtggcttcggtagtggtggtcatcgacccagagcataccgcttcgctcaaggtcgcggagaagctcggattccagaatttccatgaaactgactttcatgggcgaccagtacgcctgtaccggatgacccatggccaatggcatgaatcacgtcagcggacaatccgggcggcaagctcatga

SEQ ID NO: 143399 - protein, 191 aa, Azotobacter vinelandii
MTLCTEPKMSLFETERLIVRQLSRQDLPALTGLLGDPEVMKYSVRGACDENAVRRFIDWTLNCYASRGVGPWALLEKGSNDFVGFCGLAMEMIDGIEEINLGYRLAKRYWNRGLASEAARAALEYVFDRREVASVVVVIDPEHTASLKVAEKLGFQNFHETDFHGRPVRLYRMTHGQWHESRQRTIRAASS

SEQ ID NO: 143400 - DNA, 588 bp, Mesorhizobium loti MAFF303099
  CDS (1)..(588): transl_table=11
atggttgccgaagcggaagactcagaagacgaaagttacgcgatagactgcccggtgctggtcaccgagcggctggtgatgcgagcgccgcgcgagagcgacatcgcccaactggtcgagcttgccgacaaccgtcatgtcgccgaaatgctggcgcgcatgccgcacccctatggcgaggccgaggcccgcgccttcctggccatgacacggtcgcgccgcgccggcatcgcctatgcgctgactttggccggaaccgacaccttcgtcggctgcgcggggctcaacaccaccgatcgcgggctggagctcggctactggatcggcgaaccctactggaagcgcggctatgcgacggaagccgcccacgcgctggtcgacctcgccttccagaagacgtcggtccaggtgctgcatgcctcgacccgggtcatcaacccggcctcgcgccgggtgatccacaagtgcggcttccagtatgccgggcagggcatgctgaactcgatcgtcgccggccaggtgccggtcgagcgctacaggctggatcgcaagacctggacgagcctgcggaactgggtgcatttctag

SEQ ID NO: 143401 - protein, 195 aa, Mesorhizobium loti MAFF303099
MVAEAEDSEDESYAIDCPVLVTERLVMRAPRESDIAQLVELADNRHVAEMLARMPHPYGEAEARAFLAMTRSRRAGIAYALTLAGTDTFVGCAGLNTTDRGLELGYWIGEPYWKRGYATEAAHALVDLAFQKTSVQVLHASTRVINPASRRVIHKCGFQYAGQGMLNSIVAGQVPVERYRLDRKTWTSLRNWVHF

SEQ ID NO: 143402 - DNA, 579 bp, Pseudomonas aeruginosa PAO1
  CDS (1)..(579): transl_table=11
atgaacgcgaaccttcccccttccgccatttccgaactgcatggcccgcgcctgctgctgcgcgcctggcgcgacagcgaccgcgaggcgttcgccgagatgtgcgccgacccgcaggtaatggaattcttccccagtgtgctcgaccgcgcgcagagcgacgccttggtcgatcgcgtccaggcgcattttgccgagcgtggctacgggccctgggccctggagctaccgggcgaggcggcgttcatcggattcaccggcctgttcgacgtgaccatggacgtgcacttcgccccgaccgtggagatcggctggcgcctggcgcccgcctactgggggcgtggactcgcccgcgaagcggcggaaaccgccttggacttcgccttcgagcggctgcgcctgcccgaggtggtggccttcaccacgccgcccaaccgccgctcctggggattgatggagcgcctgggcatgcgtcgcgatccggccgaggatttcgaccacccactcctggcagcggatcacccgatgcgccggcatatcctctatcgcgtcgacgcggcccgctgggcggagcggtga

SEQ ID NO: 143403 - protein, 192 aa, Pseudomonas aeruginosa PAO1
MNANLPPSAISELHGPRLLLRAWRDSDREAFAEMCADPQVMEFFPSVLDRAQSDALVDRVQAHFAERGYGPWALELPGEAAFIGFTGLFDVTMDVHFAPTVEIGWRLAPAYWGRGLAREAAETALDFAFERLRLPEVVAFTTPPNRRSWGLMERLGMRRDPAEDFDHPLLAADHPMRRHILYRVDAARWAER

SEQ ID NO: 143404 - DNA, 576 bp, Sinorhizobium meliloti 1021
  CDS (1)..(576): transl_table=11
gtgatcatcctcgagaccgggcggctcaggctccgcgcctggatcgagaccgatcgcgaactctttgccgagatcaacagcgatcccgcggtcatggagttcttcccgttccgccgcacccgcgcggaggccgacgcgcttttcgaccgcaacaaccgcaacatccgcgaaaccggcttcggcttcttcgcgctcgcgttccgtgagaacgacgcgccgatcggcttctgcggacttgcacgcaccgacctcgaaccgcacctgcccgacggcaccgtcgagatcggctggcgcctggctctccgccattggggaaagggctacgtgacggaggcagcgcgggcgcttctcgattatggattcagcgagaggaagctcggggagatcgttgccatcgccgttccggccaacactcgctccaccgccgtgatgacgcggatcggcatgcgtcctgattccaagcgcgacttcgatcattccggcgtcccggacacgcatccccatctcagacgccacgtgctttacgcaacaaccgcggaagaatggcggcgggatggctcggccgcgaagcggtag

SEQ ID NO: 143405 - protein, 191 aa, Sinorhizobium meliloti 1021
MIILETGRLRLRAWIETDRELFAEINSDPAVMEFFPFRRTRAEADALFDRNNRNIRETGFGFFALAFRENDAPIGFCGLARTDLEPHLPDGTVEIGWRLALRHWGKGYVTEAARALLDYGFSERKLGEIVAIAVPANTRSTAVMTRIGMRPDSKRDFDHSGVPDTHPHLRRHVLYATTAEEWRRDGSAAKR

SEQ ID NO: 143406 - DNA, 564 bp, Agrobacterium tumefaciens str. C58
  CDS (1)..(564): transl_table=11
atgatcattcgtgagacagaaagactcattctgcgcgaatggaaggagagcgaccgcgacctgttccgcgaaatcaacgcggatgagaaggtcatggaatttttccccttccgccgcagccatgcggaagcggacgcggtgctggaaaccatcaatggcatgatccgcggcagcggctatggcttttatgccatggagctgcgagaaaccggtgaagtgatggggttctgcggcatatcgcctgtcatgaacctcgatccgcccttcccgatcggcaccatggaaatcggctggcggctcgccactcgcttctgggggcacggttatgtcaccgaagctgcgcaatcgctgctcgtcatggctttcgatgaaaaggagacgccggaaatcgtctcctttgccgtccacgacaaccatcgttcgacggcggtcatggaacgcatcggcttgaggcgtgatccttcccgcgatttcgaccacccgcgcgtgccggaagagacgcacccgcatctgcggccccacgtcacctatgcgctgacgctggaggaatggcgggcgcgataa

SEQ ID NO: 143407 - protein, 187 aa, Agrobacterium tumefaciens str. C58
MIIRETERLILREWKESDRDLFREINADEKVMEFFPFRRSHAEADAVLETINGMIRGSGYGFYAMELRETGEVMGFCGISPVMNLDPPFPIGTMEIGWRLATRFWGHGYVTEAAQSLLVMAFDEKETPEIVSFAVHDNHRSTAVMERIGLRRDPSRDFDHPRVPEETHPHLRPHVTYALTLEEWRAR

SEQ ID NO: 143408 - DNA, 633 bp, Agrobacterium tumefaciens str. C58
  CDS (1)..(633): transl_table=11
atgcaagctgaattgttgagggttgaccaatcacggtcacccgaagagcggccgaggcccgatcggtcgaggagcgattgccccgttttactgtcgcagaggctggttttacgcaagcctcacgaagaagacatcgacgcccttgcccatcttgccaacaatgccaatatcgcgaccatggtatcgcgtatgccgcacccgtacacggccaaagacgccgcggacttcgtgcgacgctccaaagctggcgagattggcaagtgcgtctatgcgattacccgcatggacaatggcgagtttttaggctgctgcgcgctcgaaccccaggaagacgaaaagacgctggaaatcggttactggctaggggagccctactggaaccgcggctacatgaccgaagcggcgcatgcgctgatcgacatggccttccgcacgcgtgaaatcgaccacatcgatgcccgttgccgggtcaccaacattggctcgcgccgcgtcatccagaaatgcggtttccagttccagggctccggcatggtcggttcgctggcgctcggcggcatggtgcccgtcgaatggtaccggcttgaccggaagacgtgggtttcgctgaagagctggggggacatgggatga

SEQ ID NO: 143409 - protein, 210 aa, Agrobacterium tumefaciens str. C58
MQAELLRVDQSRSPEERPRPDRSRSDCPVLLSQRLVLRKPHEEDIDALAHLANNANIATMVSRMPHPYTAKDAADFVRRSKAGEIGKCVYAITRMDNGEFLGCCALEPQEDEKTLEIGYWLGEPYWNRGYMTEAAHALIDMAFRTREIDHIDARCRVTNIGSRRVIQKCGFQFQGSGMVGSLALGGMVPVEWYRLDRKTWVSLKSWGDMG

SEQ ID NO: 143410 - DNA, 525 bp, Agrobacterium tumefaciens str. C58
  CDS (1)..(525): transl_table=11
atgtcaatcgtcatgaagactgaacgattgcatctgcgcgaagtcgaaggtgatgacctcgtttcactgggcagaatttacgctgatcgagagtgcatgcggttctatccggctaccaagtctccatcagaaatcaatgaatggtttcagaagcttgcgtttgacagctacgcacagcatggatttggtctctgggcagtcgtggagacggtttcgggggaggtcatcggtgattgcgggatcactctgcaagagaccccggccggccttgagcccgaaatcggctatcacctatggcgcgaatattggggaatgggcttggcgaccgaagcggctattgcctgccgtgactatgcatttcacgctctcggtttgcgtagagtggtaagcatcaccagccccgaaaacataccgtcacaaaaggtcgcagaacgggtgcatgacaggcgggaaatctatcaaaagcgcggcggagaaagcggaaacgtcgtcagtcgtcacctgtatatcagcgaaaatcagtga

SEQ ID NO: 143411 - protein, 174 aa, Agrobacterium tumefaciens str. C58
MSIVMKTERLHLREVEGDDLVSLGRIYADRECMRFYPATKSPSEINEWFQKLAFDSYAQHGFGLWAVVETVSGEVIGDCGITLQETPAGLEPEIGYHLWREYWGMGLATEAAIACRDYAFHALGLRRVVSITSPENIPSQKVAERVHDRREIYQKRGGESGNVVSRHLYISENQ

SEQ ID NO: 143412 - DNA, 504 bp, Corynebacterium glutamicum ATCC 13032
  CDS (1)..(504): transl_table=11
gtgactccgccaaatacccaacgccgccgcttccgccgcaagcggcctgctgacatcgatctcatggccgacatgctcggggatcctgaagtgatgcgtttctacccctccgcgaaaacacgcgagcaggcagccaggtggatcacttggaatgaagagaactacgcggagcacggctacggcctatggatcgtcgagacgatccacggcgagttcgttggcgactgcggcctcacgtggcaagaggtgaatggcgcacccaagctcgaggtcggctaccacgtcgtcaccgcaaggcagggcctcggttacgcgaccgaagccgccattgcatgccgcgactacgcacgcgacgttgtaggctcacccgagttggtcgccatcatccaccccgagaacgaagcttcggaacgcgtcgcccgaaagctcggtatgcatcgactggcagacgaccatggcggaaacattcccgtccggacggttctcgggatgacgtttgagtag

SEQ ID NO: 143413 - protein, 167 aa, Corynebacterium glutamicum ATCC 13032
MTPPNTQRRRFRRKRPADIDLMADMLGDPEVMRFYPSAKTREQAARWITWNEENYAEHGYGLWIVETIHGEFVGDCGLTWQEVNGAPKLEVGYHVVTARQGLGYATEAAIACRDYARDVVGSPELVAIIHPENEASERVARKLGMHRLADDHGGNIPVRTVLGMTFE

SEQ ID NO: 143414 - DNA, 699 bp, Streptomyces coelicolor A3(2)
  CDS (1)..(699): transl_table=11
atgctgcatgctgggcagttcgagcaggccctgacggttacacaggttacggagcggcgcatgacgagcaccttccccaacatctccatcagcacggagcggttggtgctgcgccccctcgacgaggacgacgtccccgcactggccgccatgatgaacgacgagcaggtcgccgcctggacccacgtcccccagcccttcaccgaggacaacgccgccacctggatcggcgaccacgcccccgccgagcgcaccgcgggccggggactcgacctcgccgtcaccgagttcctcacccagcgactggtcggcgtcgtccagctgaccaagaccaactggcacgtacgctccaccgaactctcctacatagtcgccccctgggcccggggtgaggggtacgcgtccgaggcggcgctcgccaccgcacagtggctcttcggcgaccagaagttcgaacgcgtcgagctgcgcaccgcggccgacaacaccgcctcccagcaggtcgcccagaagatcggctgcatcagcgagggtgtgctgcgcggcgcctgcatagcgcgggcacgcaccgacgacggcgtctggacggacgtacgcaccgacttcatcgtgtggagcctgctgccggaggatctcgagggcgccaccggacagctgaccgacctcgacggtttcaccaccttcaccgactggaactga

SEQ ID NO: 143415 - protein, 232 aa, Streptomyces coelicolor A3(2)
MLHAGQFEQALTVTQVTERRMTSTFPNISISTERLVLRPLDEDDVPALAAMMNDEQVAAWTHVPQPFTEDNAATWIGDHAPAERTAGRGLDLAVTEFLTQRLVGVVQLTKTNWHVRSTELSYIVAPWARGEGYASEAALATAQWLFGDQKFERVELRTAADNTASQQVAQKIGCISEGVLRGACIARARTDDGVWTDVRTDFIVWSLLPEDLEGATGQLTDLDGFTTFTDWN

SEQ ID NO: 143416 - DNA, 627 bp, Streptomyces coelicolor A3(2)
  CDS (1)..(627): transl_table=11
gtggcgccctcgccggatattcgctgtcgctcccgccccgtggggcgcaggatgacggccatgactctggccacccccaccctggacaccgatcgcctgcggctgcggcccttcaccgaggacgacgcgggcttcctctacgccatgcacagcagcaggcacgtgatgcgctactgggactccccgccgtggaccgagcgggcccgcgccgggcgcttcgtcgggatgtgccggaagatggcggacgaaggcaccggcgtgcgggtggccgtcgaccgcgcctccgacggcgccttcgtcggctggtgctgcctggccgaatggaacccggtctaccgcagcgcgtcgctgggctactgcctcgacgaggcgatgtggggccacggctatgcgacggaggccgcacacgccctgctgcggtgggccttcgacacgctggacctgaaccgggtccaggccgaggccgacacgcgcaacgcggcctccgcccgggtgctggagaaggtcgggttcgtgcgcgaggggacgttgcgggaggactgcgtcgtcgacggcgaggtgtccgactcctgggtgtacgggctgatcaggcgggactggcggccgtcggccgcgccggtgcgttga

SEQ ID NO: 143417 - protein, 208 aa, Streptomyces coelicolor A3(2)
MAPSPDIRCRSRPVGRRMTAMTLATPTLDTDRLRLRPFTEDDAGFLYAMHSSRHVMRYWDSPPWTERARAGRFVGMCRKMADEGTGVRVAVDRASDGAFVGWCCLAEWNPVYRSASLGYCLDEAMWGHGYATEAAHALLRWAFDTLDLNRVQAEADTRNAASARVLEKVGFVREGTLREDCVVDGEVSDSWVYGLIRRDWRPSAAPVR

SEQ ID NO: 143418 - DNA, 552 bp, Streptomyces coelicolor A3(2)
  CDS (1)..(552): transl_table=11
atgtccgaacttcgaaccgatcgtctcgtgctccgcggctggcgggcgtccgacctggacccgtgggcggcgatgaacgccgatccggtggtccgcgagtacttccccgaggtcctgacccgggcgcagagcgaggcgtccgtggcccgcttccaggccgacctcgaccggcggggctggggctggtgggcggtggagatcgccgccaccggcgagttcatcggcttcgccgggctcgatcccgtggaggacggcatgccgttcaccggggtggaggcgggctggcgcctggcccgcccggcctgggggaacggcttcgccaccgaggccgcgcgggccgcggtgacccacgccttcgaggaactcgggctgccggaggtcctcgcggtgaccgcggccggcaaccggcggtcgcgggcggtgatggaccgcctgggcatgacctacgacccggccgacgacttcgacgacccggagatccccgagggccccctgcgccgctccgtcgtgtaccgcctccggtcccgggaccaccgccccggcgcgctgtag

SEQ ID NO: 143419 - protein, 183 aa, Streptomyces coelicolor A3(2)
MSELRTDRLVLRGWRASDLDPWAAMNADPVVREYFPEVLTRAQSEASVARFQADLDRRGWGWWAVEIAATGEFIGFAGLDPVEDGMPFTGVEAGWRLARPAWGNGFATEAARAAVTHAFEELGLPEVLAVTAAGNRRSRAVMDRLGMTYDPADDFDDPEIPEGPLRRSVVYRLRSRDHRPGAL

SEQ ID NO: 143420 - DNA, 501 bp, Oceanobacillus iheyensis HTE831
  CDS (1)..(501): transl_table=11
atgctacaaatcaatcgattaacatttcgcccttatcatgataacgactttccttttctgcaatctctattacaggatccagaagtagtacgctttattggagatgggaacgtaagagacgataaagcttgcaacgattttctccaatggatttatgatacatataaaaatgggaatggtcttggcttacaagttcttgtaaataaacaaaatgaacgggtcggacatgccgggcttgtcccacaaactgtagaaggaaaaaacgagattgagataggatattggattgctaagaagcattggggaaaagggtatgcgacagaagcagcactagcattgttcgcatttgcacggaaaaatatagaggttgatcgtgttatttctttaatacaacgtgagaatactgcatcacgtaacgtagcggagaaactaatgatgaaaatagaaaaagaaattatcctaaaagataaacatgtatgtgtgtattctgttcaactataa

SEQ ID NO: 143421 - protein, 166 aa, Oceanobacillus iheyensis HTE831
MLQINRLTFRPYHDNDFPFLQSLLQDPEVVRFIGDGNVRDDKACNDFLQWIYDTYKNGNGLGLQVLVNKQNERVGHAGLVPQTVEGKNEIEIGYWIAKKHWGKGYATEAALALFAFARKNIEVDRVISLIQRENTASRNVAEKLMMKIEKEIILKDKHVCVYSVQL

SEQ ID NO: 143422 - DNA, 537 bp, Pseudomonas putida KT2440
  CDS (1)..(537): transl_table=11
ttggtgctgcgccaatggcatgacgatgacttgcgcgagtttgccgcactgtgcgccgacccgcaggtgatgcgctactttccggcgccgctgacgcgcgttgaggcggctgcgttgatcggccgcgtgcgtgggcatttcaatgagtacggttttggtttgtgggccctggagcgcaaggacagtggcgcgttcatcggcatgaccgggttgctcaatgtcaacttcgacgcgccttttgccccggcggtggagatcggctggcgtctggcacgccgtcactggggcctgggctttgccagcgaagcggcgtggacctgcctgcgttgtgctttcgcccaattgcgcctggaggaggtcgtgtcgttcaccagcgaatgcaacctgccttcgcaaaaggtgatgcaagccatcggcatgcagcaggacctgcacggcagcttcgagcacccccgcctgcccatcggccacccgctgcgcccgcatgtgctgtaccgcattgaccgcgcgcactgggagcgcaccctgcgcgcctga

SEQ ID NO: 143423 - protein, 178 aa, Pseudomonas putida KT2440
MVLRQWHDDDLREFAALCADPQVMRYFPAPLTRVEAAALIGRVRGHFNEYGFGLWALERKDSGAFIGMTGLLNVNFDAPFAPAVEIGWRLARRHWGLGFASEAAWTCLRCAFAQLRLEEVVSFTSECNLPSQKVMQAIGMQQDLHGSFEHPRLPIGHPLRPHVLYRIDRAHWERTLRA

SEQ ID NO: 143424 - DNA, 570 bp, Pseudomonas syringae pv. tomato str. DC3000
  CDS (1)..(570): transl_table=11
atggaaccgatactcaagcttgatagcgctcggttgctgatgcgccagtggcgtgacgacgacctgccagcctttgccgccatgtgcatggacccgcaggtcatgcgctatttccctgagccgctgagccgccttgaaagcgcggccatgatcgggcgactgcgtgggcatttcgccgagctgggttttggcttctgggcgctggagcgcaaggacacgggggaattcatcggtttcaccgggctgcacgtggtgggtttcaaggctccctttaccccggctgtcgagatcggctggcgcctggcgcgtgaacactgggggctgggctttgccagcgaggcggcgtggacggcgctgggctgtggtttcgagcgtttgaagctggacgagatcgtgtcgttcactgcggtcagcaacgagccgtcgcaaaaggtcatgcaggcgatcggtatgcagtacgacgagtcggacgatttcgaccaccccaacctgcctgacggccacccgctcaaaccacacgtgctgtaccgcatcagccgtgaacaatggctcaatacgctgaagccctga

SEQ ID NO: 143425 - protein, 189 aa, Pseudomonas syringae pv. tomato str. DC3000
MEPILKLDSARLLMRQWRDDDLPAFAAMCMDPQVMRYFPEPLSRLESAAMIGRLRGHFAELGFGFWALERKDTGEFIGFTGLHVVGFKAPFTPAVEIGWRLAREHWGLGFASEAAWTALGCGFERLKLDEIVSFTAVSNEPSQKVMQAIGMQYDESDDFDHPNLPDGHPLKPHVLYRISREQWLNTLKP

SEQ ID NO: 143426 - DNA, 534 bp, Streptomyces avermitilis MA-4680
  CDS (1)..(534): transl_table=11
atgaccgagatccacacccctcgcctcctcctccgccgctggaccgacgacgacctcgcccccatggcggagatcaacgcggacccggaggtcatgcgctgggtcggggacggttcggtgcgcgatctggagctcacggcccaggacatcgagcggtgggaggaggagtgggacgaggaaggtctcggcctcttcgccgtcgaactgctggcctccggcgagctggccgggttcaccggcctgtcctggtccgagttcctgcccgacgcgctgcccgacgtgcagatcggctggcggctcggccggcagttctggggtcaggggtacgcctccgaggccgcccaggcgacgctggagttcgccctccaggaccgtggcctcgaacgcgtcgtcgccgccgtccggccgggcgacgaggcctccgagaacgtactgcgcaagctcggcatgcccgcggaacgcgagatcacgcaccccgaacacggcttccccctgaccgtgcacgccatcgacctcaccgagtacgaggcgtag

SEQ ID NO: 143427 - protein, 177 aa, Streptomyces avermitilis MA-4680
MTEIHTPRLLLRRWTDDDLAPMAEINADPEVMRWVGDGSVRDLELTAQDIERWEEEWDEEGLGLFAVELLASGELAGFTGLSWSEFLPDALPDVQIGWRLGRQFWGQGYASEAAQATLEFALQDRGLERVVAAVRPGDEASENVLRKLGMPAEREITHPEHGFPLTVHAIDLTEYEA

SEQ ID NO: 143428 - DNA, 600 bp, Rhodopseudomonas palustris CGA009
  CDS (1)..(600): transl_table=11
atgttgcaggagatcccgaccaccacgccctcgttgcgcgaggcgagaccttgcgtcctcgagaccgagcggctcacgctgcgtaaaccggttctcgcggacgtccaggccatcgcttcgctcgccaacgatcgccgtgtcgtcgagatgacccggcggatgccgtttccctacacgcgcgacgacgccgcgcgcttcgtgaccgcgctgcccaagagcagcgacagcgtgtttctgatcgaggccgaggatcttgagccgatcggactcgtcggcgtcgactggagcgaccgcgacgctccggagctcggttattggctcggcgtgcagcattggggcaacggctacgccaccgaagccgcgcgggcagtgatcgacttcaccttcgaggtgcacggcgccaagcagatgatctccggtgcccgtgtgatcaatccggcgtcgcgcaacgtgctggagaagtgcggcttccaatggaccggcgtcgagctgcaccgtttcgagtcgatcggatcatcgaccccggtcgactgcttccgtctgacccgcggggtgtggtcgtcgctgaaaaagtggggcaccaccaagcggcggtgctga

SEQ ID NO: 143429 - protein, 199 aa, Rhodopseudomonas palustris CGA009
MLQEIPTTTPSLREARPCVLETERLTLRKPVLADVQAIASLANDRRVVEMTRRMPFPYTRDDAARFVTALPKSSDSVFLIEAEDLEPIGLVGVDWSDRDAPELGYWLGVQHWGNGYATEAARAVIDFTFEVHGAKQMISGARVINPASRNVLEKCGFQWTGVELHRFESIGSSTPVDCFRLTRGVWSSLKKWGTTKRRC

SEQ ID NO: 143430 - DNA, 507 bp, Bacillus cereus ATCC 10987
  CDS (1)..(507): transl_table=11
atgtttcatacagatcgtttacaaattcgtaaatatacaatggatgatttacagttctacgcttcattatggggaaatgagaaggtaatgcgctatattggaaatgggacgttaaaaacatatatgcagtgtaaaaaaagtttggaagagtgggtgattcctagctataaaaacggtctcggtttatttgtattgattgaaaaggaaacgggaatacgaattggtcatgcaggattagtaaagcagcaaatagatggaaaagaggaaattgaaattggttattggttattacctcggtattggggaaaagggtatgcgaaagaagcagcggcagcatttcgagattatggcttccaagcgttacgaatgaataaattaatttctcttattaatccggatcaccccgcctcaatctttgttgctagaaaaacggggcttagttatgagaaaacaacttcatttcatggcatggatgttctcgtttattccattaggcgcattggatga

SEQ ID NO: 143431 - protein, 168 aa, Bacillus cereus ATCC 10987
MFHTDRLQIRKYTMDDLQFYASLWGNEKVMRYIGNGTLKTYMQCKKSLEEWVIPSYKNGLGLFVLIEKETGIRIGHAGLVKQQIDGKEEIEIGYWLLPRYWGKGYAKEAAAAFRDYGFQALRMNKLISLINPDHPASIFVARKTGLSYEKTTSFHGMDVLVYSIRRIG

SEQ ID NO: 143432 - DNA, 600 bp, Gibberella zeae PH-1
  CDS (1)..(600)
atgagtcaagccacactccgcaccgaccgtctcgagctacggcctctcggacccgaacacggagactacatctaccaactggactcagatcctcaagtgatgaagtacattggttacggcaagccactctcggccgatgattccgccatcgtacacaagctgctgctcgagacagcctcattcggatccgggctcggatgctgggctggattcgcaggcgagaactttgtgggctggtggatattggcacccagccaaagcaacgatactccccccgaggtcaacaagaagcgtgtcgagttcgggctgagaatccttcccaagttttggggtcagggttacgcaaaggagggttcccgagcggtggtgaagcatggactggaagacctcaacgttgaggaagtgtttggcgagaccatggctgtgaaccagggctcgcgggtcatcatggaaaagattggcctcaagcatgtccgaacattttacaacaagtacgacactcctcctcctggcattgaggagggtgaagtggaataccgggtcacaagggacgagtggtcatcgcaacaagcgtgtactatggtgctggtttatgtataa

SEQ ID NO: 143433 - protein, 199 aa, Gibberella zeae PH-1
MSQATLRTDRLELRPLGPEHGDYIYQLDSDPQVMKYIGYGKPLSADDSAIVHKLLLETASFGSGLGCWAGFAGENFVGWWILAPSQSNDTPPEVNKKRVEFGLRILPKFWGQGYAKEGSRAVVKHGLEDLNVEEVFGETMAVNQGSRVIMEKIGLKHVRTFYNKYDTPPPGIEEGEVEYRVTRDEWSSQQACTMVLVYV

SEQ ID NO: 143434 - DNA, 609 bp, Aspergillus nidulans FGSC A4
  CDS (1)..(609)
atgccccaggcaacactacatacgccacggctgaagctcgttccctacgccgacgagcactaccccctcagcaaggcgctcgaccaggaccctgaggtcatgaagcacatcggcttcggacgcccgctcacagacgacgagacgaaacaagtccacgcgtggctacttaactcctgcacctcagtcccagggctgggcacctgggtcgcatacgcagaggataaacctgatccgatcggatggtggattctcgcgcctacgcctcttgatccgtctaaaccaactgagaacttcagcaccgagcgctcagaaacgggatacagactgctacgcgagcactggggaaagggctatgccaccgaaggctcaaaagaggtcatccgccatgcattccaggagctgggtctgacggaggtctttggcgagaccatgacggtgaacaagccaagcaggaaagttatggagaagctgggcatgaagcacgtcgatacttggttcaatacctatccgaccccgccgccggggattgaagaaggggaggtccgctatcggattacgcgcggggagtgggaggccatgcaatatgggagtccgccaagtagttgttag

SEQ ID NO: 143435 - protein, 202 aa, Aspergillus nidulans FGSC A4
MPQATLHTPRLKLVPYADEHYPLSKALDQDPEVMKHIGFGRPLTDDETKQVHAWLLNSCTSVPGLGTWVAYAEDKPDPIGWWILAPTPLDPSKPTENFSTERSETGYRLLREHWGKGYATEGSKEVIRHAFQELGLTEVFGETMTVNKPSRKVMEKLGMKHVDTWFNTYPTPPPGIEEGEVRYRITRGEWEAMQYGSPPSSC

SEQ ID NO: 143436 - DNA, 606 bp, Leptospira interrogans serovar Copenhageni str. Fiocruz L1-130
  CDS (1)..(606): transl_table=11
atgaaattgcaggctttacgatttttgacggataaaaaaatggttttggaaactgaaagattgattttaaggggatgggaaaataaagatttggaaccgttttatcagatgagttccgatctggttgtgatggaacactatcctgccttattaacgaaagaagattccgaaaggttcgtcgcaaaaatgaaaattcattttgaagaatttggatatgggctttggattttggaaataaaaaatacaaaagaatgggtcggttataccggttttttaaacgtttcttttaccgctccgtttactcctgcggttgaaatcggatggagattaaattcttctttttggaatcgaggatatgcgacggaagctgcgtttgtctgtttaaattacggatttgagcggtttggattttcaaagattgtttcttttacttctgttttaaatactcgttccgagtccgtgatgaaaaagataggacttaaaaaaatcggatcattttatcatccaaatcttcccatcaaacatagattatccgagcatgttctttaccaaattaccagttcagaatggaacgaacaaaacgtttttcttactgatattttttga

SEQ ID NO: 143437 - protein, 201 aa, Leptospira interrogans serovar Copenhageni str. Fiocruz L1-130
MKLQALRFLTDKKMVLETERLILRGWENKDLEPFYQMSSDLVVMEHYPALLTKEDSERFVAKMKIHFEEFGYGLWILEIKNTKEWVGYTGFLNVSFTAPFTPAVEIGWRLNSSFWNRGYATEAAFVCLNYGFERFGFSKIVSFTSVLNTRSESVMKKIGLKKIGSFYHPNLPIKHRLSEHVLYQITSSEWNEQNVFLTDIF

SEQ ID NO: 143438 - DNA, 600 bp, Bradyrhizobium sp. ORS278
  CDS (1)..(600): transl_table=11
atgcgttgtctcggccgggctttcgagtcttgggggggcatcatgaccatcgtcaccgaacgtctcaccttgcgcgaatggcgcgatgaggatcgcgcgccgtttgcggcgatgtcggtcgatccagccgtgatgcggtatctgcgggcgctgccggcgcgacaggacagcgaccggtggatcgattttcagatcgcgcatcaggccgagcacggcttcggcttctgggtggtcgaagaccgcgccaccggcgccttcctcggcgccaccggattgttcaaggtcttcttcgacgccccgttcacgccggcggtcgagattggctggcggctcgcgcgaccggcctgggggcgggggattgcaacggaggcggcgcgcgcgtcgctcgccatcggcttcgatcagttcgctctcgacgagatcatcgcctacgccgcgccagccaatgcggcctcgcagaatgtcatgcgcaagctcggcatgatccgggacgaagcctctgacttcgatcatccgcgcgtcgaagccgacagcccgctgcgccggcaggtgatgtaccggctgccgcgcgaggtatgggccgcaagcgagatgcggtag

SEQ ID NO: 143439 - protein, 199 aa, Bradyrhizobium sp. ORS278
MRCLGRAFESWGGIMTIVTERLTLREWRDEDRAPFAAMSVDPAVMRYLRALPARQDSDRWIDFQIAHQAEHGFGFWVVEDRATGAFLGATGLFKVFFDAPFTPAVEIGWRLARPAWGRGIATEAARASLAIGFDQFALDEIIAYAAPANAASQNVMRKLGMIRDEASDFDHPRVEADSPLRRQVMYRLPREVWAASEMR

SEQ ID NO: 143440 - DNA, 561 bp, Bradyrhizobium sp. ORS278
  CDS (1)..(561): transl_table=11
atggccaagccgccgcttccccacccgatcctgtcgactgcgcggttgcaactgcgccagtttcgccccgacgatgtcgacgcgatgcatcgctgcttcagcgatcccgatgcgatgcggttctggaaccatccggtgcacaccaagcgcatcgagagcgagcgcgctgtgcgcaggttcatcgactgcacgccgtcctactatcggttctgggcggtggcggaggcgacgtccgatcgctgcatcggcatggtcaattatcacgacggccacatccgcagccggcgcgccgcgatcggctacatcgtcgatcccgcccgccagcgtcagggcattgccggcgaggccgttgctgcgatgctcgactactgcttcggcgagctcggcctgcaccgccttcaggcgttgatccatcccgacaatgctccgtcccgcggccttgccgagaagctcggcttccgctgcgagggccggctgcgcgatcatctgcgcgtcgacggcgaatggcgcgacgacatgctctatgcgctgctggcaacggattcgcgcggacgcgcgtga

SEQ ID NO: 143441 - protein, 186 aa, Bradyrhizobium sp. ORS278
MAKPPLPHPILSTARLQLRQFRPDDVDAMHRCFSDPDAMRFWNHPVHTKRIESERAVRRFIDCTPSYYRFWAVAEATSDRCIGMVNYHDGHIRSRRAAIGYIVDPARQRQGIAGEAVAAMLDYCFGELGLHRLQALIHPDNAPSRGLAEKLGFRCEGRLRDHLRVDGEWRDDMLYALLATDSRGRA

SEQ ID NO: 143442 - DNA, 546 bp, Desulfovibrio vulgaris subsp. vulgaris str. Hildenborough
  CDS (1)..(546): transl_table=11
atgacacccgtgacgctccatacgacgcggcttgtgctgcggccgtggcttgactccgacaggcagcccttcgcagcgctcaacgccgaccccgaagtcatgcggtatttccccgcgccactcttgcgcgaggaaagcgacgcgatggcagaccggatagtgctgctcatggaacggcaagggtggggcttctgggccgtcgagcgcacacaggacaagtcgttcatgggtttcgtggggctgcatcagcccgaagacctgcccttctctccctgtaccgaagtcggttggcggctggcacgtccctattgggggtgcggttatgccaccgaagcggcccgcgccagtctctccttcgccttcgggcaacttggcctgtccagtgtcgtggccttcaccgccgtcagcaacacccggtcgcaaggcgtgatgcggcgtttgggtatgacgctggagtcccccttcgaccatccccgcctgcctgacgaccacccgttgagaccgcacgtcctctaccgcatcacgcacgaccgcttcgcacggtag

SEQ ID NO: 143443 - protein, 181 aa, Desulfovibrio vulgaris subsp. vulgaris str. Hildenborough
MTPVTLHTTRLVLRPWLDSDRQPFAALNADPEVMRYFPAPLLREESDAMADRIVLLMERQGWGFWAVERTQDKSFMGFVGLHQPEDLPFSPCTEVGWRLARPYWGCGYATEAARASLSFAFGQLGLSSVVAFTAVSNTRSQGVMRRLGMTLESPFDHPRLPDDHPLRPHVLYRITHDRFAR

SEQ ID NO: 143444 - DNA, 507 bp, Bacillus thuringiensis serovar konkukian str. 97-27
  CDS (1)..(507): transl_table=11
atgtttcatacagatcgtttacaaattcgcaaatatacaatagatgatttacagttctacgcttcactatggggaaatgagaaggtaatgcgttatattggaaatgggacgttaaaaacatatatgcagtgtaaaaaaagtttggaggagtgggtgattcctagctataaaaacggtctcggtttatttgtattaattgaaaaggaaacgggaatacgaattggtcatgcaggattagtgaagcaacaaatagatggaaaagaggaaattgaaattggttattggttattacctcagtattggggaaaagggtatgcgaaagaagcagcagcagcatttcgagattatggcttccaagcgttacgaatgaataaattaatctctcttattaatccggaccaccccgcctcaatctttgttgccagaaaaacagggcttagttatgagaaaacaacttcatttcatgggatcgatgttctcgtttattctattaggcgtgttggatga

SEQ ID NO: 143445 - protein, 168 aa, Bacillus thuringiensis serovar konkukian str. 97-27
MFHTDRLQIRKYTIDDLQFYASLWGNEKVMRYIGNGTLKTYMQCKKSLEEWVIPSYKNGLGLFVLIEKETGIRIGHAGLVKQQIDGKEEIEIGYWLLPQYWGKGYAKEAAAAFRDYGFQALRMNKLISLINPDHPASIFVARKTGLSYEKTTSFHGIDVLVYSIRRVG

SEQ ID NO: 143446 - DNA, 507 bp, Bacillus cereus E33L
  CDS (1)..(507): transl_table=11
atgtttcatacagatcgtttacaaattcgcaaatatacaatggatgatttacagttctacgcttcactatggggaaatgagaaggtaatgcgctatattggaaatgggacgttaaaaacatatatgcagtgtaaaaaaagtttggaggagtgggtgattcctagctataaaaacggtctcggtttatttgtattaattgaaaaggaaacaggaatacgaattggtcatgcaggattagtaaagcagcaaatagatggaaaagaggaaattgaaattggttattggttattacctcagtattggggaaaagggtatgcgaaagaagcagcggcagcatttcgagattatggcttccaagcgttacgaatgaataaattaatctctcttattaatccggaccaccccgcctcaatctttgttgctagaaaaacagggcttagttatgagaaaacaacttcatttcatgggatcgatgttctcgtttattccattaggcgtgttggatga

SEQ ID NO: 143447 - protein, 168 aa, Bacillus cereus E33L
MFHTDRLQIRKYTMDDLQFYASLWGNEKVMRYIGNGTLKTYMQCKKSLEEWVIPSYKNGLGLFVLIEKETGIRIGHAGLVKQQIDGKEEIEIGYWLLPQYWGKGYAKEAAAAFRDYGFQALRMNKLISLINPDHPASIFVARKTGLSYEKTTSFHGIDVLVYSIRRVG

SEQ ID NO: 143448 - DNA, 585 bp, Legionella pneumophila subsp. pneumophila str. Philadelphia 1
  CDS (1)..(585): transl_table=11
ttgccatctttatttggaaggaagaatatatttgccatgaaatatttaacaacctcaaggcttttgctaagagcttgggatagagaagatactatccctttctatagaatgagtcaggatcctcgggtcatgaagtatttccccgaattgtggtctatggatatggttaaagatttcattatcagaatgaatgaacaattatctcaaaaaaaatttactttgtgggcagctgaagtgaaggacaataagcagtttattggttttattggattaaatgctccaacctggaatgctcacttcactccttgtgtagagataggctggcgtttggcaactgagttttgggggcaaggttatgctacagaaggggcaaaagcggtacttgaatatgcttttctggatatgcatattcccgaaatagtttcttttaccgtacctgataattcccgctcaaggggtgttatggagcggattgggatgatcagagattttgcgggagattttttacatcctaaattagtctctgatcacaggttagcgaagcatgttttatatcgtatacagaattccttaataaaagtttga

SEQ ID NO: 143449 - protein, 194 aa, Legionella pneumophila subsp. pneumophila str. Philadelphia 1
MPSLFGRKNIFAMKYLTTSRLLLRAWDREDTIPFYRMSQDPRVMKYFPELWSMDMVKDFIIRMNEQLSQKKFTLWAAEVKDNKQFIGFIGLNAPTWNAHFTPCVEIGWRLATEFWGQGYATEGAKAVLEYAFLDMHIPEIVSFTVPDNSRSRGVMERIGMIRDFAGDFLHPKLVSDHRLAKHVLYRIQNSLIKV

SEQ ID NO: 143450 - DNA, 576 bp, Pseudomonas fluorescens Pf-5
  CDS (1)..(576): transl_table=11
ttgcggtttcatgagcgccccctttcaggaagctcacggatgaacctgcatttcgaaaccgcccgcctgttgctgcgcccccgtacccttgagcacttccaggcgtgcctgggtatggatcaggatcccgaagtcacgcgcttcatccccgggacctgggatggcgggcagtggcacagggactttttacaggggcgcatgacccaggatttcggcccgcgctgcgggtattgggcgatcttcgccaaggacgcgccggatgagttgctgggctgggtttccttcattcccttcgatgctgtggggcccgagctggaaatgggctggcgcctggtgcggcgggcctgggggcggggttttgccagcgaggccgcgcggcggatcgtcgagcatgcgtttgccgacccggcggtgcagcgcatagtcgccgatgcccatgtcgacaacgaggcgtcgttggcggtggcgcgcaaggtcggttttcgcttcactcacaatgtcgatttcgaaggcttgccctgccgcttctttgcaatgacccgtgaggatttttgccagcaacggccggctggctga

SEQ ID NO: 143451 - protein, 191 aa, Pseudomonas fluorescens Pf-5
MRFHERPLSGSSRMNLHFETARLLLRPRTLEHFQACLGMDQDPEVTRFIPGTWDGGQWHRDFLQGRMTQDFGPRCGYWAIFAKDAPDELLGWVSFIPFDAVGPELEMGWRLVRRAWGRGFASEAARRIVEHAFADPAVQRIVADAHVDNEASLAVARKVGFRFTHNVDFEGLPCRFFAMTREDFCQQRPAG

SEQ ID NO: 143452 - DNA, 570 bp, Pseudomonas fluorescens Pf-5
  CDS (1)..(570): transl_table=11
atggagccgatactgcaactcgaaagcgcgcgcctgctgctgcgtcaatggcgcgacgatgatttgccggcatttgcggcgatgtgtgccgatccgcaggtcatgcgctactttccggcgcccttgagccgtctggaaagcgcggcgctgatcggccgggtgcgtgggcatttcgccgaacatggcttcggactctgggccctggagcgtaaggatagcggtgagttcatcggttttaccggtctgggcgtcgtgggtttcgaagcgcccttcacgccggcggtggaaatcggctggcgcctggcccgcgagcactggggcctgggttacgccagtgaggccgcctggaccgccctgcgctgcgctttcgatcgtctggcgctggaggaggtggtggcgttcacgacccggaccaatctgccgtcgcagaaggtcatgcaggccattggtatgcatcacgccgtcgaggatgacttcgaacacccgaacctcgctggcgatcacccgctgcgcgagcatgtgctgtaccgcattacccgcgaacaatggttggaaaccttgcatggatag

SEQ ID NO: 143453 - protein, 189 aa, Pseudomonas fluorescens Pf-5
MEPILQLESARLLLRQWRDDDLPAFAAMCADPQVMRYFPAPLSRLESAALIGRVRGHFAEHGFGLWALERKDSGEFIGFTGLGVVGFEAPFTPAVEIGWRLAREHWGLGYASEAAWTALRCAFDRLALEEVVAFTTRTNLPSQKVMQAIGMHHAVEDDFEHPNLAGDHPLREHVLYRITREQWLETLHG

SEQ ID NO: 143454 - DNA, 507 bp, Colwellia psychrerythraea 34H
  CDS (1)..(507): transl_table=11
gtgttgattattattgaaactgaaagattatgtgttcgtcaaattacgaatgaggatgttgataacctatcaaaagtattagctgatcctgtcgtaatgcaatactcaacggtaggtgttcacaccgaacaacaaatctatgattatatagcgaactgcaaaaatcaatatgacttaaatggttatggccattgggcaatttttaactctattactgatgagtttgttggagtgtgcggtcttaataaacataaagtagatactgatgatgttatacatataaattatcgtcttgctagggaccaacagggtaaaggttatgctgttgagtctacatttggtgtattagattttgctaaaaatgccttaaaccttaaagtggtgcacgcactaatagagccaacgaatattagctctgttaaagtgataaacagaacaggctttcaatttattaaatcttctgtatttcgtggtttcgaagtagacatatatcaagtgtctttataa

SEQ ID NO: 143455 - protein, 168 aa, Colwellia psychrerythraea 34H
MLIIIETERLCVRQITNEDVDNLSKVLADPVVMQYSTVGVHTEQQIYDYIANCKNQYDLNGYGHWAIFNSITDEFVGVCGLNKHKVDTDDVIHINYRLARDQQGKGYAVESTFGVLDFAKNALNLKVVHALIEPTNISSVKVINRTGFQFIKSSVFRGFEVDIYQVSL

SEQ ID NO: 143456 - DNA, 570 bp, Pseudomonas syringae pv. phaseolicola 1448A
  CDS (1)..(570): transl_table=11
atggaaccgatactcaagctagacagcgcccggctgctgatgcggcagtggcgcgacgatgacttgccagcattcgccgagatgtgcgcggactgccgcgtcatgcgttatttccccgaaccgctgagccgtcttgaaagcgccgccatgatcggacggttacgtggtcattttgccgaattgggcttcgggttttgggcgctggagcgtaaggataccggcgaattcatcggttttaccggtctgcatgttgtgggtttcaaggcaccttttacgccggccgtggaaatcggctggcggctggcttatgaccactggggcctgggctttgccagcgaggcggcatggaccgcgctgggctgtggtttcgagcgcctgaatttgaaggagatcgtgtcgtttaccgcggtcaataatcagccgtcgcaaaaggtgatgcaggcaatcggtatgcagcaggatgagtccggcaacttcgatcatcccaatctggatgacggccacccgctcaagccgcacgtgttgtaccggatcagccatgagcagtggctcaagacgctgaagccttga

SEQ ID NO: 143457 - protein, 189 aa, Pseudomonas syringae pv. phaseolicola 1448A
MEPILKLDSARLLMRQWRDDDLPAFAEMCADCRVMRYFPEPLSRLESAAMIGRLRGHFAELGFGFWALERKDTGEFIGFTGLHVVGFKAPFTPAVEIGWRLAYDHWGLGFASEAAWTALGCGFERLNLKEIVSFTAVNNQPSQKVMQAIGMQQDESGNFDHPNLDDGHPLKPHVLYRISHEQWLKTLKP

SEQ ID NO: 143458 - DNA, 573 bp, Ralstonia eutropha JMP134
  CDS (1)..(573): transl_table=11
atggccaagctcatcgaaatcgacacgccgcgcctgcgcctgcgccagtggcgcaatgccgacgacgcgccgtttgcggcactgaacgccgacgccgaggtgatgcgctactttcccgcgccactgagccgggcggaaagcgacggcctggccaaccgttgccgcgacaagattgcctcgctcggctggggcttctgggcatgcgagcgtaaggccgatggcgctttcatcggcttcgtcgggctcaacgtgccggcagcggccttgccgttcgcgccatgcgtggagatcggctggcggctcgcgcgcgaggcatgggggcagggcttcgcgaccgaagcggcacgcgcggcgctggccgtcggatttgagcggctcgggctcgatgagatcgtgtcctttaccgcgctcggcaaccgccgctcgcgcgcggtgatggagcgcctcggcatgcatgaggatgcgctcgtgttcgagcaccccgcactgccggaaagccatccgcttcggtcacattgcctctaccggttggctcacgccgagtgggcagctgcgacacaaggtcgcggctga

SEQ ID NO: 143459 - protein, 190 aa, Ralstonia eutropha JMP134
MAKLIEIDTPRLRLRQWRNADDAPFAALNADAEVMRYFPAPLSRAESDGLANRCRDKIASLGWGFWACERKADGAFIGFVGLNVPAAALPFAPCVEIGWRLAREAWGQGFATEAARAALAVGFERLGLDEIVSFTALGNRRSRAVMERLGMHEDALVFEHPALPESHPLRSHCLYRLAHAEWAAATQGRG

SEQ ID NO: 143460 - DNA, 570 bp, Pseudomonas fluorescens PfO-1
  CDS (1)..(570): transl_table=11
atggagccgatacttgagctggaaagcgcgagactgctgatgcgccagtggcaggacgcggatttgccggcatttgcggcgatgtgcgccgatccgcaggtgatgcgctactttcccgcgcccttgagccggctggaaagcgccgcgctgatcggccgggtacgcgggcattttgccgagcacggttacggcctgtgggcgctggagcgcaaggacagcggcgagttcatcggttttaccgggctcggcgtggtcggcttcgatgcgccgttcacacccgcggtggaaatcggttggcggctggccaaggaacactggggccttggttatgccagcgaggcggcgtggactgcgctgcgctgcggttttgaccggttagccctgaaggaaatcgtgtcctttactgcgcagagcaatctgccgtcggaaaaagtcatgcaggcgatcggcatgcatcacgatccagccgacgattttgatcacccgaaactggcggtcgaccatccgttgagtcgacatgtgttgtaccgcatcaccagggagcaatggctgcagaccctgcatggctaa

SEQ ID NO: 143461 - protein, 189 aa, Pseudomonas fluorescens PfO-1
MEPILELESARLLMRQWQDADLPAFAAMCADPQVMRYFPAPLSRLESAALIGRVRGHFAEHGYGLWALERKDSGEFIGFTGLGVVGFDAPFTPAVEIGWRLAKEHWGLGYASEAAWTALRCGFDRLALKEIVSFTAQSNLPSEKVMQAIGMHHDPADDFDHPKLAVDHPLSRHVLYRITREQWLQTLHG

SEQ ID NO: 143462 - DNA, 540 bp, Burkholderia sp. 383
  CDS (1)..(540): transl_table=11
atgccactcatctcctcaccgcccgttctcgacacaccgcgtctcatcctcgaaggccatccgctcggcgacttcgaggcgctcgccacgatgtgggccgagccgaaggtcgtcgagcacatcttcaacggcgagccgtccgcaccgcgcgactcgtggatgcgcatgctcgcgtatcgcgggctgtggccgctgcttggctatggctactgggcgattcgcgagaaggcatcgggccgctatgtcggcgatctcggcttcgccgatttccaccggctcatcgagccgtcgattcgcaacgtgccggaagccggctgggcactggcgacgtgggcgcacggcaagggttacgcgaccgaggcgctctcggctgcgctggcgtggctcgacgggcaacaacggttcgagcgcagcgtgtgcctgatcgcgccgaccaacgtcgcgtcgatccgcgtggcggaaaaggccggttatggggagccggtgcagatccggttcaacgacaccgattcattgctgttttcgcgcgcgagccgatag

SEQ ID NO: 143463 - protein, 179 aa, Burkholderia sp. 383
MPLISSPPVLDTPRLILEGHPLGDFEALATMWAEPKVVEHIFNGEPSAPRDSWMRMLAYRGLWPLLGYGYWAIREKASGRYVGDLGFADFHRLIEPSIRNVPEAGWALATWAHGKGYATEALSAALAWLDGQQRFERSVCLIAPTNVASIRVAEKAGYGEPVQIRFNDTDSLLFSRASR

SEQ ID NO: 143464 - DNA, 558 bp, Frankia sp. CcI3
  CDS (1)..(558): transl_table=11
atgagtctgaccacgatcattccccttctcacgacggaccggctcgtcctgcggcccatccacaacgacgacgtcgccggctacaccgagatctggtccgatcccgagttcacccgctacttccaccggccgaccgacccggacggcgtctggcatgccctggccggctgcatgggctgctgggtgctgaccggcgtaggtccgtggtcggttgtcgagaaggcgagcgggcagctcgtcggccaggcggggctgtggaccgaacccggctggccgggcatcgaggccgtctggttcctgcgccgggaccgctgggggcgcggctatgccaccgaggccgccaccgcggcactgacctgggtgttcgcccagcgccccgacctcaccgaggtcgtctcggtcatcgtcccggccaacgccgcgtctgtccgggtcgccgaacgcctcggcatggcatacgtccgcagcgagttcctccacgacgaggcccatgccgtctacgcggtcagccgggccggctgggtcaccccaaccactcgacagcaagcttacggataa

SEQ ID NO: 143465 - protein, 185 aa, Frankia sp. CcI3
MSLTTIIPLLTTDRLVLRPIHNDDVAGYTEIWSDPEFTRYFHRPTDPDGVWHALAGCMGCWVLTGVGPWSVVEKASGQLVGQAGLWTEPGWPGIEAVWFLRRDRWGRGYATEAATAALTWVFAQRPDLTEVVSVIVPANAASVRVAERLGMAYVRSEFLHDEAHAVYAVSRAGWVTPTTRQQAYG

SEQ ID NO: 143466 - DNA, 585 bp, Frankia sp. CcI3
  CDS (1)..(585): transl_table=11
atgacgttggaactggccgagcccacgccccaggtctacgtgccgaccgtgacaacccgccggctgagcctcagcggctggacagccgtggacatcccggcgtacacggcgatggcagcccacccggatatgagcgcgtacaccggttcaccggcagacgagggcgcggtctggcgaatgttcgctttccaggtggggcactgggcgttgcaggggttcgggatgtggctcgcgcatgaccggacgaccggcgagttcgtgggccgggtggggctgtacgaggagtacggctggcccggcaccgaggtggcctggaccatccgccgggaacggtggggcgagggcctcgctaccgaaggcggcgctgcggccctggagtatgccttcgaggtgttggcccgggagcggctgatcagcatcatccacccggagaacgcggcctcgatccgtgtcgcggagaagctcggcctcgctctggccgaaggtccggtagaccggggcgggagaccccggaacatctacgcgatcacccgccacgactgggccgctcgccggcaggccagcgcccccgccgacacaggctga

SEQ ID NO: 143467 - protein, 194 aa, Frankia sp. CcI3
MTLELAEPTPQVYVPTVTTRRLSLSGWTAVDIPAYTAMAAHPDMSAYTGSPADEGAVWRMFAFQVGHWALQGFGMWLAHDRTTGEFVGRVGLYEEYGWPGTEVAWTIRRERWGEGLATEGGAAALEYAFEVLARERLISIIHPENAASIRVAEKLGLALAEGPVDRGGRPRNIYAITRHDWAARRQASAPADTG

SEQ ID NO: 143468 - DNA, 534 bp, Myxococcus xanthus DK 1622
  CDS (1)..(534): transl_table=11
ttgccagccatgctccaggcatttcagaacatcaccacagaacgcctgctgcttcgcgccgtgcgcgacagcgatttggacgacgtgttcgccctgcatgcggatccggagacgaaccggttcagcgtttccggccccatgccctcgttggacgtcgcgaggaagcaactggcgctgtggctggacgactggtcccgtcacggcgtgggctactgggtggtggtgcggcgcgaagccccgggtgacgtcgtgggcttcggtggcgtgcgccacaaggtgctcgaaggacgcacggtgctgaacctcgcctatcgcttcacgccccggagctggggcaccgggtatgcgacggagatggcccgcacggccctggcgctggcccagcgtcacctgcccgacgtgcccgtggtcgccatcatccaccgggacaatgaggcatccctccgcgtcgcggagcgcagcggaatgcgcttcgagcgcgtcatcgactacgagggcacacccagccggctctacgtgcccgccccgccgtaa

SEQ ID NO: 143469 - protein, 177 aa, Myxococcus xanthus DK 1622
MPAMLQAFQNITTERLLLRAVRDSDLDDVFALHADPETNRFSVSGPMPSLDVARKQLALWLDDWSRHGVGYWVVVRREAPGDVVGFGGVRHKVLEGRTVLNLAYRFTPRSWGTGYATEMARTALALAQRHLPDVPVVAIIHRDNEASLRVAERSGMRFERVIDYEGTPSRLYVPAPP

SEQ ID NO: 143470 - DNA, 591 bp, Pseudomonas aeruginosa UCBPP-PA14
  CDS (1)..(591): transl_table=11
atggccgacctgaccagcctgagcatcgagcatctgcgctcgccacggctgtatacccaccgtctgatcctgcggccctggctggtgcaggaccgagccaggttcgccgagctgaatgccgacccgcgggtgatggagttctttccgtcctgcctggatcgcgcccagagcgacgcgttgctgcgccgcatcgacgcgcacttcgccgagcacggttttggctggtgggcgctgcaggtcaagggcggcgatcctttcatcggctacgtggggctggaggtcgtggacttcgatgcgcccttcgtacccgcggtggccatcggctggcgtctcgccgccgagcattgggcggagggcttcgcccacgaggcggccgaggcggcgctgagctacgccttcgatacccttggcctggaccaggtggtggctttcaccgtaccggccaacgagaactccctgggactgatggagcgcctggggatgcatcgcgatcccaccgacgacttcgagcatcccgacctgccccccggccaccgcttgcggcatcatgtgctgtaccggttgacgcgcgaggactggcttcgcagatga

SEQ ID NO: 143471 - protein, 196 aa, Pseudomonas aeruginosa UCBPP-PA14
MADLTSLSIEHLRSPRLYTHRLILRPWLVQDRARFAELNADPRVMEFFPSCLDRAQSDALLRRIDAHFAEHGFGWWALQVKGGDPFIGYVGLEVVDFDAPFVPAVAIGWRLAAEHWAEGFAHEAAEAALSYAFDTLGLDQVVAFTVPANENSLGLMERLGMHRDPTDDFEHPDLPPGHRLRHHVLYRLTREDWLRR

SEQ ID NO: 143472 - DNA, 579 bp, Pseudomonas aeruginosa UCBPP-PA14
  CDS (1)..(579): transl_table=11
atgaacgcgaaccttcccccttccgccatttccgaactgcatggcccgcgcctgctgctgcgcgcctggcgcgacagcgaccgcgaggcgttcgccgagatgtgcgccgacccgcaggtaatggaattcttccccagtgtgctcgaccgcgcgcagagcgacgccttggtcgatcgcgtccaggcgcattttgccgagcgtggctacgggccctgggccctggagctaccgggcgaggcggcgttcatcggattcaccggcctgttcgacgtgaccatggacgtgcacttcgccccgaccgtggagatcggctggcgcctggcgcccgcctactggggccgtggattcgcccgcgaagcggcggaaaccgccttggacttcgccttcgagcggctgcgcctgcccgaggtggtggccttcaccacgccgcccaaccgccgctcctggggcttgatggagcgcctgggcatgcgtcgcgatccggccgaggatttcgaccacccactcctggcagcggatcacccgatgcgccggcatatcctctatcgcgtcgacgcggcccgctgggcggagcggtga

SEQ ID NO: 143473 - protein, 192 aa, Pseudomonas aeruginosa UCBPP-PA14
MNANLPPSAISELHGPRLLLRAWRDSDREAFAEMCADPQVMEFFPSVLDRAQSDALVDRVQAHFAERGYGPWALELPGEAAFIGFTGLFDVTMDVHFAPTVEIGWRLAPAYWGRGFAREAAETALDFAFERLRLPEVVAFTTPPNRRSWGLMERLGMRRDPAEDFDHPLLAADHPMRRHILYRVDAARWAER

SEQ ID NO: 143474 - DNA, 513 bp, Shewanella sp. ANA-3
  CDS (1)..(513): transl_table=11
atgaaggaagccaaaatgattatacaaacagagcgtttaatactcaggccatttaccgagcaggatatcgatgccctctatttgatgaacagtaaccctgcgatgttgaaatacattccaaccgtgccttttactgagcgtgagcaggcacgtgaactgttccataacgtgatttcgcaggattatcagcagcgaggatttggtcgctgggcggtggagcataaagccgataataaagtgattggcttttgcggaccaaagtttattcctgaatataacgaagtcgaaattggctatcgctatttccccgagtattggggcaaggggattggtaccgaagctgctcaagcggcaattagcgtgttcccgcagtttggcattacgcaaatcattgcattgatcctagagggtaacattggctctgaaggcgttgctaaacgcataggcatgcattggcgtgaacctagcgagtttatggggcataaagtgaatgtctacgcaaaggtgctctaa

SEQ ID NO: 143475 - protein, 170 aa, Shewanella sp. ANA-3
MKEAKMIIQTERLILRPFTEQDIDALYLMNSNPAMLKYIPTVPFTEREQARELFHNVISQDYQQRGFGRWAVEHKADNKVIGFCGPKFIPEYNEVEIGYRYFPEYWGKGIGTEAAQAAISVFPQFGITQIIALILEGNIGSEGVAKRIGMHWREPSEFMGHKVNVYAKVL

SEQ ID NO: 143476 - DNA, 570 bp, Nocardioides sp. JS614
  CDS (1)..(570): transl_table=11
atggcgggcatgtccctgcccacgcccaccctgcacaccgatcgcgtgctcctgcggccgttcgacgacggcgacgcggacgccctctacgccctgcacagcgacgcccgggtgctgcgctactgggactcgccgccgtggaccgagcggggccgggccgagcgcttcatcgcgacctgccggcagctggcggaggagggcagcggggcgcgacccgcgatcgagcggcgctccgacggggtcttcctcggctggtgcggcctgacccggtggaacccggaccaccgcaccgccgcgctcggctactgcctccgggaggcggcctggggccacggctacgccaccgaggccgccgccgccctgctgcggtgggccttcgacaccctcgacctcaaccgggtccaggccgaggccgacacccgcaacgcggcctccgcccgggtcctggagaagctcggcttccgacgggagggcacgctgcgggaggactgcgtcgtgaacggcgaggtgtcggactcgtgggtctacggcctgctccggcgggagtggaccggcgccaccggggcatga

SEQ ID NO: 143477 - protein, 189 aa, Nocardioides sp. JS614
MAGMSLPTPTLHTDRVLLRPFDDGDADALYALHSDARVLRYWDSPPWTERGRAERFIATCRQLAEEGSGARPAIERRSDGVFLGWCGLTRWNPDHRTAALGYCLREAAWGHGYATEAAAALLRWAFDTLDLNRVQAEADTRNAASARVLEKLGFRREGTLREDCVVNGEVSDSWVYGLLRREWTGATGA

SEQ ID NO: 143478 - DNA, 507 bp, Bacillus cereus G9241
  CDS (1)..(507): transl_table=11
atgtttcatacagatcgtttacaaattcgcaaatatacaatggatgatttacagttctacgcttcactatggggaaatgagaaggtaatgcgctatattggaaatggaacgttaaaaacatatatgcagtgtaaaaaaagtttggaggagtgggtgattcctagctataaaaacggtctcggtttatttgtattaattgaaaaggaaacgggaatacgaattggtcatgcaggattagtgaagcagcaaatagatggaaaagaggaaattgaaattgggtattggttactacctcagtattggggaaaagggtatgcgaaagaagcagcggcagcatttagagactatggcttccaagcattacgaatgaataaattaatttctcttattaatccggaccatccagcctccatctttgttgctagaaaaacaggacttagttatgagaaaacaacttcatttcatgggatggatgttctcgtttattccattaagcgcgttggatga

SEQ ID NO: 143479 - protein, 168 aa, Bacillus cereus G9241
MFHTDRLQIRKYTMDDLQFYASLWGNEKVMRYIGNGTLKTYMQCKKSLEEWVIPSYKNGLGLFVLIEKETGIRIGHAGLVKQQIDGKEEIEIGYWLLPQYWGKGYAKEAAAAFRDYGFQALRMNKLISLINPDHPASIFVARKTGLSYEKTTSFHGMDVLVYSIKRVG

SEQ ID NO: 143480 - DNA, 516 bp, Exiguobacterium sibiricum 255-15
  CDS (1)..(516): transl_table=11
atggaaagtgaacgactggaaatgcgaccgttcgtagaagaggattttacgttttataaaacccttgttcaaaatgagcaggtcatgcgttacatcaacggcggtgtcgtcttagacgaggataaggcgcggagttggtttgagcgtcaactggatcgctacaaggatgagcggcaaaccggatttttattgttaatcaaaaaagagacgaatgaaccgattggatttgccggactgcttttacaaacagtcgatggaatcgaggaactcgaagtcggctactggttgacgccgattcattggaaagtgggatatggccgggaagcagccaaacgactgatgcgcgaagcattcgagcggggacatgaccgtctcatttccatcattcatccggaaaatcattcttcgcaaaatgttgcgcgggcgaatgggttacaatgggaaaaagacacgttgttcaacggaattccggtcgttatctattcctgccggttgtcccgattgttcagaggttga

SEQ ID NO: 143481 - protein, 171 aa, Exiguobacterium sibiricum 255-15
MESERLEMRPFVEEDFTFYKTLVQNEQVMRYINGGVVLDEDKARSWFERQLDRYKDERQTGFLLLIKKETNEPIGFAGLLLQTVDGIEELEVGYWLTPIHWKVGYGREAAKRLMREAFERGHDRLISIIHPENHSSQNVARANGLQWEKDTLFNGIPVVIYSCRLSRLFRG

SEQ ID NO: 143482 - DNA, 537 bp, Flavobacteria bacterium BBFL7
  CDS (1)..(537): transl_table=11
atgatactaagatttgaaacagatcgattaattttaaggccttttgaagaatctgacgcaccttctctatatcagcttaatgatgatgaagaagtgatgcgctatacgggtgacaaatcttttaaggatctggaagacgctcgcaaatttgctatagactacagcaataatccacaaggtcagtaccttaattataaaatgggaagacttgctgtgatacgtaaagacgatcaagcctttttaggttggacaggacttaaatatcatgtagacggtgactttgtcgatattggatatcgttttatgaaaaaatattggggtaaaggatatgcaacagaatcgactaaacgcgctttgcaacacgcttttgatgaccatcaactaaatgttgttgtagctcatgttcacgagcataattatggttcacagcgcgttgcagagaggttgaatatgaaattagaccatcgttttttatggtctggcattaaacctgcacgatgctataaaatcacaagtgatgaatttagaaattcgtaa

SEQ ID NO: 143483 - protein, 178 aa, Flavobacteria bacterium BBFL7
MILRFETDRLILRPFEESDAPSLYQLNDDEEVMRYTGDKSFKDLEDARKFAIDYSNNPQGQYLNYKMGRLAVIRKDDQAFLGWTGLKYHVDGDFVDIGYRFMKKYWGKGYATESTKRALQHAFDDHQLNVVVAHVHEHNYGSQRVAERLNMKLDHRFLWSGIKPARCYKITSDEFRNS

SEQ ID NO: 143484 - DNA, 570 bp, Pseudomonas putida GB-1
  CDS (1)..(570): transl_table=11
atgacccccatccttgaactggaaagcgcacggctggtgctgcgccaatggcacgacgacgacctgcgcgagttcgccgcgctgtgcgccgacccgcaggtgatgcgctacttcccggcgcccctgacgcgtctggaagccgctgcattgatcggtcgggtgcgcgggcacttcaatgaatacggttttggtttgtgggcccttgagcgcaaggacagcggcgcgttcatcggcatgaccggtttgctgcacgtgggcttcgaggccgatttcacccccgctgtggagattggctggcgcctggcccgccgtcactggggcctgggttttgccagcgaggcggcgtggacctgcctgcgttgtgctttcgcccaattgcgcctggaggaagtcgtgtcgttcactagcgagagcaacctgccgtcgcagaaggtcatgcaagccatcggtatgcagcaggacgcgcagggcagtttcgagcacccccgcctgcctgagggccacccgctacgcccgcatgtgctgtaccgcatcgaccgcacccattgggagcgcaccctgcgcccctga

SEQ ID NO: 143485 - protein, 189 aa, Pseudomonas putida GB-1
MTPILELESARLVLRQWHDDDLREFAALCADPQVMRYFPAPLTRLEAAALIGRVRGHFNEYGFGLWALERKDSGAFIGMTGLLHVGFEADFTPAVEIGWRLARRHWGLGFASEAAWTCLRCAFAQLRLEEVVSFTSESNLPSQKVMQAIGMQQDAQGSFEHPRLPEGHPLRPHVLYRIDRTHWERTLRP

SEQ ID NO: 143486 - DNA, 564 bp, Erythrobacter sp. SD-21
  CDS (1)..(564): transl_table=11
atggctgacccggtccttacgaccgaacgcctcatcctgagacctcccgaggccggggacctgccgttcgtgcaggcgcagatgaatacgcctgccgtcatgcggttcctcggcggcacgccgcgcagcgaagacgaggtggcggcaagctttcaggtcgacctcgaggccttcgccagcggcgaccatcgccggtggaccgtatggtcgaaggatagagattgccgcgtgggcggctgcggtctttttcgtgtatacaccgaagccgcgccagacgccttgaagggcgagcacgaaatcggctggaccctcgccgagccgttctggggccggggctacgctaccgaggccgcgcgggaggttttggtctttgactttggggagcagggactcgcccacatctattctcagaccagcgaatctaatcagccctcgacaaggatgatgcaggagctgggtttcacgcatttgccccaactcggctatgtcgacccgctctatccgccgcgcgacaatccgaccacggtatggcgcttgaccggagaagaatgggaagccttgtga

SEQ ID NO: 143487 - protein, 187 aa, Erythrobacter sp. SD-21
MADPVLTTERLILRPPEAGDLPFVQAQMNTPAVMRFLGGTPRSEDEVAASFQVDLEAFASGDHRRWTVWSKDRDCRVGGCGLFRVYTEAAPDALKGEHEIGWTLAEPFWGRGYATEAAREVLVFDFGEQGLAHIYSQTSESNQPSTRMMQELGFTHLPQLGYVDPLYPPRDNPTTVWRLTGEEWEAL

SEQ ID NO: 143488 - DNA, 537 bp, Magnetospirillum gryphiswaldense
  CDS (1)..(537): transl_table=11
ttgcgaacccaacgcctaatattgcgcgcctggcgctccgacgatctggccgccttccgtctcatcaacgctgaccccgaggtcatggccctgatgccgtcaacactggattctggtcaaagcgacgcccagggcttgcgcatcatggataatctgtccacccgcggctggggtctgtgggcggtggaagtgcaaggcggcagcccgttcatcggctatgtcgggctgaacgaaccggcccagcccatgccgttcgccacccaaggccaaacggtggaaatggcctggcgcctgggccgtggccattggggccacggctatgccgccgaggccgccgccgccgcgctggatttcggcttttccaccctgggcttgccggaaatcatcgcttatacggtaccgcacaataaccgctcgcgccgggtgatggagcgcatcggtctggtccacgacactgcgggcgatttcgatcatcccgtcctgccgcccggccatgccttgcgccgccatgttttgtatagaaagagccattcatga

SEQ ID NO: 143489 - protein, 178 aa, Magnetospirillum gryphiswaldense
MRTQRLILRAWRSDDLAAFRLINADPEVMALMPSTLDSGQSDAQGLRIMDNLSTRGWGLWAVEVQGGSPFIGYVGLNEPAQPMPFATQGQTVEMAWRLGRGHWGHGYAAEAAAAALDFGFSTLGLPEIIAYTVPHNNRSRRVMERIGLVHDTAGDFDHPVLPPGHALRRHVLYRKSHS

SEQ ID NO: 143490 - DNA, 519 bp, Bacillus subtilis
  CDS (1)..(519): transl_table=11
atgaacgctaaaacgaagcttgtgactgatcgaattcgtttgcgctgtatggaagatcgggatcaagccactttgtttgggctgctttttaatgatcctgacgtcatgacatattattccggtttaaaagataagaggcaaacccgcgagtgggtcaattggaaccaacgaaatgaaaaagggtacggcgttagtctgtggatcgccgaagataagcggacaggggagtttttggggcaatgcggcatcgttccccagcagatcgaaaatcaaaccgtaatggaaattggctatatgtttgcccgccgccactgggggaacggctatgcgcaagaagcggctcgggcctgtctggactatggctttaacgagcggcagttcggcaaaatggcggctttgattgatccgggtaacaaagcgtccatacgggtagcggagaaaatcggcatgcattacagcaaaacgatcagaaaatggaataaaccgatcgcggtatatgaaagaaaatcttacaattga

SEQ ID NO: 143491 - protein, 172 aa, Bacillus subtilis
MNAKTKLVTDRIRLRCMEDRDQATLFGLLFNDPDVMTYYSGLKDKRQTREWVNWNQRNEKGYGVSLWIAEDKRTGEFLGQCGIVPQQIENQTVMEIGYMFARRHWGNGYAQEAARACLDYGFNERQFGKMAALIDPGNKASIRVAEKIGMHYSKTIRKWNKPIAVYERKSYN

SEQ ID NO: 143492 - DNA, 20 bp, Artificial sequence
  primer
atgacattatgcacagaacc

SEQ ID NO: 143493 - DNA, 23 bp, Artificial sequence
  primer
tcatgagcttgccgcccggattg

SEQ ID NO: 143494 - protein, 187 aa, Artificial sequence
  consensus sequence
  Variant (3)..(4): Xaa in position 3 to 4 is any amino acid
  Variant (6)..(10): Xaa in position 6 to 10 is any amino acid
  Variant (12)..(23): Xaa in position 12 to 23 is any amino acid
  Variant (24)..(24): Xaa in position 24 is any or no amino acid
  Variant (26)..(54): Xaa in position 26 to 54 is any amino acid
  Variant (55)..(60): Xaa in position 55 to 60 is any or no amino acid
  Variant (62)..(72): Xaa in position 62 to 72 is any amino acid
  Variant (73)..(75): Xaa in position 73 to 75 is any or no amino acid
  Variant (77)..(78): Xaa in position 77 to 78 is any amino acid
  Variant (80)..(87): Xaa in position 80 to 87 is any amino acid
  Variant (88)..(99): Xaa in position 88 to 99 is any or no amino acid
  Variant (101)..(101): Xaa in position 101 is any amino acid
  Variant (103)..(109): Xaa in position 103 to 109 is any amino acid
  Variant (112)..(112): Xaa in position 112 is any amino acid
  Variant (114)..(114): Xaa in position 114 is any amino acid
  Variant (116)..(116): Xaa in position 116 is any amino acid
  Variant (120)..(125): Xaa in position 120 to 125 is any amino acid
  Variant (126)..(126): Xaa in position 126 is any or no amino acid
  Variant (128)..(141): Xaa in position 128 to 141 is any amino acid
  Variant (142)..(143): Xaa in position 142 to 143 is any or no amino acid
  Variant (145)..(146): Xaa in position 145 to 146 is any amino acid
  Variant (148)..(149): Xaa in position 148 to 149 is any amino acid
  Variant (151)..(154): Xaa in position 151 to 154 is any amino acid
  Variant (156)..(171): Xaa in position 156 to 171 is any amino acid
  Variant (172)..(186): Xaa in position 172 to 186 is any or no amino acid
RLXXRXXXXXDXXXXXXXXXXXXXVXXXXXXXXXXXXXXXXXXXXXXXXXXXXXXXXXXXGXXXXXXXXXXXXXXGXXGXXXXXXXXXXXXXXXXXXXXEXGXXXXXXXWGXGXAXEAAXXXXXXXFXXXXXXXXXXXXXXXXNXXSXXVXXXXGXXXXXXXXXXXXXXXXXXXXXXXXXXXXXXXY

SEQ ID NO: 143495 - DNA, 1083 bp, Azotobacter vinelandii
  CDS (1)..(1083): transl_table=11
atgaaaatcgcgcagatcgttccgctctacgaagccgtaccgccacgcctgtacggcggtacggaacgggtggtcgcgcatctgacccaggcgctgatcgatctgggccacgaggtgacgctgttcgcctcggccgactcgcgcaccgacgcccggctggtggcgatgcgcaagcaggcgctgcgattggaccccgcgccgctcaagtcggacctggcgagccacctcatcctgctgcaggaggtccggcgccacgccgacgagttcgacgtcctgcactttcacatcgacctgttgcatttcccgttcttcgaggacatggccgggcggacgctgaccaccgtgcacggacggctcgacatgaaggacctgcccgaggcctaccggcgctggaacgccttcccgctcgcctcgatctccgaggatcagcgtaggcccctgcccttcgcgcactggcacgggacggtgcatcatggcaccgacggcgaacgcttccattaccacgacgcctccgacgacgactaccttgccttcctcgggcgcatctcgccggaaaagcgtcccgaccgcgccatcgccatagccattcgcgccggccttccgctcaggatggccgccaaggtcgatacggcggaccgtgagtatttcgagcagcgcatccgtccgttgctggaccatccgctgatcgaattcctgggcgagatcaacgacgccgacaaggtggagttcctcggcaacgcgagcgcgctgctgttccccatcgactggccggagcccttcgggctggcaatgatcgaggcgatggcctgcggcacgccggtcatcgcctggcgctgcggagccgtgccggaagtggtcgaacagggcgtgagcgggttcatcgtcgacagcgacgagcaggccgtggcggcggtccaccaggcgcaggccctcgacagacgccgcgtgcgcgcggccttcgagcggcgtttctcgtcgaagatcatggcgagcgcctatgtcgatctctaccagcggctgcccgccttcgtcggccgcgatccggcgcccgccgctctcccgccaggaggcccgaacccatga

SEQ ID NO: 143496 - protein, 360 aa, Azotobacter vinelandii
MKIAQIVPLYEAVPPRLYGGTERVVAHLTQALIDLGHEVTLFASADSRTDARLVAMRKQALRLDPAPLKSDLASHLILLQEVRRHADEFDVLHFHIDLLHFPFFEDMAGRTLTTVHGRLDMKDLPEAYRRWNAFPLASISEDQRRPLPFAHWHGTVHHGTDGERFHYHDASDDDYLAFLGRISPEKRPDRAIAIAIRAGLPLRMAAKVDTADREYFEQRIRPLLDHPLIEFLGEINDADKVEFLGNASALLFPIDWPEPFGLAMIEAMACGTPVIAWRCGAVPEVVEQGVSGFIVDSDEQAVAAVHQAQALDRRRVRAAFERRFSSKIMASAYVDLYQRLPAFVGRDPAPAALPPGGPNP

SEQ ID NO: 143497 - DNA, 1113 bp, Xanthobacter autotrophicus Py2
  CDS (1)..(1113): transl_table=11
atgcgcatcgcccaggtcgccccgctgatcgaaagcgtaccaccccgccgctatggcggcaccgagcggatcgtctcctatctcaccgaggagctggtgcgcgcgggccacgaggtgaccttgttcgccagcggcgattcactcacctccgctgcgctggaagccatgtgcgacaccggcctgcgcctcacttcgggcccggtggacccggtgctctaccacctgctcatgctggaggaggtgcgcaagcgcgcggaggatttcgacgtgatccacgcgcatgtggacctgctgcactatccggtgctgcgcgcgcatcggggccagtgcctcaccaccctgcacggccggctcgacctgcccgctgcccatcgactctattcgaatttcgccgactatccgctgatctccatctctgatcaccagcgcacccccatgccgccggtgaactgggcagccaccatccatcacggcctgcccaaggacctcctgcccttcaacccgaagggcggtgactatctcgccttcctcggccgcatctcgccggagaaacggccggaccgggccatcgccatcgccgcgcgcgccggcatgccgctgaagatcgccgccaaggtggaccgcgccgaccaggcctattgggaggacatgatccgtcccatggtggaggccaatcccaacgtggagttcatcggcgagatcgacgagcgccagaaggcgacattcctcggcaacgccgcggccctgctgttccccatcgactggccggaaccgttcgggctggtgatgatcgaggccatgagctgcggcacgccggtcatcgccttttcccgcggctcggtgcccgaggtgctggaagacggcgtcaccggctatctcgtggacagcgtggaggaggcgctggagcgggtgggcgacctttcccgcctcgaccgctcgaccatccggcgcaccttcgagcgccgcttctcggcggagcgcatggcgaaggattatgaggccgtctaccagcgcctcgccggcacccgggagaccgccccagcgctcctgcgctcacccaagcccgagctgcgccttgtcgggaccgatgccgtccatgacgccattcgctga

SEQ ID NO: 143498 - protein, 370 aa, Xanthobacter autotrophicus Py2
MRIAQVAPLIESVPPRRYGGTERIVSYLTEELVRAGHEVTLFASGDSLTSAALEAMCDTGLRLTSGPVDPVLYHLLMLEEVRKRAEDFDVIHAHVDLLHYPVLRAHRGQCLTTLHGRLDLPAAHRLYSNFADYPLISISDHQRTPMPPVNWAATIHHGLPKDLLPFNPKGGDYLAFLGRISPEKRPDRAIAIAARAGMPLKIAAKVDRADQAYWEDMIRPMVEANPNVEFIGEIDERQKATFLGNAAALLFPIDWPEPFGLVMIEAMSCGTPVIAFSRGSVPEVLEDGVTGYLVDSVEEALERVGDLSRLDRSTIRRTFERRFSAERMAKDYEAVYQRLAGTRETAPALLRSPKPELRLVGTDAVHDAIR

SEQ ID NO: 143499 - DNA, 1062 bp, Mesorhizobium loti MAFF303099
  CDS (1)..(1062): transl_table=11
atgaagatcgctcatgtcgcgccactgtacgaatccgttccgccaaggctctacgggggcaccgagcgcatcatttcctacctgaccgaagccctcgtcgacctcggccacgacgtgacgctgttcgccagcggcgacacgaagacctccgccaaactcgtgccctgccgcgagcgggcgcttcgcctcgatccacgcccgctgaagtccgagatcgcggcgcatctgtcgatgctcgacgaggtgaggaaacgcgccgacgattttgacgtgattcatttccacctcagccatttcctgcatttcccgtttttccgcgacatgccgcagcgcacggtgacgacgccgcatggcaggctggattacgcggatctcgcgcaggcctatgaccggttcccgcgcttcccgatggtttccatatcgcgcagccagcgggcgcggtttgcgtcggccaactggcttgcgacgatccatcacggcctgcccgtcgatctctacgaacccgatttcgaggcgggttcggatggcggctatcttgcctttctcggcaggatgtcgcgcgacaagcggccggaccgggcgatcgagatcgcccgccgcaccgggctgaaactcaagctcgcggccaagatcggcgatggcgaccgcgcctatttcgaggaagtcgtccaaccgatgatcgatggcgaccgggtcgaatatgtcggcgaaatcggcgaggaccagaagagcaggtttcttggcaatgcggccgccctgctgtttccgatcgattggcccgaacccttcggtcttgccgtgatcgaggccatggcctgtggaaccccggtcatggcctggagttgcggcgccatgcccgaaattgtcgactatggggttaccggcttcgtcgtcgaaaccatcgaggatgcggtcgccacgatgccggctcttctgcagctcgacaggcggcgcataagggcggtgttcgaaaggcggttttcagccgacagaatggccagggactacgtcgaggcttattcccggctgcgcaacggccatgagcaaagcagagcttcgtag

SEQ ID NO: 143500 - protein, 353 aa, Mesorhizobium loti MAFF303099
MKIAHVAPLYESVPPRLYGGTERIISYLTEALVDLGHDVTLFASGDTKTSAKLVPCRERALRLDPRPLKSEIAAHLSMLDEVRKRADDFDVIHFHLSHFLHFPFFRDMPQRTVTTPHGRLDYADLAQAYDRFPRFPMVSISRSQRARFASANWLATIHHGLPVDLYEPDFEAGSDGGYLAFLGRMSRDKRPDRAIEIARRTGLKLKLAAKIGDGDRAYFEEVVQPMIDGDRVEYVGEIGEDQKSRFLGNAAALLFPIDWPEPFGLAVIEAMACGTPVMAWSCGAMPEIVDYGVTGFVVETIEDAVATMPALLQLDRRRIRAVFERRFSADRMARDYVEAYSRLRNGHEQSRAS

SEQ ID NO: 143501 - DNA, 1101 bp, Sinorhizobium meliloti 1021
  CDS (1)..(1101): transl_table=11
atgaagatagcccagatcgcaccgctgttcgaacgtgtcccgccgaagctctacggcggaaccgagcgcgtcgttcaccacctgacggaagagctcgtccgacagggccatgaggtcacgctcttcgcgagcggcgactcgatgacctcggcaaagctcatcccctgctcggatatggcgctgagattgaaccctgcggttcaggatcctatcccctatcacatgctgatgctggaggaagtgcgccggcaggccaacggcttcgacgtcctgcacttccacatcgatctcctgcattttcccctcgttcgcagcctcgcaggaaagacggtgacgacgctgcacggccgcctcgatctgcccgacctccagcccttctacgccgcattcccggatgttcccctgatttcgatctccgacgaccagcgaaaaccgatgccgccggtcaattgggtcgcgacggtccatcatggtctggctcctgacgtccttcccttcaccggccagccgaggggcgattatctcgccttccttggccgcatctcgcccgaaaagcggcccgaccgcgcgatcgaaatcgctgcccgggtcggcatgcccctgaaaatcgccgccaaggtcgacaaagcggacgaggcctactggctgaacgagatcgagccgcttgtccggcgctatccgaatgtcgaattcatcggcgaaatcgacgaatgtcagaagggcgagttcctcggaaatgcacgcgccctcctcttcccgatcgattggcccgaaccattcgggctggtgatgatcgaggcgatggcctgcggcacgccggtggtcgccttccgctgcggcgcggtgccggaggtgatcgaccacgccgtgtccggcttcatcgtcgacagcatggaggaggccgtgaaggcggtccacgatctcgaccggctcgatcgccacacggtccgggcgaccttcgacagacgcttcaccgcccgacgcatggcagatgactatctggatctctatcgcgccctggcaggcggcgctcaaagggtcatgccgatccatgcggcgaacgaaagcggtgccggccccggctctgccagggtcgcctga

SEQ ID NO: 143502 - protein, 366 aa, Sinorhizobium meliloti 1021
MKIAQIAPLFERVPPKLYGGTERVVHHLTEELVRQGHEVTLFASGDSMTSAKLIPCSDMALRLNPAVQDPIPYHMLMLEEVRRQANGFDVLHFHIDLLHFPLVRSLAGKTVTTLHGRLDLPDLQPFYAAFPDVPLISISDDQRKPMPPVNWVATVHHGLAPDVLPFTGQPRGDYLAFLGRISPEKRPDRAIEIAARVGMPLKIAAKVDKADEAYWLNEIEPLVRRYPNVEFIGEIDECQKGEFLGNARALLFPIDWPEPFGLVMIEAMACGTPVVAFRCGAVPEVIDHAVSGFIVDSMEEAVKAVHDLDRLDRHTVRATFDRRFTARRMADDYLDLYRALAGGAQRVMPIHAANESGAGPGSARVA

SEQ ID NO: 143503 - DNA, 1092 bp, Sinorhizobium meliloti 1021
  CDS (1)..(1092): transl_table=11
atgaaaattgcgcagatcgcaccccttgcagaacgcgtcccgccgaagctttacggaggcacggagcgaatcgtccattgccttaccgaagaactcgtaagactgggccatgacgtgaccctttttgccagcggcgattcgcttacaagtgccgagctggtgccctgttgcgacgtcgcgctcaggctcaatccgagagtgcaagatttccttccccatcacatcgcgatgctggaagaggtccgccgccgcgcgcctcaattcgacgttctgcatttccatatcgaattcctgcatttccccctgatcagagatttcgccgacaggacggtgacgacacttcatacacgcctcgatctgcccgatctgcagcctttctatctggccttcccggatatccccctggtttcgatatcgcagcatcagcgagtgccgatgcctccggtcaactggaggggcactgtgctgcatggactggacccgacggtcttgccgctgcgggaaggacgatctgacgagtatctggcattcctcgggcgcattgcaccggagaagggtcccgaccgcgcgatcgaaatcgccgcacggtccggcatgcctctgaagatcgctgcgaagatcgacgcccaggaccgcgcttattgggaagcagtcgtcgaacctctcatcgcaagccattccaatgtcgaatacatcggcgagatagacgaaggccagaaggcggacttcctcggcaatgccgcagcgctcctttttccgataaactggccggaacctttcggcctcgtgatgatcgaggcgatggcctgcggcactccggtgcttgccttccgctatggctcggcgccggaggtgatcgacgacggcgtgtcggggatcttggtcgacacggtcgagcaagcagtcgaaagcctcggacgcgtgctggaactcgacaggcgcaaggttcgcgagagcttcgagacacggttcactaccgaacggatgacacgcgattatctcgacatttaccagaaccttccgggtgtcctgaggcagaccgcctccacgccgcaaggcgaggccaagaaagtcggcctcgaggcggcatga

SEQ ID NO: 143504 - protein, 363 aa, Sinorhizobium meliloti 1021
MKIAQIAPLAERVPPKLYGGTERIVHCLTEELVRLGHDVTLFASGDSLTSAELVPCCDVALRLNPRVQDFLPHHIAMLEEVRRRAPQFDVLHFHIEFLHFPLIRDFADRTVTTLHTRLDLPDLQPFYLAFPDIPLVSISQHQRVPMPPVNWRGTVLHGLDPTVLPLREGRSDEYLAFLGRIAPEKGPDRAIEIAARSGMPLKIAAKIDAQDRAYWEAVVEPLIASHSNVEYIGEIDEGQKADFLGNAAALLFPINWPEPFGLVMIEAMACGTPVLAFRYGSAPEVIDDGVSGILVDTVEQAVESLGRVLELDRRKVRESFETRFTTERMTRDYLDIYQNLPGVLRQTASTPQGEAKKVGLEAA

SEQ ID NO: 143505 - DNA, 1104 bp, Nostoc sp. PCC 7120
  CDS (1)..(1104): transl_table=11
gtggggagcatcttaccgactgaaccgaaacaatttatgaaaatcgctcaagttgcccccttatgggaacgagttccacctccaagttatggaggtattgaactagtagtaagtcacttgacaaacgaactagttcgtcgtggtcatgaggtaacattatttgcctctggcgattctcaaaccttggcacatttagaaacagtttatccgcgtgcattacgcttagacaaaaatgttcaagactatgccgcttatgaaactttagaactgagccaagtctaccagaacgcgacaggattcgatattatccattctcatttagggattgcggctttacctttagcgagtttggtaaaaactcctacagtacatacgctgcatggtcattttaccaaagataaccaaaacgtctttagtcatcatcatcaacaaccatacgttagtattagcaacgcccagcgtcaaattcatctcaattatataaaaaccgtttataacggtattgagccaaaagattatccgttcatttctcaaccaaaagagccgccatatctagcatttttaggacgcttttctccagaaaaaggcccacataaggcgatctcgatcgccaagcagagtggttggcatttaaagatggcaggaaaagttgatacagtagatgccaagttttttgaacaagagattctccctcatatagattgtcagcaaattgaatatttaggcgaaattaaccatacagaaaaagctgaactactaggcaatgctgctgctactctttttcccatcaattggcaagaaccttttggtttagtgatgattgaatcaatggcaactggtacgccagttatagggatgaattttggttctgtacctgaggtgatcgaccaaggtaaaacaggttttatctgccaaaattatgaagaaatgattcagatgatacctgctactttggaattggatcgtcgagattgtagagaatctgtagaaaacaaatttagcgttagccaaatggttgatgggtatgaagcggtatatcaacaaattatcaaagaccgcgttaacttaaacggttataagcacacagctaaaatccgcttttaa

SEQ ID NO: 143506 - protein, 367 aa, Nostoc sp. PCC 7120
MGSILPTEPKQFMKIAQVAPLWERVPPPSYGGIELVVSHLTNELVRRGHEVTLFASGDSQTLAHLETVYPRALRLDKNVQDYAAYETLELSQVYQNATGFDIIHSHLGIAALPLASLVKTPTVHTLHGHFTKDNQNVFSHHHQQPYVSISNAQRQIHLNYIKTVYNGIEPKDYPFISQPKEPPYLAFLGRFSPEKGPHKAISIAKQSGWHLKMAGKVDTVDAKFFEQEILPHIDCQQIEYLGEINHTEKAELLGNAAATLFPINWQEPFGLVMIESMATGTPVIGMNFGSVPEVIDQGKTGFICQNYEEMIQMIPATLELDRRDCRESVENKFSVSQMVDGYEAVYQQIIKDRVNLNGYKHTAKIRF

SEQ ID NO: 143507 - DNA, 1164 bp, Streptomyces coelicolor A3(2)
  CDS (1)..(1164): transl_table=11
gtgaggatcggcatcgtctgcccgtactcctgggacgtgccgggcggcgtccagttccacatccgggacctcgccgagtacttcgtccggctcggccacgaggtgtccgtgctcgccccggccgacgacgacacgccgctgccgccgtacgtcgtctccgcgggccgagcggtgccggtgccgtacaacggctcggtggcccggctcaacttcggcttcctgtcggcggcccgggtccggcgctggctgcacgagggcggcttcgacgtcatccacatccacgagccgacctcgccctcgctgggcctgctgacctgctgggcggcgcagggcccgatcgtggccaccttccacacctccaacccgcgctcccgcgcgatgatcgccgcgtacgcgatcctccaggccgccctggagaagatcagtgcccggatcgccgtgagcgagtacgcccgccgcacgctcgtcgagcacctgggcggcgacgcggtggtcatccccaacggcgtcgacgtcgacttcttcgccgacgccgagcccaagccggagtggcagggcgacacgatcggcttcatagggcgcatcgacgagccccgcaagggcctgccggtgctcatgcgggcgctgcccgcgatcctcgccgcccggccgcagacccggctgctcgtcgccgggcgcggggacgaggaggaggccgtcgaaagcctgccgaaggagctgcgctcccgcgtggagttcctcggcatgatcagcgacgaggacaaggcccgcttcctgcgcagcgtcgacctgtacgtggcgcccaacaccggcggcgagagcttcggcatcgtcctcgtcgaggccatgtcggccggcgcccccgttctcgcctccgacctggacgccttcgcccaggtcctcgaccagggggcggccggtgaactcttccccaacgaggacgccgacgccctggccgaggcggccgtacgcctgctggccgacccggagcggcgcgccgcgctgcgggagcgggggagcgcccacgtacggcgcttcgactggtccacggtcggtgcggacatcctgtccgtctacgagacggtcaccgcgggagcggcggcggtggcgacggacgaccgggcgacgggcctgcgcgcccgcttcggcctggcgagggactga

SEQ ID NO: 143508 - protein, 387 aa, Streptomyces coelicolor A3(2)
MRIGIVCPYSWDVPGGVQFHIRDLAEYFVRLGHEVSVLAPADDDTPLPPYVVSAGRAVPVPYNGSVARLNFGFLSAARVRRWLHEGGFDVIHIHEPTSPSLGLLTCWAAQGPIVATFHTSNPRSRAMIAAYAILQAALEKISARIAVSEYARRTLVEHLGGDAVVIPNGVDVDFFADAEPKPEWQGDTIGFIGRIDEPRKGLPVLMRALPAILAARPQTRLLVAGRGDEEEAVESLPKELRSRVEFLGMISDEDKARFLRSVDLYVAPNTGGESFGIVLVEAMSAGAPVLASDLDAFAQVLDQGAAGELFPNEDADALAEAAVRLLADPERRAALRERGSAHVRRFDWSTVGADILSVYETVTAGAAAVATDDRATGLRARFGLARD

SEQ ID NO: 143509 - DNA, 1071 bp, Chlorobium tepidum TLS
  CDS (1)..(1071): transl_table=11
atgaaaaagcttagaattgcgcaggtttcccccctgattgaaagcgtgccgccgaagaaatatgggggcacggagcgggttgtttactacctcaccgaggggctggtcgagcggggccatgaggtgacgctgtttgcctctggggactccgccaccagtgcccgcctgattgcgccggtgaaagagagcctccggcttgggcggaaaatccattcgaccaccatcatgcacatgctgatgctctcgaaggtgtacgaagagatggccggggagttcgacatcatccattcgcatctcgaatatctgaccctgccttatgccagctgttcccggacgccgacggtgctgaccatgcatggacggctcgatcttcctgactatgctgacattctgaagcgatacagctctatggcttgggtgtcgatcagcgactcgcagcgcgcgccggtgccggatatcaactgggtcggcacgatctatcacggctatccggagaatctgttcgaattcaatcccgatccggaagactactttctctacctcggtcgtttttcggaggagaagcggcccgacgaggcgatccggctggcaagggcgtgcaaaattcacctcaagctggccgccaagatcgataccgccgacaaggcatatttcaaagccaaagtcgaaccgctacttgacagtccctatatcgaatatgtcggcgaggtgggcgacagccggaaaggggaactgctcaggaacgccaaagcgctgcttaacaccatcgactggcccgagccgttcggactggtgatgatcgaagcgctcgcctgcggcacgccggtcatcgtgcggcgctgcggctccagccctgaggtgattactcacggcgtcaccggttttatttgtgatagccagctcgatttcatcagggcgatccacaatattggcacgatttcacgaattgcgtgcaggcgtgaattcgagcagcgctttaccctccgtcacatggttgacaattatgaaaccctgtaccgaaaagtcattgctgcttcatcggccactgattcactctcttcgctgccatag

SEQ ID NO: 143510 - protein, 356 aa, Chlorobium tepidum TLS
MKKLRIAQVSPLIESVPPKKYGGTERVVYYLTEGLVERGHEVTLFASGDSATSARLIAPVKESLRLGRKIHSTTIMHMLMLSKVYEEMAGEFDIIHSHLEYLTLPYASCSRTPTVLTMHGRLDLPDYADILKRYSSMAWVSISDSQRAPVPDINWVGTIYHGYPENLFEFNPDPEDYFLYLGRFSEEKRPDEAIRLARACKIHLKLAAKIDTADKAYFKAKVEPLLDSPYIEYVGEVGDSRKGELLRNAKALLNTIDWPEPFGLVMIEALACGTPVIVRRCGSSPEVITHGVTGFICDSQLDFIRAIHNIGTISRIACRREFEQRFTLRHMVDNYETLYRKVIAASSATDSLSSLP

SEQ ID NO: 143511 - DNA, 1077 bp, Thermosynechococcus elongatus BP-1
  CDS (1)..(1077): transl_table=11
atgcgcattgctcaagtcgcccccctgtgggaacgggtaccgccgccagcctacgggggtgtggagttggtggtgagtctgctcacggaagaattagtcaagcgggggcacgaggtcacactgtttgccagtggtgattcaatgacccaagccaaattagtttctacctatccccacgccattcgccttgatcctaatgtgcaggaatatgccgtctatgaggctcttcaactgggagaagtctttagtcgcgccaatgaatttgatgtcatccattcccatgtgggctatacggctttaccctacaccagtctagtgaaaacacccgttgttcacaccctccatggtcgctttacggcggacaacgagcgcattttcagccaatatcgcaatcaaaactacgtcagtatttcccattcccagcggcaactgcgggagttgaactacattgccacggtttataacgccattgccgtggaaacccatcacttctatccccagcccagcgatcccccctatctggccttcttgggacggctctcccccgaaaaaggccctcaccatgccattgaaattgctaagcgggtgggtattccgctgcggatggcaggtaaagtggaccgggtcgatcgcgactacttcaaggaattaattgaaccccacattgatggtgaatttatccagttcattggcgaggcggatcatccgacgaagaatgccctcctggggggggcgatcgccatgctctttccgattacgtggcaagaaccctttggcctagtcatgattgaatccatggcagccggtacgccagtggtggcgatcgccaagggagcagcccccgaagtcattgagcatggtaaaaccggtttcctctgtcactccgtcgaagactgtgttgctgccgttgcccaagtgccgcaactggatcgcatggcctgtcgagactacgtttggcagcgcttcagtgtcgagcggatggtgagcgagtatgaagcagtctatgataccgttctcgccaatacctttgttcataatggacatcgtaggggaacaattgaactaatggccagttag

SEQ ID NO: 143512 - protein, 358 aa, Thermosynechococcus elongatus BP-1
MRIAQVAPLWERVPPPAYGGVELVVSLLTEELVKRGHEVTLFASGDSMTQAKLVSTYPHAIRLDPNVQEYAVYEALQLGEVFSRANEFDVIHSHVGYTALPYTSLVKTPVVHTLHGRFTADNERIFSQYRNQNYVSISHSQRQLRELNYIATVYNAIAVETHHFYPQPSDPPYLAFLGRLSPEKGPHHAIEIAKRVGIPLRMAGKVDRVDRDYFKELIEPHIDGEFIQFIGEADHPTKNALLGGAIAMLFPITWQEPFGLVMIESMAAGTPVVAIAKGAAPEVIEHGKTGFLCHSVEDCVAAVAQVPQLDRMACRDYVWQRFSVERMVSEYEAVYDTVLANTFVHNGHRRGTIELMAS

SEQ ID NO: 143513 - DNA, 1125 bp, Bradyrhizobium japonicum USDA 110
  CDS (1)..(1125): transl_table=11
gtgccgtacaggttgggggtttccaacgttcatgatcgcagaggagaaggcgagatgcgcatcgcgcaggtagctccgttgacggaggctgttccacccaagctgtatggcggcaccgagcgggtggtgcattggttgacggaagagctggtggccctgggacatgacgtgacgctgttcgccagcggcgactcgcagacgtcggcgaagctggacgccctctggccgcgggcgcttcgcctcgacggttccgtgcgcgatcccaacgcgctgcacatggtgctgctcgagcgcgtgcggcagaaatgtgacgacgaggagttcgacttcctccacttccatctcgattattatccgtggtcgctgttccaccggcagcccacaccgttcctgaccacgctgcacggccggctcgacctgccggagcatcagccggtgttcaacatcttctccaagatgccggtgatctcgatctcgaacgcccagcggcggccggtgccgcaggcgaactgggtgacgacgatccatcacggcctgccggagaacttgctgacgccgaagccggccaggcaggaatatctcgccgtgctcggccgcatcgcgccggagaagggcgtcgaccgcgccatcaagatcgcgacccattgcggcatcccgctgaagatcgcggccaaggtcgatcgcgccgaccaggattattacgacgagctgatccggccgatgatcgcgaacaatccgctggtggagttcatcggcgagatcagcgatcacgagaagtcggaattcttgagcggtgcgctcggacttctgctgccgatcgactggcccgagccgttcggcctcgtgatgatcgaagccatggcctgcggaacgccggtcgtcgccttcaaccgcggctcggtgccggagatcatcgacgagggcctgaccggcttcgtcgtcgaggacatcatcagcgccgccggcgtcgtcaagcgccttccgcaactggaccgcgcggcgatccgcaagcagttcgaaaagcgcttcacggctcggcgaatggcgctggactatctcgcggcctatcgcagcctgacggaagcgcaggcaccgaagatcaagctggtgagcagcgcggagtag

SEQ ID NO: 143514 - protein, 374 aa, Bradyrhizobium japonicum USDA 110
MPYRLGVSNVHDRRGEGEMRIAQVAPLTEAVPPKLYGGTERVVHWLTEELVALGHDVTLFASGDSQTSAKLDALWPRALRLDGSVRDPNALHMVLLERVRQKCDDEEFDFLHFHLDYYPWSLFHRQPTPFLTTLHGRLDLPEHQPVFNIFSKMPVISISNAQRRPVPQANWVTTIHHGLPENLLTPKPARQEYLAVLGRIAPEKGVDRAIKIATHCGIPLKIAAKVDRADQDYYDELIRPMIANNPLVEFIGEISDHEKSEFLSGALGLLLPIDWPEPFGLVMIEAMACGTPVVAFNRGSVPEIIDEGLTGFVVEDIISAAGVVKRLPQLDRAAIRKQFEKRFTARRMALDYLAAYRSLTEAQAPKIKLVSSAE

SEQ ID NO: 143515 - DNA, 1233 bp, Bradyrhizobium japonicum USDA 110
  CDS (1)..(1233): transl_table=11
atgaggatcgcgcagattgcgccgctcttcgagagcgtcccgccacggctgtatggcggaacggagcgggtcgtttcatatttgaccgaggagctgatcaggcaaggtcatcaggtcacgcttttcgccagcggcgattccatcacctccgccgaactcgttccgtgcgtgccccgggcgttgcgcctcgatccggacgcccgcgacccgatcccgcatcacgcgctgatgctcgacaaggtgcgggagcgcgctgacgatttcgacatcctgcactttcacgtcgactacttgcactttcctctgttccgatcggagtccggacggacagtgacgacgctgcatggccggcaggaccttgccgatcacatgccgttctatcgctggttttcggagatgccgctgatctccatctccaacgcgcaacgggcgccattgcccagcgcgaaattcgtcggaaccgtatatcacggcatcccggtcgatcttcacaagtcgacctggacgtcggcgggcggctaccttgcgtttcttggtcgcatctcgcccgagaaacggcccgaccgcgccattgccattgcgcgggctgcgggcgtgccgcttaagattgcggcgaaggttgataaggtcgacgaggcctacttccagcaggtcatcgcgccactcttgaacgggacggacgtcgagttcgttggcgagatcaacgagagcgccaagaccgagtttctcggccgggcggccggattgcttttccccatcgattggcccgagccgttcgggctggtcatgatcgaggccatggcctgcggaacgccggtgcttgccttccgctgcggatcggtcccggagatcgtcgaggacgggctgaccgggcgcatcgtctcaagcctcgatgaggcggtgcaggccattccagagctgttggcgttggaccggaaagcgatccggatgcgcttcgaggagcggttctcctcccgtcgcatggcatcggactacgtgaaaatttaccactccattctccgtagccacgctgcgcggcagaccaagatttcggccgttgccgccttatccgcgaaggccgcgcgtagtttggaagggtcgcccgcgataggtcggctggatgcgcttgaacaggtcatcatgcgacccgaagaaggtcgtcggaagggcgcagcgggggcgaagcaaaaacgaacttcaggatgtggcgcgagcctggggctggaggcctga

SEQ ID NO: 143516 - protein, 410 aa, Bradyrhizobium japonicum USDA 110
MRIAQIAPLFESVPPRLYGGTERVVSYLTEELIRQGHQVTLFASGDSITSAELVPCVPRALRLDPDARDPIPHHALMLDKVRERADDFDILHFHVDYLHFPLFRSESGRTVTTLHGRQDLADHMPFYRWFSEMPLISISNAQRAPLPSAKFVGTVYHGIPVDLHKSTWTSAGGYLAFLGRISPEKRPDRAIAIARAAGVPLKIAAKVDKVDEAYFQQVIAPLLNGTDVEFVGEINESAKTEFLGRAAGLLFPIDWPEPFGLVMIEAMACGTPVLAFRCGSVPEIVEDGLTGRIVSSLDEAVQAIPELLALDRKAIRMRFEERFSSRRMASDYVKIYHSILRSHAARQTKISAVAALSAKAARSLEGSPAIGRLDALEQVIMRPEEGRRKGAAGAKQKRTSGCGASLGLEA

SEQ ID NO: 143517 - DNA, 1134 bp, Bradyrhizobium japonicum USDA 110
  CDS (1)..(1134): transl_table=11
atgcggattgcccagcttgctccgttggccgagagcgttcctccaaagctgtatggtggcacggagcgggtgatcgcctggctgatggacgaactggtcgagctcggacacgacgtcaccctgttcgcgagcggagattcgaagacgaagggaaagctccacccggtgtggccgcgcgcactgcgcctgggccggaggggcgcggacccgagcgccgcctgcgcgttgctgatagaagccattgccgagcgcgcgagcgacttcgacgtgatccactcccacgtcgactggttgccacttcctgtgctcagccggaccggggtgcctttcctcacgacgatgcacggccgcctcgaccttcccggtctatcgaaggtgatcggggcctttccgaacgcgggcttcgtctcgatttccgacaaccagcgtcggccgcttccggatgcgaactggatcgcaacgatccagcacggcatgcccaaggacctgtttcggccctcttacgaccatggttcgtacctggcttttctcgggcggctgacggcagacaagggaccggaagccgccatacgtatcgcgcgggccgcgcggatgccgctgcgggtcgccgccaagattcctcgcgcggagacggcctacttcaagaagaagctcgaaccgaacatcgatggtgaagagatccggctcgtcggcgaggtggacgaaatcaggaagcagcccttcctcgccggggccgccgcgttgctgtttccgatcaattggccggagcccttcgggctcgtcatgatcgaagcgatggcgtgtgggacgcctgtgatcgcttaccggtggggctcggtgcccgaagtggtggaagacggcgtgaccggctttatcgtcgacaacgaggagcaggcgatcgcggcggtgaacgaactgggccggctggacagaagagcagtccgggcccggttcgaggagcgcttcgccgcgagccggatggcgagggagtacgagatccgatatcgcgagttggtcgatcgcggagtccgcgcagccgagagtgttcagatacctggaggagacgaaggattcgcgaaaggggcagcacagtcttcccgacctgtcggaacggcttcggactctggtcgttga

SEQ ID NO: 143518 - protein, 377 aa, Bradyrhizobium japonicum USDA 110
MRIAQLAPLAESVPPKLYGGTERVIAWLMDELVELGHDVTLFASGDSKTKGKLHPVWPRALRLGRRGADPSAACALLIEAIAERASDFDVIHSHVDWLPLPVLSRTGVPFLTTMHGRLDLPGLSKVIGAFPNAGFVSISDNQRRPLPDANWIATIQHGMPKDLFRPSYDHGSYLAFLGRLTADKGPEAAIRIARAARMPLRVAAKIPRAETAYFKKKLEPNIDGEEIRLVGEVDEIRKQPFLAGAAALLFPINWPEPFGLVMIEAMACGTPVIAYRWGSVPEVVEDGVTGFIVDNEEQAIAAVNELGRLDRRAVRARFEERFAASRMAREYEIRYRELVDRGVRAAESVQIPGGDEGFAKGAAQSSRPVGTASDSGR

SEQ ID NO: 143519 - DNA, 1161 bp, Streptomyces avermitilis MA-4680
  CDS (1)..(1161): transl_table=11
gtgaggatcggcatcgtctgcccgtactcctgggacgtgccgggcggcgtccagttccacatccgggatctggccgagcacctcatccgtctcgggcacgaggtgtccgtcctcgctccggcggacgacgacacccccctgccgccgtacgtcgtctcggcgggccgcgcggttccggtgccctacaacggctcggtggcccgcctgaacttcgggttcctgtccgcggcccgggtgcggcgctggctgcacgacggcgagttcgacgtgatccacatccacgagccgacctcgccgtcgctcggcctgctgacgtgctgggcggcgcagggcccgatcgtggccaccttccacacgtccaacccgcgctcccgggcgatgatcgccgcgtacccgatcctgcagcccgcgctggagaagatcagcgcgcgcatcgcggtgagcgagtacgcgcgtcgcaccctggtcgaacacctgggcggggacgccgtcgtcatcccgaacggcgtggacgtggacttcttcgcgcgggccaagcccgaccccgagtggcagggggacacgctcggcttcatcggccgtatcgacgagccccgcaagggcctgccggtgctcatgaaggccctgccgaagatcctcgccgagcgcccgggaacccggctcctggtcgccgggcgcggcgacgaggaggaggccgtggagacgctgcccaaggagatgcgcgagcacgtccggttcctcggcatggtcagcgacgaggacaaggcgcgcttcctgcgcagcgtcgacgtgtacgtggcccccaacaccggcggcgagagcttcgggatcatcctggtcgaggcgatgtcggcgggcgctccggtgctcgcgtcggacctggacgccttcgcccaggtgctcgaccagggggcggcgggggaactgttcgccaacgaggacgccgacgcgctggccgagtcggcgctgcgactgctcggcgacccagggcgccgggccgagctgcgcgagcgggggagcgcccatgtgcggcgcttcgactggtcgaccgtgggcgccgacatcctgtccgtgtacgagacggtgacggacggagcggccgccgtggccgccgacgaacggaccgggctgcgggcgcggttcggactggcacgggactga

SEQ ID NO: 143520 - protein, 386 aa, Streptomyces avermitilis MA-4680
MRIGIVCPYSWDVPGGVQFHIRDLAEHLIRLGHEVSVLAPADDDTPLPPYVVSAGRAVPVPYNGSVARLNFGFLSAARVRRWLHDGEFDVIHIHEPTSPSLGLLTCWAAQGPIVATFHTSNPRSRAMIAAYPILQPALEKISARIAVSEYARRTLVEHLGGDAVVIPNGVDVDFFARAKPDPEWQGDTLGFIGRIDEPRKGLPVLMKALPKILAERPGTRLLVAGRGDEEEAVETLPKEMREHVRFLGMVSDEDKARFLRSVDVYVAPNTGGESFGIILVEAMSAGAPVLASDLDAFAQVLDQGAAGELFANEDADALAESALRLLGDPGRRAELRERGSAHVRRFDWSTVGADILSVYETVTDGAAAVAADERTGLRARFGLARD

SEQ ID NO: 143521 - DNA, 1098 bp, Rhodopirellula baltica SH 1
  CDS (1)..(1098): transl_table=11
gtgcaaaccgccgatcaatccatctccggcatcttgcatctcaaccaacttcttcgccacgaatcagaaagcgaacctttgatgcgaatagccatgctggccccgatcgcttggagaacaccaccgcgtgcctacggtccgtgggaattggtcaccagcatgctgaccgaggctctcgtcaaacgcggcgtcgacgtgaccctcttcgccaccctcgacagcaaaacatcgggaaagcttgctggtgtggttccggctccgtacagcgaagacgcatcgatcgatgccaaggtgtgggagtttcgacatcttgcccacctgttcgaacaagccgaccagtttgacttgatccacaatcaggcagactttcccgcccacgcttttgcccgactgatcgacactccgatcgtcaccaccattcatggattctcgtccgaccgaattttgccgatgtaccaggagtaccaagacctggttcactacatcgcgatcagcgacgcggaccgacatcccagtctgcgatacgcagctacgattcaccacggaatccccatcgatgacttcccatttcaacccgaacgcggcgaagacctattgttcttcggacgaattcatcctgacaagggagcggcagaggcaattgaagccgcccgtctcagcaagcttccactgcacatgtacggcatcgtgcaagacgaacactaccacgacatgcacgtcgcacccacggacgatggcgtcagcatgacctatcacggtgtcatcggcggtccggaacgactccatgcgttgggcaatgctcgtgccttgttgcacctgatcaacttcgacgaaccattcgggctttctgtcatcgaagccatggcgtgcggcacgcccgttatcgccaacaatcgtggatcgatgcccgaactgatcgaacacggcgtgaccggcttattggtcaacaacttgcaagaagcggtgcaggcgatcgagcgaatcgacgaactcgaccgtgtcgccgttcgccaatccgtcgtcgatcgtttctcaatcgaccgaatggccgacagctacgttgccatttatcaacgcatcttaggcacaagcccctga

SEQ ID NO: 143522 - protein, 365 aa, Rhodopirellula baltica SH 1
MQTADQSISGILHLNQLLRHESESEPLMRIAMLAPIAWRTPPRAYGPWELVTSMLTEALVKRGVDVTLFATLDSKTSGKLAGVVPAPYSEDASIDAKVWEFRHLAHLFEQADQFDLIHNQADFPAHAFARLIDTPIVTTIHGFSSDRILPMYQEYQDLVHYIAISDADRHPSLRYAATIHHGIPIDDFPFQPERGEDLLFFGRIHPDKGAAEAIEAARLSKLPLHMYGIVQDEHYHDMHVAPTDDGVSMTYHGVIGGPERLHALGNARALLHLINFDEPFGLSVIEAMACGTPVIANNRGSMPELIEHGVTGLLVNNLQEAVQAIERIDELDRVAVRQSVVDRFSIDRMADSYVAIYQRILGTSP

SEQ ID NO: 143523 - DNA, 1110 bp, Gloeobacter violaceus PCC 7421
  CDS (1)..(1110): transl_table=11
ttgcccttgaagctgcgtctgttgttcgtctcttccgccctcgggcctctgggtaccggcatggcagggggcgtcgagttcaatgtgctcaccctggcggccgaactgatccgccgcggccatctggtgcacatcgtcgcccccgaaggcagccacaccggcgcggtacctttggtagcggccatcccgggattaccgccggcctccgcccagcacaccggccgcgacagcccggtggttttgccccagccctcggcgctcgctaacctgttcgaagcggcccgcgcccgccaggacgactacgacgtcatcttcaactggtgctacgactggctgcccctgtacctgaccccgtttttccgcacaccgctcgcccatatgatcacgatgggctccttgctggagagcatcgatcggcaaatcgtccgggtgctggagacctttccgggcaccgtggccgtctacacccgctcccaggccgagacgttcgcaccgatcgaagggctcaccgtgctgcccttcggcctggatccggccagttacgacttttgcccgacgcccgacgccgaaccgtttcttgcctgggtgggccgcatcgcccccgaaaaaggactcgaagacgccctggcggtggccgccgcctgcaatttgcctttgcacctgctggggcgcatgcaggatgcggcctacttcgagcgggtgtgcgccctgcatcccaccgcccgcgtgcactacgaaggcttcttccccaccgaccagatgcagcaccgcctcggaccggccctgggaatgctctttacccccaagtggaccgaagccttcggcaacgtcgccatcgaggcgatggcctgcggcgtgccggtggtggcctacgcccgcggcggtccagccgaaacgatccaagacggcctgaccggatttctggtcccccccgacgatactaccgcgatgatccaggccgtgggccgcctgggggaaatcgaccggaccgcctgccgtgcccacatcgagacccactattccctcgccgccctggggggtcgcttcgaggcgtggttcgccgaatgcgcccgctcgcgcactggacgtttgtcctcgggcacgctatga

SEQ ID NO: 143524 - protein, 369 aa, Gloeobacter violaceus PCC 7421
MPLKLRLLFVSSALGPLGTGMAGGVEFNVLTLAAELIRRGHLVHIVAPEGSHTGAVPLVAAIPGLPPASAQHTGRDSPVVLPQPSALANLFEAARARQDDYDVIFNWCYDWLPLYLTPFFRTPLAHMITMGSLLESIDRQIVRVLETFPGTVAVYTRSQAETFAPIEGLTVLPFGLDPASYDFCPTPDAEPFLAWVGRIAPEKGLEDALAVAAACNLPLHLLGRMQDAAYFERVCALHPTARVHYEGFFPTDQMQHRLGPALGMLFTPKWTEAFGNVAIEAMACGVPVVAYARGGPAETIQDGLTGFLVPPDDTTAMIQAVGRLGEIDRTACRAHIETHYSLAALGGRFEAWFAECARSRTGRLSSGTL

SEQ ID NO: 143525 - DNA, 1059 bp, Gloeobacter violaceus PCC 7421
  CDS (1)..(1059): transl_table=11
atgcgcattgcacaggtggctcctctatacgagcgcgtaccccctcccggttacggtggcattgaactggtggtgggcttggtgaccgacgagctggtgaggcggggccacgaggtgacgctttttgcttcgggggattcccagaccctggcggcgctccactcggtccacgaccgcgccctgaggctcgatgatcgcatccgtgagcccggcatctacgagatgatgcagatgagccgggtctacgagatggccgaagcgttcgatgtcatccactcccacatcggctgcgcagccttgccttattcgggcttggtgaagacaccgaccgtccataccctccacgggatttttaccgccgacaacagcaaaatttatcgccagtgctgccaacagccctatatcagcatcagcgaggcccagcgcgactacagtctgggcctcaattacctgagtactgtttacaacggtatcgattcgaacctctatcgctttcaagccgagcccgacgccgaggagccctacctggcttttgtggggcgcatctccccggaaaaagggccgctgcaggccatcgaagtggcccgccgcaccggctggacgctcaagatggcaggcaaagtcgacccggtggatcgcgagttctaccaggagcaggtcaaaccccaaatcgacggcaagcaaatccagtacctgggcgaagtgagccatctagaaaaagcgtccttgctcgccggggcggtggcgacgctcttttcgatcacctggcgcgagcctttcggcctggtgatgatcgagtcgatggcttgcgggacgccggttttggccatggcgatgggagcggctcccgaggtggttgtcgacggtcggaccggctacctggtgaacagcatcgaggaaatggtggagcgggtcggtcggatcgagacgattcgccgccaggactgccgcgaccacgtcatgcgccaatttaccgtcgagcgcatgaccgacggctacgaagcggcctaccgggcggtgctcgcaagccgcaacggcgccctctcccatcgggtctag

SEQ ID NO: 143526 - protein, 352 aa, Gloeobacter violaceus PCC 7421
MRIAQVAPLYERVPPPGYGGIELVVGLVTDELVRRGHEVTLFASGDSQTLAALHSVHDRALRLDDRIREPGIYEMMQMSRVYEMAEAFDVIHSHIGCAALPYSGLVKTPTVHTLHGIFTADNSKIYRQCCQQPYISISEAQRDYSLGLNYLSTVYNGIDSNLYRFQAEPDAEEPYLAFVGRISPEKGPLQAIEVARRTGWTLKMAGKVDPVDREFYQEQVKPQIDGKQIQYLGEVSHLEKASLLAGAVATLFSITWREPFGLVMIESMACGTPVLAMAMGAAPEVVVDGRTGYLVNSIEEMVERVGRIETIRRQDCRDHVMRQFTVERMTDGYEAAYRAVLASRNGALSHRV

SEQ ID NO: 143527 - DNA, 1191 bp, Mycobacterium avium subsp. paratuberculosis K-10
  CDS (1)..(1191): transl_table=11
atgcgcggcgctgatttcgtgttgccgaccgatgtcccggaagccggccgaccgctgcggatcgtgctcgtcgccccgccgtatttcgacgtcccgccggacgggtacggcggcgtggaggccgtcgtggccgatctcgccgacatgctggtggcccgcggacaccaggtcaccctgctcggcgccggcgaaccgggcacggcggccaggttcatcccgctgtgggaccggaccgtgcccgagcggctgggcgagccctaccccgagatcatgcacgcgctgaaggtgcgcagcgccatcacccggatcgccaaagaggacggcgtcgacatcgtgcacgaccacacctttgccgggccgatgaacgccccgatctaccaggggctgggcgtgcccacggtggtcaccgtgcacggcccgatcgacgacgacctgcatccctactaccgcgagctcagcggcgacgtcggcctggtggccatcagcgaccgtcagcggcagctggctccggagctgaattgggttggccgcgtacacaatgcgctgcgcatcgacgagtggccgttcgagaccgaaaagcatgactacgcactgtttttgggccggtatgcgccgtacaagggtgcgcacctggcgctgcgggccgcgcacgaggccggcatcccgctggtactggccggcaaatgcagtgagccctcggaaaaggagtacttcgaggactgcgtgcggccgctgctcaccgacaacgaccacgtgttcggcgaggccgacgcggtcagcaagcgaaagctgttgtcgcgcgcccgttgcctgctgttcccgatccagtgggaggagccgttcggcatcgtgatgatcgaggcgatggtctgtggcacgcccgtcgtcgccctgcgcggcggcgcggtctcggaggtggtcgccgacggggtcacgggcgtggtctgcgatcacccggacgaactgcccggggccatcgcccgggcccagaccctggacccgcacgcatgccggcgccacgtcgccacgaatttcgctgtggcacagttcggttcggcgtacgaagccatctaccgcaacgtgctgcagcatgcgacggcggcgccgcgccggatgcgcagcacgggcctggtggaatcgatcgaaaccggaaggcgcgcctgcgacttcaggcagaaggcaccggcatga

SEQ ID NO: 143528 - protein, 396 aa, Mycobacterium avium subsp. paratuberculosis K-10
MRGADFVLPTDVPEAGRPLRIVLVAPPYFDVPPDGYGGVEAVVADLADMLVARGHQVTLLGAGEPGTAARFIPLWDRTVPERLGEPYPEIMHALKVRSAITRIAKEDGVDIVHDHTFAGPMNAPIYQGLGVPTVVTVHGPIDDDLHPYYRELSGDVGLVAISDRQRQLAPELNWVGRVHNALRIDEWPFETEKHDYALFLGRYAPYKGAHLALRAAHEAGIPLVLAGKCSEPSEKEYFEDCVRPLLTDNDHVFGEADAVSKRKLLSRARCLLFPIQWEEPFGIVMIEAMVCGTPVVALRGGAVSEVVADGVTGVVCDHPDELPGAIARAQTLDPHACRRHVATNFAVAQFGSAYEAIYRNVLQHATAAPRRMRSTGLVESIETGRRACDFRQKAPA

SEQ ID NO: 143529 - DNA, 1065 bp, Burkholderia vietnamiensis G4
  CDS (1)..(1065): transl_table=11
atgcgtattgcccagatcgcgccgctttacgaagccgtcccgccgaaactttacggcggcaccgagcgtgtcgtgtcttacctgaccgaggcgctcgtcgaactcggccacgacgtgacgctgttcgcgagcggcgattccgtcacgtccgcgcggctcgaggccgcgtggccgcgcgcgctgcggctcgacccgtcgatccgcgattcgatggcgccccatatgcgcctgatcgagcaggtggcgcgggtcgcgcacgaattcgacgtgctgcactttcatctggactatctgccgttcccgctgatgtcgcgcctcgacacgccttatgtgacgacgctgcacggccgcctcgacctgcccgagctgcagccggtgttcgacgcgtttccggacgcgcccgtcgtatcgatctcgaattcgcagcgcaagccgctgccgcaggccgcctgggccggcaccgtgtatcacgggctgcccgacacgctgctcacgccgcagccggacgtgaagcccgagtacctcgcgttcctcggccgcatctgcccggaaaagcgcgtggacacggcgatccggatcgccgcgcaaagcgggctgccgctgaagatcgccgcgaaggtcgacaaggccgacgccgactacttcaaggaagtgatcgagccgctgctgggcgaggcgcacgtcgaattcatcggcgagatcaacgaggcgcagaagccggcgttcctgtcgggcgccaaggcgctgctgttcccgatcgactggccggaaccgttcgggctggtaatgatcgaggcgatggcgtgcggtacgccggtcgtcgcgttcaaccgcggctcggtgccggaggtgatcgaggacggcgtgaccggcttcatcgtcgaggacgtgcagggcgcagtcggcgcactgcaccgcatcgacagcctgtcgcgcgacacgattcgcgcccgcttcgatacgcgcttcagcgcgacggcgatggcgcgccgctatgtcgaaacctacgaatcgctttgcgcggcggcgaaacgcccggcgttgcgcagggtcgccggtgcctga

SEQ ID NO: 143530 - protein, 354 aa, Burkholderia vietnamiensis G4
MRIAQIAPLYEAVPPKLYGGTERVVSYLTEALVELGHDVTLFASGDSVTSARLEAAWPRALRLDPSIRDSMAPHMRLIEQVARVAHEFDVLHFHLDYLPFPLMSRLDTPYVTTLHGRLDLPELQPVFDAFPDAPVVSISNSQRKPLPQAAWAGTVYHGLPDTLLTPQPDVKPEYLAFLGRICPEKRVDTAIRIAAQSGLPLKIAAKVDKADADYFKEVIEPLLGEAHVEFIGEINEAQKPAFLSGAKALLFPIDWPEPFGLVMIEAMACGTPVVAFNRGSVPEVIEDGVTGFIVEDVQGAVGALHRIDSLSRDTIRARFDTRFSATAMARRYVETYESLCAAAKRPALRRVAGA

SEQ ID NO: 143531 - DNA, 1065 bp, Burkholderia vietnamiensis G4
  CDS (1)..(1065): transl_table=11
atgcgaatcgcccaaatcgctccgttgcacgaagcggttcccccgaagctttatggcgggaccgagcgagtggtgtcctatctgaccgaagcactcgtcgagatggggcatgacgtcacgctgttcgcgagcggcgattcgcaaacgtcggcgaagctcgaagcgtgctggccgcaggcgctgcgcctcgatccgacgatccgcgacgtgatggccccgcacatgctgctgctcgagcaagtgcgccgccgcgcggaagagttcgacgtcctgcactgccacatcgactactacccgttctcgctgttctcgcgtcagccggtcccgcatctgacgacgatgcacggccgtctcgacctgcccgaactgcagccgatcttcaacgcgttcagcgacgtgccggtcgtgtcgatctccgacaaccagcgcatcccgctgccgcaggcgaactggctgtcgaccgtgtaccacggcctgccggaaaacctgctgacgccgatcccgaacgtgaagccgagctatctcgcgttcctgggccgcatctcgccggaaaagcgcgtcgacaccgcgatccgcatcgccgagcaggccggcctgccgatcaagatcgccgcgaagctcgacaaggccgaccgcgcgtattacgaagagaagatcaagccgctgttcgcgctgccgcacgtcgagtacatcggcgagatcagcgaagccgaaaagaccgaattcctcggcaatgcgcacgcgctgctgttcccgatcgactggccggagcccttcggcctagtgatgatcgaggcgatggcctgcggcacgccggtgatcgcgttcaagcgcggctcggtgccggaagtgatcgacaacggcgtgtcgggcttcgtcgtcgaagacgaactgtcggccgtcgccgcgctcaagcgcctcgatacgctgccgcgcgagaaggtgcgcgccgcgttcgaagcccgcttctcgtcgaaggtgatggcgcagaactacgtgaaggcgtacgaggaactgctgcgccagaagcgccgcacggtgctgcgcgaagtcaacgcaggctga

SEQ ID NO: 143532 - protein, 354 aa, Burkholderia vietnamiensis G4
MRIAQIAPLHEAVPPKLYGGTERVVSYLTEALVEMGHDVTLFASGDSQTSAKLEACWPQALRLDPTIRDVMAPHMLLLEQVRRRAEEFDVLHCHIDYYPFSLFSRQPVPHLTTMHGRLDLPELQPIFNAFSDVPVVSISDNQRIPLPQANWLSTVYHGLPENLLTPIPNVKPSYLAFLGRISPEKRVDTAIRIAEQAGLPIKIAAKLDKADRAYYEEKIKPLFALPHVEYIGEISEAEKTEFLGNAHALLFPIDWPEPFGLVMIEAMACGTPVIAFKRGSVPEVIDNGVSGFVVEDELSAVAALKRLDTLPREKVRAAFEARFSSKVMAQNYVKAYEELLRQKRRTVLREVNAG

SEQ ID NO: 143533 - DNA, 1071 bp, Bradyrhizobium sp. ORS278
  CDS (1)..(1071): transl_table=11
atgcgcattgcgcaggttgctccattgacggaggccgtgcctccgaagctctacggcggcactgagcgcgtcgttcattggttgaccgaagagctcgttgccctcggacacgacgtgaccctgttcgccagcggcgattcgcagacctcggcaacactctgtccgacctggccgaaggcactgcgcctcgacggctcggtgcgcgatcccaacgcgctgcacatggtcatgctggagaatgtccggcagcgttgtgacgacgaggagttcgacattctccacttccacctcgactactatccgttctcgttgttccaccgccagccgacaccgttcctcaccacgctgcacggccggctcgatctccctgagcatcagcctgtcttctcgatgttcaaggatgttccggtcgtgtcgatctccgatgcacagcgccgcccggtgccgaacgcgaactgggtgcgcaccgtgctgcacggcctccccgaaaagctgctcatgccccggccttcgacgccgagctatctcgccgtgctcgggcgcatcgcgcctgaaaaaggtgtcgaccgcgccatcaagatcgcgatgcgctgtggcattccgctgaagatcgcggccaaggtcgaccgcgcggatcaggactattacgatcagctgattcatccgctgatcaacgacaacccgctcgtcgagttcatcggcgagatcggcgaccacgagaaaccggagttcctctccggcgcgctcggcctgctgttgccgatcgactggccggagccgttcggcctcgtgatgatcgaatccatggcctgcggcacacccgtgatcgcctacaatcgcggctcggttccggaggtgatcgacgacggcgtcaccggcttcatcgtcgaggacgagctcagcgcggtcgctgccgtcaaccggctgcatgatctcagccgcgcccgcgtccgcgagcggttcgagcagcgattcacggcacgccgcatggcgctcgactatctcgccgcctatcgtcggctgatcgagaaggccgagccgcgcatccggctggtcagcagcgcggagtag

SEQ ID NO: 143534 - protein, 356 aa, Bradyrhizobium sp. ORS278
MRIAQVAPLTEAVPPKLYGGTERVVHWLTEELVALGHDVTLFASGDSQTSATLCPTWPKALRLDGSVRDPNALHMVMLENVRQRCDDEEFDILHFHLDYYPFSLFHRQPTPFLTTLHGRLDLPEHQPVFSMFKDVPVVSISDAQRRPVPNANWVRTVLHGLPEKLLMPRPSTPSYLAVLGRIAPEKGVDRAIKIAMRCGIPLKIAAKVDRADQDYYDQLIHPLINDNPLVEFIGEIGDHEKPEFLSGALGLLLPIDWPEPFGLVMIESMACGTPVIAYNRGSVPEVIDDGVTGFIVEDELSAVAAVNRLHDLSRARVRERFEQRFTARRMALDYLAAYRRLIEKAEPRIRLVSSAE

SEQ ID NO: 143535 - DNA, 1011 bp, Thermus thermophilus HB27
  CDS (1)..(1011): transl_table=11
gtgagggtggccatgctggcccccatcgcctggcgggttccccccaggcggtacggaccctgggaacaggtggtctacgacctcaccgaggcccttctggacctcggggtggaggtggtcctctacgccacctgcgacgccgagacccgggcgcctctgcggtgcaccgcggcgaagcccctctgggaggacagggaggcggactggaaggtggaggagttcctccacatcgcccgcgccatggaggaggcgggggagtttgacctggtccacaaccactacgacttcatgcccctctacttcaccccctttgtgaaggtcccggtcctcaccaccatccacggcttctccagcgagaagatcaagaaggtctaccgccgctacgccgccctaccccacgtccactacgtggccatctccgaggcggacaaggacccgggccttccctacctgggggtcgtccaccacggggtggacccgcggcgcttccgggtgggggagggggggaggcacctcctcgtcctctcccgcatccacccggacaagggcatccgggaggccatcctcttcgcccgaaagtcgcgccttcccctgaagatcgccgggcccatccaggacgaggcctacttccaaaacgaggtggcccccctgctcggggaaggggtggagttcctgggccccgtggaccccgagacccggcagaccctcttggatggggccatcgccctcctccactttgtaaacttcaaggagcccttcggccttgctccggtggaggccatgatgagcggcgtccccgtcctggcaaggcccctaggggccctccccgagacggtgcgccacggggagacggggtttctggtgagggactgggaggaggccttggagcacctggaggccgtgaggcgcctggaccgctgggccatccgtcgctacgcggaggcccgcttctcccgggaacgcatggcccgggactacctggagctttaccgaaaggtggtgggagcgtga

SEQ ID NO: 143536 - protein, 336 aa, Thermus thermophilus HB27
MRVAMLAPIAWRVPPRRYGPWEQVVYDLTEALLDLGVEVVLYATCDAETRAPLRCTAAKPLWEDREADWKVEEFLHIARAMEEAGEFDLVHNHYDFMPLYFTPFVKVPVLTTIHGFSSEKIKKVYRRYAALPHVHYVAISEADKDPGLPYLGVVHHGVDPRRFRVGEGGRHLLVLSRIHPDKGIREAILFARKSRLPLKIAGPIQDEAYFQNEVAPLLGEGVEFLGPVDPETRQTLLDGAIALLHFVNFKEPFGLAPVEAMMSGVPVLARPLGALPETVRHGETGFLVRDWEEALEHLEAVRRLDRWAIRRYAEARFSRERMARDYLELYRKVVGA

SEQ ID NO: 143537 - DNA, 1017 bp, Desulfotalea psychrophila LSv54
  CDS (1)..(1017): transl_table=11
atgaaaattgcagttttagccccgatttgctggagaaccccaccgcgacactacgggccatgggagcaggtggcatccaatatcgccgaaggtctggtcaagcgcgggtgcgaggtaactctttttgcaacgggtgattcccttacccagggcaaactttcctctacctgccagcgaccctatgaagaagataagagccttgatccaaaggtatgggaatgtttacatatcgcccacatgatggaacgcgccgatgaattcgacatcatccataacaactatgattttctccccctgagctattcaagactgatcaaaacaccgatggtgaccaccattcacggtttttcttccccccaaatcataccggttttcaaacagtacaataaaaagaatcattatgtttccatcagcaatgccgaccgcagccctgaactagaatatatcgcaacggtgtataacggtatcgatatggataatttcacattgaaagaatcggtgggtgaatatttactgtattttggccggattcatccggataaaggaacccatgaagccatccagattgctaaaaagagcaagatgaagctgatcatttccggttttatccaggatcagaactattataaggaaaaagtagaaccgtttataaatggcgacgatatcgtttatgtaggcaactccggccccgaaaaaagagatacattactcggcaatgcatatgccttactgcatcccatcaatttcgccgaaccctttggtttaagtgtggccgaatcgatgctgtgcgggacaccggtgatcgccttcaataaaggctccatgccggaactaatcgctgacaaaaagaccggctttctggtcgacaatgtggacgaagccgtttgcaccttaaaagacataaagcacattgaccgcaactcctgccggcgatgggctgagaaaaaattcagtcaggaaaaaatgatcgataattatattgaggtttaccaaaaaatactagattctgccccttga

SEQ ID NO: 143538 - protein, 338 aa, Desulfotalea psychrophila LSv54
MKIAVLAPICWRTPPRHYGPWEQVASNIAEGLVKRGCEVTLFATGDSLTQGKLSSTCQRPYEEDKSLDPKVWECLHIAHMMERADEFDIIHNNYDFLPLSYSRLIKTPMVTTIHGFSSPQIIPVFKQYNKKNHYVSISNADRSPELEYIATVYNGIDMDNFTLKESVGEYLLYFGRIHPDKGTHEAIQIAKKSKMKLIISGFIQDQNYYKEKVEPFINGDDIVYVGNSGPEKRDTLLGNAYALLHPINFAEPFGLSVAESMLCGTPVIAFNKGSMPELIADKKTGFLVDNVDEAVCTLKDIKHIDRNSCRRWAEKKFSQEKMIDNYIEVYQKILDSAP

SEQ ID NO: 143539 - DNA, 1182 bp, Bacillus licheniformis ATCC 14580
  CDS (1)..(1182): transl_table=11
atgaaacagttaaaaatcggaatcacatgttatccgagtgtcggcggatcaggaattatcgccaccgagctcggcaagctgcttgcggaaaaaggacatgaaattcattttattacatcaagtgttccgtacaggctcaataaagtgtattccaacatctattttcacgaagtcgaagtcaatcaatatgccgtttttaagtacccgccgtatgatttggctttggccagcaaaatggcggaggtggcaaagcgggaacagcttgatgttctgcatgcccactacgcggtgcctcacgcgatttccgcttttttagcgaagcaaatgctgaacggaaacattaaaacggtcacaacgctgcacggcacagatataaccgtgctcggctatgatccgtctttaaaagacctgatcaagtttgcgatcgaatcgtctgaccgcgttaccgcggtttcttcggctcttgccgcgcaaacgtatgatttgatcaaaccgaacaaaaaaattgaaacgatctataattttgtggatgagcgcgtgtatttaaaaaaacaggagcatcattcgctgaaagagcagtacggcattgcacctgatgaaaaagtgatcatccacgtatccaatttcagacaggtgaagcgcgtacaggatgtcatccatgtattcagccgcattgtcaaacaaatgaaatcgaagctgattctcgtcggcgacgggccggaaatgaccgtgatctgccagcttgtcagacagctcggattaaaagacgacgttcttttccttggcaaacaagacagcgtagaagagctttacgccatcagcgatttaaagctgcttttgtccgagaaggaaagcttcggtttagtgctgcttgaagcgatggcctgcggcgttccgtgcatcggcacaaatatcggggggattcccgaggtgatcaaaaacggagtatccggttacttggtcgatgtcggagatattgaaggtgcagctagtaaggcgcttcatttactgactgatgaaagcctgcagcgccagtttgcggaagcggcgctgcaaagcatcaaggaacgcttttcttccaacaaaatcatcgcgcaatatgaagaaatttatcaacaattaacagactgggagtgtgacaatggaggatctctttttgaaggctcttcctctccttcgtga

SEQ ID NO: 143540 - protein, 393 aa, Bacillus licheniformis ATCC 14580
MKQLKIGITCYPSVGGSGIIATELGKLLAEKGHEIHFITSSVPYRLNKVYSNIYFHEVEVNQYAVFKYPPYDLALASKMAEVAKREQLDVLHAHYAVPHAISAFLAKQMLNGNIKTVTTLHGTDITVLGYDPSLKDLIKFAIESSDRVTAVSSALAAQTYDLIKPNKKIETIYNFVDERVYLKKQEHHSLKEQYGIAPDEKVIIHVSNFRQVKRVQDVIHVFSRIVKQMKSKLILVGDGPEMTVICQLVRQLGLKDDVLFLGKQDSVEELYAISDLKLLLSEKESFGLVLLEAMACGVPCIGTNIGGIPEVIKNGVSGYLVDVGDIEGAASKALHLLTDESLQRQFAEAALQSIKERFSSNKIIAQYEEIYQQLTDWECDNGGSLFEGSSSPS

SEQ ID NO: 143541 - DNA, 1065 bp, Burkholderia mallei ATCC 23344
  CDS (1)..(1065): transl_table=11
atgcgcatcgcccaaatcgccccgctctacgaagccgtcccgcccaaactctacgggggcaccgagcgggtcgtgtcctacctgaccgaggcgctcgtcgaaatggggcacgacgtcacgctgttcgcaagcggggattccgtcacgtcggcgcggctggaagccgcatggccgcgcgcgctgcgcctcgatccgtcgatccgcgacgcgatggcgccccatatgcgcttgctcgagcaggtcgcacgggccgcgcacacgttcgacatcctgcacttccacctcgactacctgccgttcccactgctgtcgcgccttgacgcgccgttcgtcacgacgctgcacggccgcctcgatctgccggagctgcagcccgtgttcgacgcgttcccgaacgcgcccgtcgtgtcgatctcggattcgcagcgcacgccgctgccgcaagccggatgggccggcaccgtctaccacgggctgcctgacacgctgctcacgccgcaagccggccgcaagcctgaatatctcgcgtttctcggccgcatctgcccggaaaaacgcgtcgacaccgcaatccggatcgccgcgcaaagcggcctgccgctgaagattgctgcgaaagtcgacaaggtcgacgaggattatttcaaggccgagatcgaaccgctgctcgattccgcgcacgtcgagttcatcggcgagatcaacgaagcgcagaagcccgccttcctgtcgggcgcgaaggcgctgctgtttccgatcgattggcccgagccgttcggcctcgtgatgatcgaggcgatggcatgcggcacgcccatcgtcgcgttcaaccgcggctccgtgccggaagtcatcgatgacggcctgacgagcttcatcgtcgaggacgtacagggcgcggtgggcgcgctgcaccggatcgacgaattgtcacgcgatgcaattcgtgcgcaattcgagcaacgtttcagctcgcatgcaatggcgcggcgctatatcgacatctatgaaacgctgcgcggcgcaaccaagcaaccgcaatggcagcgcgtagcggcgggttaa

SEQ ID NO: 143542 - protein, 354 aa, Burkholderia mallei ATCC 23344
MRIAQIAPLYEAVPPKLYGGTERVVSYLTEALVEMGHDVTLFASGDSVTSARLEAAWPRALRLDPSIRDAMAPHMRLLEQVARAAHTFDILHFHLDYLPFPLLSRLDAPFVTTLHGRLDLPELQPVFDAFPNAPVVSISDSQRTPLPQAGWAGTVYHGLPDTLLTPQAGRKPEYLAFLGRICPEKRVDTAIRIAAQSGLPLKIAAKVDKVDEDYFKAEIEPLLDSAHVEFIGEINEAQKPAFLSGAKALLFPIDWPEPFGLVMIEAMACGTPIVAFNRGSVPEVIDDGLTSFIVEDVQGAVGALHRIDELSRDAIRAQFEQRFSSHAMARRYIDIYETLRGATKQPQWQRVAAG

SEQ ID NO: 143543 - DNA, 1038 bp, Pseudomonas syringae pv. phaseolicola 1448A
  CDS (1)..(1038): transl_table=11
atgaaaattgcccaggttgcccctttgttcgaggcggtcccgcctcaacgctacggaggtacggagcgagtggtgtcctacctcactgaggcacttgttgaactaggccaccaagtgacgttgttcgccagcggcgactcattgacgtctgcagagcttgatgcagtctggcccgccgctctgaggctcgattacggaagcttcgacgtcataagcccgcacctggtcatgatggaacgcgtgaggcgtcgtgcgcaggagttcgacattattcacttccacctggacttctaccccttctccctgttcagccgccagcccacaccgtttgttaccaccttggatggtcgagtcgatctgcccgcactcaaaccggtgttcaacacctttgcagacatgccgcttatttcgatttccaacgctcaacgcaatgatctgccagccgccaactgggtgggcacggtgtatcacggcttgccgctacaactccatacaccccggcaagtggaaaggacataccttgcttttctgggacgaatcacgcctgtgaagcaggtcgatgcggccattcgcatcgcccaacaatgcgatatccccatcaagattgctgccaagatagacgccgttgacagcgcttactttgaacgagacatacgtccgctattggattctccgctggtcgaatacataggtgagatcaatgagcaggaaaaaaccactttcctgtcaggtgccttggcacttttgtttcctattgattggccagagcctttcggtctggtcatgatcgaggcaatggcgtgcggtactccagtgatcgcatttccctccggctcagtcccggaagtcatagaagacggagtcacaggcttcgttgtccgcaacgaagcagaagcggtagccgccgtccataaggtgagccagctatctgccatgagaatacgcgagcagtttcaaaagcgtttttcagcgcgtcaaatggccgaaaactatgtccatgcctatcagtcactcattgaccggtcctcatcctgttaa

SEQ ID NO: 143544 - protein, 345 aa, Pseudomonas syringae pv. phaseolicola 1448A
MKIAQVAPLFEAVPPQRYGGTERVVSYLTEALVELGHQVTLFASGDSLTSAELDAVWPAALRLDYGSFDVISPHLVMMERVRRRAQEFDIIHFHLDFYPFSLFSRQPTPFVTTLDGRVDLPALKPVFNTFADMPLISISNAQRNDLPAANWVGTVYHGLPLQLHTPRQVERTYLAFLGRITPVKQVDAAIRIAQQCDIPIKIAAKIDAVDSAYFERDIRPLLDSPLVEYIGEINEQEKTTFLSGALALLFPIDWPEPFGLVMIEAMACGTPVIAFPSGSVPEVIEDGVTGFVVRNEAEAVAAVHKVSQLSAMRIREQFQKRFSARQMAENYVHAYQSLIDRSSSC

SEQ ID NO: 143545 - DNA, 1083 bp, Thermobifida fusca YX
  CDS (1)..(1083): transl_table=11
atggaccaagcaaccactctcgaacgcccccggctgcggctcgccctgctggcaccgccctggtacgagatcccgcccgtcgcctacggaggcgtcgaagaggtcatgggggagctcgcagagcaactggtcgcccgtggccacgacgtgaccattgtcggagtagggaggaaaaggacccgggcgaagctccggacgacctacgacgagccgcagggcgagcggatcggcgaccgcaccgttgagatcgcgcacgccgcggaagcacagcaggtcatagcggaactgcaaccggacctcgtgcacgaccacacgatgatcggagcgctcacggcagcggtccgcccggcgcccactgtggcgaccgtccactcgatcgtcaccccggacctcgcccggtactaccgggcggtgcgggagagcgtgcagcttgtcgcggtctccgatacccaacggcggttggcgccggatctgccgtgggccgcgaccgtgcacaacgggatcaacccctaccggtttccgttccgcgcagacaaagaggactatgcgctggtgctgggccgcagcaccccggagaaagggatcgatatcgcgatccgcgcggcccgggaggcggggcgccgactggtgatcgcgctcaaacgcagccagcccgacgagcgggcctacttcgacgaagtgatccgccctctgctcgggcccaccaccgaatacgtgggggaggtctcccaagaggagaagctgaccctgctcgctagggcccgctgcctgctcttcccggtccgctgggaagaaccgttcggcatggtggccgtagaagcaatggcgtgcggcaccccggtggttggattcagccgcggagggattcaggaaaccgtgcgcggcggggtcaccggcgtgctggtttcccgggaggccgaactcgccgcggcagtggatcacgccgcccagttggacccccacgcctgccgggagcacgtgcagcgcaacttcagtggggagacgatggcgcggaactatgaacgggcctactattccgtgcttcacctaagagcggtgccgcagttctccggggcccgctga

SEQ ID NO: 143546 - protein, 360 aa, Thermobifida fusca YX
MDQATTLERPRLRLALLAPPWYEIPPVAYGGVEEVMGELAEQLVARGHDVTIVGVGRKRTRAKLRTTYDEPQGERIGDRTVEIAHAAEAQQVIAELQPDLVHDHTMIGALTAAVRPAPTVATVHSIVTPDLARYYRAVRESVQLVAVSDTQRRLAPDLPWAATVHNGINPYRFPFRADKEDYALVLGRSTPEKGIDIAIRAAREAGRRLVIALKRSQPDERAYFDEVIRPLLGPTTEYVGEVSQEEKLTLLARARCLLFPVRWEEPFGMVAVEAMACGTPVVGFSRGGIQETVRGGVTGVLVSREAELAAAVDHAAQLDPHACREHVQRNFSGETMARNYERAYYSVLHLRAVPQFSGAR

SEQ ID NO: 143547 - DNA, 1110 bp, Prochlorococcus marinus str. NATL2A
  CDS (1)..(1110): transl_table=11
gtgataaaaaagcaattaaaacttattcttgtaagtacacctataggttatctgggcagtggcaaaggcggaggagttgaacttactattgtttctcttataaaaggattaatttcattaggtcataaaattattttaattgcaccaaaaggatcaaaattacctttcgaaagtgagttgcttgaaataagattaatagatggagttgatcaacctagttggcagcatcaggatagaaaagatccagttttaattccttctaaaagtgtcttaccaaatttatgggaagaggtaattgatatcgcaaataaatccgacgcagttattaattttgcatatgattggcttccattatggttaacaaaaacacaatcaattaaaatatttcacttaattagtatgggcgctgaatcaatagtaatgaaagaaactattagtgaaataagtgaattatttccttttcgtctggcttttcatactaaaagacaatctaaagattattctttaaaaactgatccaattatcgttggaaatggttttgatacggatgattatttattcaatgaaatggagaatggaccattaggttgggctggaagaatagcgccagagaaaggtttagaagatgcagtaaaagttgcgaatgatttgggtgaaaaattattagtttggggactcatagaagataaagaatatgcatcaaaaattgaaaataccttcacaaacgaaattgttgagtggaaaggatttcttccaacgaataaatttcaggaacaacttggacgatgcagagcgttaataaacacgcccaaatggaatgaagcctacggcaatgttattgttgaagcgatggcttgtggtgttcctgtaattgcatatgatttgggaggaccaggcgaattgatcgaagatggattcaatggctttttggttaagcccaatgatattgaaggtttgataaaagcaacaaaatcaatctcagaaatcaaaagaaaaaattgtagagcttggtttgaaaaaaaagccaccagcaaagtctttgcagaaagagtggagaattggcttcataaaggcttaaataagaaaatctcagcagacttgcaagattaa

SEQ ID NO: 143548 - protein, 369 aa, Prochlorococcus marinus str. NATL2A
MIKKQLKLILVSTPIGYLGSGKGGGVELTIVSLIKGLISLGHKIILIAPKGSKLPFESELLEIRLIDGVDQPSWQHQDRKDPVLIPSKSVLPNLWEEVIDIANKSDAVINFAYDWLPLWLTKTQSIKIFHLISMGAESIVMKETISEISELFPFRLAFHTKRQSKDYSLKTDPIIVGNGFDTDDYLFNEMENGPLGWAGRIAPEKGLEDAVKVANDLGEKLLVWGLIEDKEYASKIENTFTNEIVEWKGFLPTNKFQEQLGRCRALINTPKWNEAYGNVIVEAMACGVPVIAYDLGGPGELIEDGFNGFLVKPNDIEGLIKATKSISEIKRKNCRAWFEKKATSKVFAERVENWLHKGLNKKISADLQD

SEQ ID NO: 143549 - DNA, 1101 bp, Ralstonia eutropha JMP134
  CDS (1)..(1101): transl_table=11
atgaaaatcgcccaaattgccccgctccaggaaagctgcccgccaaggcagtacggcggtaccgaacgcgtcgtggcgtacctcgcaaacgagctggtgcgccaggggcatgatgtgacgctctttgcgagcggcgattcatggacggccgcccggctggtgagttgcgtgccgcgcgcattgcgcaccgacccatctgtgcacgactggctgccgtaccacgtcatgatgctggaggatgtgcgccggcaggccgatgatttcgatgtgctgcatttccacacggatatgctgcatttcccgctggtccgcagccttgccagccgcaccgtgactacgctgcatggccggctcgatctgccagatctgcgcccgttctatgcaacgtttccggatatgcccctggtgtcgatatccctggagcaacggcgtcccatgccgccggtcaactggctcggcaatgtctaccatggcttgccggaatccctgctgtcctttcatgccgtgccgcgcgggggctatctggcattcctcggccgcattgcgcgcgagaagcgccccgaccgcgcgatcgagatcgccgtgcgcagcggcatgccgctgaagatcgcagccaagatcgaccgcgccgaccaggcgtactgggatgcggaaatcgcgccactggtccggcgccacccgaatgtggagtatcttggcgaaattggcgatcgcgaaaaaccgcgttttcttggcaacgcgcgtgcgctgctgtttccgatcgactggcccgagccgttcggccttgtgatgatcgaatccatggcctgcggtacgccggtgattgccttttcttcggggtcggttcctgaagtgctcgatgatggcgtcactggctttatcgtggacagtgtggacgaagccgtggctgcggtagggcgtctgggagacatcgaccgccttgacgtgcggcgcgcgttcagtgcgcgcttcagtgccgcgcgcatggccagcgactacgtagcgttgtatcgccggctgtgcgaaccgctgtcggtcaacgggcacacgcatgcggagccggcaggccatgaggccgcggacctgcatatcgcgccctga

SEQ ID NO: 143550 - protein, 366 aa, Ralstonia eutropha JMP134
MKIAQIAPLQESCPPRQYGGTERVVAYLANELVRQGHDVTLFASGDSWTAARLVSCVPRALRTDPSVHDWLPYHVMMLEDVRRQADDFDVLHFHTDMLHFPLVRSLASRTVTTLHGRLDLPDLRPFYATFPDMPLVSISLEQRRPMPPVNWLGNVYHGLPESLLSFHAVPRGGYLAFLGRIAREKRPDRAIEIAVRSGMPLKIAAKIDRADQAYWDAEIAPLVRRHPNVEYLGEIGDREKPRFLGNARALLFPIDWPEPFGLVMIESMACGTPVIAFSSGSVPEVLDDGVTGFIVDSVDEAVAAVGRLGDIDRLDVRRAFSARFSAARMASDYVALYRRLCEPLSVNGHTHAEPAGHEAADLHIAP

SEQ ID NO: 143551 - DNA, 1377 bp, Methanosarcina barkeri str. Fusaro
  CDS (1)..(1377): transl_table=11
gtgagtgattttgggggtattaatataagaattgcaatgttgtctccgattgcctggagcacgccacctaaaaagtatggtccctgggaatctattgtatccttattaactgaaggactggtaaaaaggggtattgacgttacactatttgcgacagcggactctcacacagcagcgaaacttcatgctgtatgtccgagaccttatgaagaagataaggatatgatcagaaaagtgtatgaaggccttcatatctcagaagttttcgagagagcaaaggaattcgatataattcataatcatttcgattatcttcctttgacctacagtgcccttgtcgatacgcctgttgtaacaacgatccatggtatttcttcacggaaaattttgcctgtatataaaaagtacaataataaaactttttacgtatccataagtgatgcctacagatgccgtgatctcgactatatagcaacggttcgtcacggaattgacataggaagcttttatttcaatgaaaaaccgcaggattatctactctttttatcacgcctgcataaagacaaaggcgtaagggaagcaatagaagtcgcaaaaaaaactggcagaaaacttagaattgctggcttcattgcggatcaagcttattttgaaaaagaagtccagccccatctggacaataaacagattatttacgaagggcatgtcgatcctgagtttaagaaggaactcctgtcaaatgcatatgctttgcttcacatgattaattatgaagaggctttcgggattggcgtagttgaagctatggccagcggtacgccggtaattgcaatgaacaggggttcaatgcccgagcttatccgggacggagagactggatttctcgtaaatagtgttgaggaagctgccgaagctgtgcaaaaacttggctccatatcccgcaaaaaatgcagggaaaacgtagaaaaacgtttttcggttgacaggatggtagatgattatattaaagtgtacgagaccatcctcgaaaaatgtaaacgtgaggaagaaaggccctggggcttttatgaagtgctcaggcagaggcctggatataaggtcaaaagccttactgttcttcctcagggcgaaatctcactccagcgccattttcatcgaagcgagcactggtacataatcagtggagagggtcttgtagttaaaaacgggaatgaaataagggttcttcctggagattcggtcgatcttccggtaaatgagatacatcgaattaagaatataggcagtcaaaaccttgttttcattgagatcgcacagggagactatattggagaagacgatattgaaaggcttgaagacaaatatgggagagtttga

SEQ ID NO: 143552 - protein, 458 aa, Methanosarcina barkeri str. Fusaro
MSDFGGINIRIAMLSPIAWSTPPKKYGPWESIVSLLTEGLVKRGIDVTLFATADSHTAAKLHAVCPRPYEEDKDMIRKVYEGLHISEVFERAKEFDIIHNHFDYLPLTYSALVDTPVVTTIHGISSRKILPVYKKYNNKTFYVSISDAYRCRDLDYIATVRHGIDIGSFYFNEKPQDYLLFLSRLHKDKGVREAIEVAKKTGRKLRIAGFIADQAYFEKEVQPHLDNKQIIYEGHVDPEFKKELLSNAYALLHMINYEEAFGIGVVEAMASGTPVIAMNRGSMPELIRDGETGFLVNSVEEAAEAVQKLGSISRKKCRENVEKRFSVDRMVDDYIKVYETILEKCKREEERPWGFYEVLRQRPGYKVKSLTVLPQGEISLQRHFHRSEHWYIISGEGLVVKNGNEIRVLPGDSVDLPVNEIHRIKNIGSQNLVFIEIAQGDYIGEDDIERLEDKYGRV

SEQ ID NO: 143553 - DNA, 1098 bp, Anabaena variabilis ATCC 29413
  CDS (1)..(1098): transl_table=11
atgcggattgctcaaattgctcctctttgggagagagttccacctcttggttatggtggaacagaattagtcgtgggcttattgaccgatgaattagttcggcgagggcatgaagtaacgctatttgcatcgggagattcaataactttggcaaagctgcaatcagttcatccttatgctttgagactagattcaagcatcaaagagtgtaacatctatgaaatgttggaactggctttggtatatgagcaagcccaaacctttgacataattcattcacatatgggctggagtgcgttgccctatgcaaatttagtaaagacaccgacagttaccacattacatggtatctttacccctgataacgaaaagatgtttcaatatgccaaaaagcagccctatgtaagtatttccaattcccaacgtgaatctaggctagggttgaattatgtagcaactgtctacaatggcattgatatcagtagtcataagtttcatcctcagccggacgaaccaccttatctggcttttttgggaagaatttcaccagaaaaaggaacagacttagcaatacagattgcaaaagaggctggttggcgtttaaagatggcagctaaggtggatgtcgttgatatagagtattttgagcgagaaattcagcccttaattgatggtcagcaaattcagtatttgggtgaagctaaccatgttcaaaagaatgctttgatggggggtgcagtagcaactttatttacgattacttggcgagaaccctttggtttggtaatgacagaatcaatggcagcaggaacaccagtcatcgccatgaatttaggttcagttcctgaagtaattgttcacggaaaaactggctttatttgtaatagtatttctgaatgtgttaatgccgttaacaaagtggcagaactagatcgtcatgcttgtcgtcaacatgtggagaattgttttaacgtacaaaaaatggtagatagctatgaagaagtttattggcagattctggcagagcgcatgactcaaaataaaaaagttatgcatttcggcgattttaaacataaacatcaaatccagaaatgttga

SEQ ID NO: 143554 - protein, 365 aa, Anabaena variabilis ATCC 29413
MRIAQIAPLWERVPPLGYGGTELVVGLLTDELVRRGHEVTLFASGDSITLAKLQSVHPYALRLDSSIKECNIYEMLELALVYEQAQTFDIIHSHMGWSALPYANLVKTPTVTTLHGIFTPDNEKMFQYAKKQPYVSISNSQRESRLGLNYVATVYNGIDISSHKFHPQPDEPPYLAFLGRISPEKGTDLAIQIAKEAGWRLKMAAKVDVVDIEYFEREIQPLIDGQQIQYLGEANHVQKNALMGGAVATLFTITWREPFGLVMTESMAAGTPVIAMNLGSVPEVIVHGKTGFICNSISECVNAVNKVAELDRHACRQHVENCFNVQKMVDSYEEVYWQILAERMTQNKKVMHFGDFKHKHQIQKC

SEQ ID NO: 143555 - DNA, 1068 bp, Anabaena variabilis ATCC 29413
  CDS (1)..(1068): transl_table=11
atgaaaatcgctcaagttgcccccttatgggaacgagttccacctcccagttatggaggtattgaactagtagtaagtcacttgacaaacgaactagttcgtcgtggtcatgaggtaacattatttgcctctggcgattctcaaaccttggcacatttagaaacagtttgtccgcgtgcattgcgcttagacaaaaatgttcaagactatgccgcttatgaaactttagaactgagccaagtttaccagaacgcgacggaattcgatattatccattctcatttagggatttcggctttacctttagcgaacttggtaaaaacccctacagtacatacgctgcatggacattttaccaaagataaccaaaacgtctttagtcatcatcatcaacaaccatacgttagtattagcaacgcccagcgtcaaattcatctcaactatataaaaaccgtttataacggtattgagccaaaagattatccgttcatttctcaaccaaaagagccgccatatctagcatttttaggacgcttttctccagaaaaaggcccacatcaggcgatcgcgatcgctaagcagagtggttggcgtttaaagatggcaggaaaagttgatatagtagatgccaagttttttgaacaagagattcttcctcatatagatggtcagcaaattgaatatttaggcgaaattaaccatacagaaaaagctgaactactaggcaatgctgctgctactctttttccgatcaattggcaagaaccttttggtttagtgatgattgaatcaatggcaactggtacgccagtcatagggatgaatttaggttctgtacctgaggtgatcgaccaaggcaaaacaggttttatctgccgaacttatgaagaaatgattcagatgatagctgttaccttggaattagatcgtcgagattgtagagaatccgtagtcaacaaatttagcgttagccacatggttgatgggtatgaagcggtatatcaacaaattatcaaagaccgcgttaacttaaacggttatatccacacagctaaaatccgattttaa

SEQ ID NO: 143556 - protein, 355 aa, Anabaena variabilis ATCC 29413
MKIAQVAPLWERVPPPSYGGIELVVSHLTNELVRRGHEVTLFASGDSQTLAHLETVCPRALRLDKNVQDYAAYETLELSQVYQNATEFDIIHSHLGISALPLANLVKTPTVHTLHGHFTKDNQNVFSHHHQQPYVSISNAQRQIHLNYIKTVYNGIEPKDYPFISQPKEPPYLAFLGRFSPEKGPHQAIAIAKQSGWRLKMAGKVDIVDAKFFEQEILPHIDGQQIEYLGEINHTEKAELLGNAAATLFPINWQEPFGLVMIESMATGTPVIGMNLGSVPEVIDQGKTGFICRTYEEMIQMIAVTLELDRRDCRESVVNKFSVSHMVDGYEAVYQQIIKDRVNLNGYIHTAKIRF

SEQ ID NO: 143557 - DNA, 1077 bp, Anabaena variabilis ATCC 29413
  CDS (1)..(1077): transl_table=11
atggtatcacaaacttacaaattattatttgtgtccactcccattggtgctttaggcacaggattaggaggcggagtagaacttactttatttaatattgcacaagagtttttgcggcgaggacacaaattagaaatagtagcaccacagggttctgctattagttcattacccattaaagaaattccaggggaactacaattatcagcccaaaatcaaaatcgtaccgacccaatttttgtcccgactaactctgttttggcaaatatgtgggactatgctcgtcaagtgcaaacagactatgatttgatagtgaatttttcttatgattggttaccattatatttaacaccattttttcatcgtcccatcgcccatctcatcagcatgggttccttaacagatgtgatggacgacatgattgaaaaggtcgccaataattttccaggtacaattggtgtccacggcaaaacacaagccgctacttttacatttgccgaaaaatgccattgtctgttaaatgggctagatatatcagcttatacgttttgtggtgaaccaagttcttccttagcatgggtggggagaattgcaccagaaaaaggtctagaagatgcagtcgcagccgcgaacatcaccggaattcccctgaaaatcttcggtttgaaacagaatgaggcttactgggagcagatttgtcaagcataccctgacgcacctatagaatatgtgggctttttatccacccatgaactacaacaccaattaggtcagtgtcgagcagtctttatcactccccgatgggttgaggcttatcccaacgtagcacttgaggcgctggcctgtggagtacccctgatagcctatagtcggggtggtttaacagaaattgtccaagacggcaaaacaggctttttggtagaaccggatagtgtggaaggcttggtagaagccattcatcgcctaaatgaaatcgaccgtcgcgcctgtcgccagcaagccgaaactcaatattcttctcaagctatgggcgatcgcatggaacaatggtttaagaacatcctgatgaaactttaa

SEQ ID NO: 143558 - protein, 358 aa, Anabaena variabilis ATCC 29413
MVSQTYKLLFVSTPIGALGTGLGGGVELTLFNIAQEFLRRGHKLEIVAPQGSAISSLPIKEIPGELQLSAQNQNRTDPIFVPTNSVLANMWDYARQVQTDYDLIVNFSYDWLPLYLTPFFHRPIAHLISMGSLTDVMDDMIEKVANNFPGTIGVHGKTQAATFTFAEKCHCLLNGLDISAYTFCGEPSSSLAWVGRIAPEKGLEDAVAAANITGIPLKIFGLKQNEAYWEQICQAYPDAPIEYVGFLSTHELQHQLGQCRAVFITPRWVEAYPNVALEALACGVPLIAYSRGGLTEIVQDGKTGFLVEPDSVEGLVEAIHRLNEIDRRACRQQAETQYSSQAMGDRMEQWFKNILMKL

SEQ ID NO: 143559 - DNA, 1080 bp, Anabaena variabilis ATCC 29413
  CDS (1)..(1080): transl_table=11
atgcgaattgctcaggtagccccattatgggagagagtacccccgcctgcttacggcggtatagagttagtagtggggttattaacagatgagttagtccgacgtggacacgaagttactctgtttgcatcgggagattctatcagtttagcaaacctagtatcagttcatccccgtgcgctaaggcttgattccagtgttaaggaatacggcatttatgaaatgctccaactaagcacagtctatgagcgtgcagatgagtttgatatcattcattcacacatgggttgtgcatcattaccttacacaaagttagtcaaaacacccactgttcacactctacacggcatttttacccctgacaacgaaaaaatgtttaggtatgccaaaacagagccttttgtgagtatttcggatgcacaacgggatctgagattaggacttaattatgtgggaacagtctacaacggcattgatgttaatagttataaattttatccccaaccggatgaaccaccatatttagcgtttttaggtcgaatatctccagaaaaaggtacacatctagcaatagaaattgccaaaaaatctggctggcatttaaaaattgcaggtaaagtagatgtcgttgatgtggaatattttgaaaaggaaattaaaccattaattgatggtaagcaaattgaatatttaggtgaagcagaccacacacaaaaaaatgtattgatgggaggtgcagtcgccaccctattccctattacgtggagagaaccattcggattagtaatggttgagtcaatggcatcaggtacgcctgtgattgcgatgaatcttggctctacaacagaggtaattgcccacggtaaaacaggcttcctatgcagtaatgtagaagaatgcgttagtgcgatcgccaaagttgcagatttagaccgttatacttgtcgggagtatgtgcagaaccgttttagcctgcaagccatgaccgaaggctatgaagaagtttatcgacaaattttgcaacagcgctttgctaataatgggcatcaccggagtacagttgctttgagtaaagtatag

SEQ ID NO: 143560 - protein, 359 aa, Anabaena variabilis ATCC 29413
MRIAQVAPLWERVPPPAYGGIELVVGLLTDELVRRGHEVTLFASGDSISLANLVSVHPRALRLDSSVKEYGIYEMLQLSTVYERADEFDIIHSHMGCASLPYTKLVKTPTVHTLHGIFTPDNEKMFRYAKTEPFVSISDAQRDLRLGLNYVGTVYNGIDVNSYKFYPQPDEPPYLAFLGRISPEKGTHLAIEIAKKSGWHLKIAGKVDVVDVEYFEKEIKPLIDGKQIEYLGEADHTQKNVLMGGAVATLFPITWREPFGLVMVESMASGTPVIAMNLGSTTEVIAHGKTGFLCSNVEECVSAIAKVADLDRYTCREYVQNRFSLQAMTEGYEEVYRQILQQRFANNGHHRSTVALSKV

SEQ ID NO: 143561 - DNA, 1080 bp, Synechococcus elongatus PCC 7942
  CDS (1)..(1080): transl_table=11
atgactgcccaccgttttctgtttgtatcaacacccgtcggccccttggggtcggggcgagggggcggtgttgaactgaccctgcccaatttagccaaggctctgacccagcgagggcaccaagtcagcgtgctcgcgccggctggatcggtgctgcccgatttgccgctggaaacggtgcctgggacttggcaaagcacggctcaaagtcacgggcgcgccactcctgctgagattcctgctgagagtgttttagcccggctctgggatcgagctcaccagcagcaagccgactttgacctgatcctcaacttcgcctacgactggctaccgctatatctgacgccgtttttcaagacgcctgtcgcccatttgatcagcatgggatccctatctgaggtgatggatcaggcgatcgccacaagcctcgatcgctatcccggcagcatcgctgtccacagtctggctcaggcagcaacctttccctttggcgatcgctgcctttgtatcggcaatgcccttgacctagcagcctatgggtttaacccagagccagagccggtcttgggctgggtaggacggattgcaccagaaaagggcctagaagatgccattcaagccgctcaacaggctggcctcccgttgcgggtctggggtgccctgactgaacccgactattggcaacgactccaacagcagtttggcgatcgggccgtcagctatcagggcttcgtcagtaccgatgagttgcaacgtggcttgggccgctgccaaggcctgttaatgaccccaaaatgggtggaagcctttggcaacgtcgccattgaagccctcgcctgtggcgtaccagtgatagcctatgcccgcggcggacccttggaaattattgagcagggcaagagtggctggctggtagaacccgatcaacaggctgctctcgtcaacgcaattgggcaactgtctagcctcgatcgcgcttactgtcgagcccaagccgaagcacggttttccttggctgcgatgggtcaacgtctagaagcgtggctactccccctcttgtcccgagcccgaggcttctag

SEQ ID NO: 143562 - protein, 359 aa, Synechococcus elongatus PCC 7942
MTAHRFLFVSTPVGPLGSGRGGGVELTLPNLAKALTQRGHQVSVLAPAGSVLPDLPLETVPGTWQSTAQSHGRATPAEIPAESVLARLWDRAHQQQADFDLILNFAYDWLPLYLTPFFKTPVAHLISMGSLSEVMDQAIATSLDRYPGSIAVHSLAQAATFPFGDRCLCIGNALDLAAYGFNPEPEPVLGWVGRIAPEKGLEDAIQAAQQAGLPLRVWGALTEPDYWQRLQQQFGDRAVSYQGFVSTDELQRGLGRCQGLLMTPKWVEAFGNVAIEALACGVPVIAYARGGPLEIIEQGKSGWLVEPDQQAALVNAIGQLSSLDRAYCRAQAEARFSLAAMGQRLEAWLLPLLSRARGF

SEQ ID NO: 143563 - DNA, 1191 bp, Moorella thermoacetica ATCC 39073
  CDS (1)..(1191): transl_table=11
atgcgtgttgccatgttacattgggctttcccgccgatcatcgggggagtggaatcccacctagccctcctgtgcccttacctcgtccggcaggggcaccaggtaagcctcctaacggccacagcccccggtaccccggtggaggaaagctggcagggagttgtaattaagcgctcgcccttgctggatctaaattcccttactccagcagttattgaggccagggccggggagatcaaggaactcttggaaaactttttactggcagtgcggccggatgtggtccacgcccataactttcactatttcagctatgtacacgcggccagtctccaggaaatttgccgccgtcacggctggcccctggtcctcacggcccataatgtgtgggatgacgaactgtggaccaggatgaatagcctggccaggggctgggacctggttattgccgtcagccactacatacgccaggaattggtggttaatggctatccgccggagcgggtgacagttgtctaccatggcacagatactaataccttccggccgccctccccggaggacaggcaggccctttatacctcctatccggaatggcggggacggcggattatcttccacccggccaggatgagccgggccaagggctgtgacgtcagcattcgcgccctggatctcatccgccgggaaatccccgacgttctcctggtactggccggtaccaccaacaccgttgactggggccaaaaacagccggcggaagtagcctctctccaggatcttatcgccagcttgggcctggaggaaaatgtcttcatccgtttcttcccgtggcaggagatgcctgctgtttaccagggggccgaggtctgcctctacccatcggccttccaggagccgtttggtttggtcatgctggaagccatggccacggccaggcctatcatcgtcagccgcgccggcggcatgccggagatcattcgtcccggatataacggctttttggtctctatgggggatcacgaggaactcgcccgctataccactttccttctccgtaatccggaggtggccaggaccatgggccaggacggccgcaggctggtagaagaaaactttactaccgccgtgatggcccgaaataccctggaggcatataaccagttgttggccctgccccgggccagttag

SEQ ID NO: 143564 - protein, 396 aa, Moorella thermoacetica ATCC 39073
MRVAMLHWAFPPIIGGVESHLALLCPYLVRQGHQVSLLTATAPGTPVEESWQGVVIKRSPLLDLNSLTPAVIEARAGEIKELLENFLLAVRPDVVHAHNFHYFSYVHAASLQEICRRHGWPLVLTAHNVWDDELWTRMNSLARGWDLVIAVSHYIRQELVVNGYPPERVTVVYHGTDTNTFRPPSPEDRQALYTSYPEWRGRRIIFHPARMSRAKGCDVSIRALDLIRREIPDVLLVLAGTTNTVDWGQKQPAEVASLQDLIASLGLEENVFIRFFPWQEMPAVYQGAEVCLYPSAFQEPFGLVMLEAMATARPIIVSRAGGMPEIIRPGYNGFLVSMGDHEELARYTTFLLRNPEVARTMGQDGRRLVEENFTTAVMARNTLEAYNQLLALPRAS

SEQ ID NO: 143565 - DNA, 1065 bp, Burkholderia thailandensis E264
  CDS (1)..(1065): transl_table=11
atgcgaatcgctcaaatcgctccgttgcacgaagcggttcccccgaaactgtacggcggtaccgaacgggtggtgtcctatctgaccgaggcgctcgtcgagatgggacatgacgtcacgctcttcgcgagcggcgattcgcagacctccgcgaagctcgaggccgtgtggccgcaggcgctgcgcctcgatccgacgatccgcgacgtgatggcgccgcacatgctgctgctcgaggaagtgcgccgccgcgcggacgagttcgacgtgctgcacttccacatcgactactacccgttcccgctgttctcgcgccagccggtgccgcatctgacgacgctgcacggccgcctcgacctgccggaactgcagccgatcttcaacacgttcagcgacgtgcccgtcgtgtcgatctccgacaaccagcgcattccgctgtcgcaggcgaactggctgcagacgacctaccacggcctgcccgagaacctgctcaagccgatcccggacgtgaagccgagctacctcgcgtttctcggccgcatctcgccggaaaagcgcgtcgacaccgcgatccgcatcgccgagcaggccggcatgccgatcaagatcgccgcgaagctcgacaaggccgatcgcgcgtactacgaagagaagatcaagccgctcttctcgctgccgcacgtcgagtacatcggcgagatcagcgaagccgagaaggccgaattcctcggcaacgcgcacgcgctgctgttcccgatcgactggccggagccgttcggcctcgtgatgatcgaggcgatggcgtgcggcacgccggtcatcgcgttcaagcgcggctcggtgcctgaggtgatcgagaacggcgtgtcgggcttcgtggtcgaggacgaactgtccgccgtcgccgccgtcaagcgcctgaacacgctgccgcgcgagcgggtgcgcgccgcgttcgacgcgcgtttcacgtcgaaggtgatggcgcggaactatgtgaagggctacgaggagctgctgcgccagaagcgccgcacggtgctgcgcgaagtcaacgccggctga

SEQ ID NO: 143566 - protein, 354 aa, Burkholderia thailandensis E264
MRIAQIAPLHEAVPPKLYGGTERVVSYLTEALVEMGHDVTLFASGDSQTSAKLEAVWPQALRLDPTIRDVMAPHMLLLEEVRRRADEFDVLHFHIDYYPFPLFSRQPVPHLTTLHGRLDLPELQPIFNTFSDVPVVSISDNQRIPLSQANWLQTTYHGLPENLLKPIPDVKPSYLAFLGRISPEKRVDTAIRIAEQAGMPIKIAAKLDKADRAYYEEKIKPLFSLPHVEYIGEISEAEKAEFLGNAHALLFPIDWPEPFGLVMIEAMACGTPVIAFKRGSVPEVIENGVSGFVVEDELSAVAAVKRLNTLPRERVRAAFDARFTSKVMARNYVKGYEELLRQKRRTVLREVNAG

SEQ ID NO: 143567 - DNA, 1065 bp, Burkholderia thailandensis E264
  CDS (1)..(1065): transl_table=11
atgagaattgcgcagatcgctccgttgaccgaatcggtgccgccgaagctctacggcggcaccgagcgcgtcgtgtcgtacatcaccgaggcgctcgtcgatctggggcacgacgtgacgctgttcgcgagcggcgactcgatcacgcgcgcgaagctcgatgcggtatggccgcgcgcgttgcggctcgattcgtcgatccgcgaccggatcgcgccgcacatgctgctgatggagaccgtcgcacgccgcgcgcgggatttcgacgtgctccatttccacatggattactactcgttctcggtcttcaagcggcaggacacgccgttcgtgacgacgctgcacggccgcctcgatttgccggagcagcagcccgtgttcgacacgttcgacaccgcgcccgtgatctcgatctcgaacgcgcagcgccacccgatgccgcaggcgaaatggctgacgacggtctatcacgggctgccggagacgctctacacgccgcagcccggcgagcagtcgtatctcgcgttcctcggccggatctcgccggaaaagcgcgtcgacacggcgatccggatcgcgcggcgctgcgggatgcgcatccgcatcgcggcgaagatcgacgcggcggacgaagagtatttcgagcgcgagatcaagccgctcttcgcgctgccgcacgtcgaatacatcggcgagatcgccgatcacgagaaggccgcgttcctgtcgggcgcgcatgcgctgctgtttccgatcgactggcccgagccgttcggcctcgtgatgatcgaggcgatggcgtgcggcacgcccgtcatcgcgttcaatcgcggcgcggtgccggaggtgatcgacgagggcgtgtcgggcttcatcgtcgaggacgagatcggcgccgccgcggcggtgaaccggctgcacatgctgtcgcgcgagcgggtgcgtgcgcgcttcgaggagcgcttcacttcgcgccggatggctcagcaatacgtcgacgtctatcaatcgctgatccgcgcgcagaagcgctcacgcttcaaggtgatcgattcggcgtcttga

SEQ ID NO: 143568 - protein, 354 aa, Burkholderia thailandensis E264
MRIAQIAPLTESVPPKLYGGTERVVSYITEALVDLGHDVTLFASGDSITRAKLDAVWPRALRLDSSIRDRIAPHMLLMETVARRARDFDVLHFHMDYYSFSVFKRQDTPFVTTLHGRLDLPEQQPVFDTFDTAPVISISNAQRHPMPQAKWLTTVYHGLPETLYTPQPGEQSYLAFLGRISPEKRVDTAIRIARRCGMRIRIAAKIDAADEEYFEREIKPLFALPHVEYIGEIADHEKAAFLSGAHALLFPIDWPEPFGLVMIEAMACGTPVIAFNRGAVPEVIDEGVSGFIVEDEIGAAAAVNRLHMLSRERVRARFEERFTSRRMAQQYVDVYQSLIRAQKRSRFKVIDSAS

SEQ ID NO: 143569 - DNA, 1065 bp, Burkholderia thailandensis E264
  CDS (1)..(1065): transl_table=11
atgcgcattgcccaaatcgccccgctctacgaagccgttccgcccaaactctacgggggcaccgagcgggtcgtgtcctacctgaccgaggcgctcgtcgaaatggggcacgacgtcacgctgttcgcgagcggggattccgttacttcggcgcgcctggaagccgcctggccgcgtgcgctgcgcctcgatccgtcgattcgcgatgcgatggcgccccatatgcgcctgctcgagcaggtcgcgcgcgtcgcgcacacgttcgacatcctgcacttccacctcgactacctgccgttcccgctgctgtcgcgcctcgacgcgccgttcgtcacgacgctgcacggccgcctcgatctgccggagttgcagcccgtattcgacgcgttcccgaacgcgcccgtcgtgtcgatctcggattcgcagcgcatgccgctgccgcaggccggctgggcgggcaccgtccaccacgggctgcccggcacgctgctcacgccgcaagccgatcgcaagcccgaatatctcgcgttcctcggccgcatctgtccggaaaagcgcgtcgacaccgcgatccggatcgccgcgcaaagcggcctgccgctcaagattgcggcgaaggtcgacaaggtcgacgaggattatttcaaggccgagatcgaaccgctcctcgattccgcgcacgtcgagttcatcggcgagatcaacgaagcgcagaagcccgcgttcctgtctggcgcgaaggcgctgctgttcccgatcgactggcccgagccgttcggcctcgtgatgatcgaggcaatggcgtgcggcacgccggtcgtcgcgttcaatcgcggctccgtgccggaagtcatcgacgacggcctgacgggcttcatcgtcgaggacgtgcaaggcgccgtgggcgcgctgcaccggatcgacgaattgtcacgcgatgcaatccgcgcgcaattcgagcaacgtttcagctcgcatgcaatggcgcggcgctatatcgacatctatgaaacgcttcgcgacgcggccaagcagccgcaatggcgacgcgtagcggcgggttaa

SEQ ID NO: 143570 - protein, 354 aa, Burkholderia thailandensis E264
MRIAQIAPLYEAVPPKLYGGTERVVSYLTEALVEMGHDVTLFASGDSVTSARLEAAWPRALRLDPSIRDAMAPHMRLLEQVARVAHTFDILHFHLDYLPFPLLSRLDAPFVTTLHGRLDLPELQPVFDAFPNAPVVSISDSQRMPLPQAGWAGTVHHGLPGTLLTPQADRKPEYLAFLGRICPEKRVDTAIRIAAQSGLPLKIAAKVDKVDEDYFKAEIEPLLDSAHVEFIGEINEAQKPAFLSGAKALLFPIDWPEPFGLVMIEAMACGTPVVAFNRGSVPEVIDDGLTGFIVEDVQGAVGALHRIDELSRDAIRAQFEQRFSSHAMARRYIDIYETLRDAAKQPQWRRVAAG

SEQ ID NO: 143571 - DNA, 1068 bp, Methylobacillus flagellatus KT
  CDS (1)..(1068): transl_table=11
atgaaaattgcacaaattgcccctctttttgaagccgtcccgccccgcctttacggcggtactgaacgcgtagtcgcaagcatatgtgatgcgctggtcaaagccggtcaccaagtcgacctgtatgcatcgggagacagccagagcaaagcccgcctgattccctgccgggagcgcgcgctgaggctggaccctgcgccgctcaagtcggatatcgcggcccattacactctcctggacgaggtaaggcgtcatgctggcgaatatgacattcttcatttccacaccgacatgctccacttcccgttcttcgagccgatcgcctcgaaaaccctgacaaccctgcatggccgcttggacatggccgacttgccgaatgcattcaagcgctggcgccagttcccgctggtctccatctccaacgaccagcgccgcgccctccctggcgccaactgggcaggcacggtctatcacggcctcgatccggcgctgtatcgcttcaaccccaacccacagggagggtacctggccttccttggccgcatttccccggaaaaacgcccagaccgcgccatcgccatcgcgcgcaaagccggcatcccgctgaagattgccgcaaaggtggatgcagcagacctgaattactacaatgacgtcatcaaacccctgctgaaccaagcagatgtcgaattcatcggcgaaatcacggacgcgcagaagaacgacttcctgggcaacgcgctcgccctgctgttccccgtggactggcccgagccattcggactggtcatgatcgaggccatggcctgcggaacaccggtgatcgcatggcgttgcggctctgtgcccgaaatcatcgagccgggcaggaacggcttcatcgtcaccgacgaacaccaggctgcggcagcatgtcatgctgccactacgctggatcgtgccaaggtgcgcgaggcattcgacatgcgcttcacttccgatgtcatggcagagcactatctcaagctttacaagcggcttgcggcaagcgccaacgacgataacctgatggaaagccaagtaggctga

SEQ ID NO: 143572 - protein, 355 aa, Methylobacillus flagellatus KT
MKIAQIAPLFEAVPPRLYGGTERVVASICDALVKAGHQVDLYASGDSQSKARLIPCRERALRLDPAPLKSDIAAHYTLLDEVRRHAGEYDILHFHTDMLHFPFFEPIASKTLTTLHGRLDMADLPNAFKRWRQFPLVSISNDQRRALPGANWAGTVYHGLDPALYRFNPNPQGGYLAFLGRISPEKRPDRAIAIARKAGIPLKIAAKVDAADLNYYNDVIKPLLNQADVEFIGEITDAQKNDFLGNALALLFPVDWPEPFGLVMIEAMACGTPVIAWRCGSVPEIIEPGRNGFIVTDEHQAAAACHAATTLDRAKVREAFDMRFTSDVMAEHYLKLYKRLAASANDDNLMESQVG

SEQ ID NO: 143573 - DNA, 1068 bp, Burkholderia xenovorans LB400
  CDS (1)..(1068): transl_table=11
atgaagattgcgcagatcgcccctttgaccgaatcggtgccgcccaagctgtacggcggaacggagcgcgtcgtgtcgtacatcaccgaggcgctggtcgatctcggccatgacgtgacgctgttcgcgagcggcgactccgtgaccaacgcgaaactcgaagccgtctggccgcgcgcgctgcgtctcgatccgggcattcgcgaccgcgtggcgccccatatgctgctcatggaactggtgcgccgtcaggcggagaatttcgacgtcctgcatttccacctggactattactcgttctcggtgttcaagcgccaggaaacgccgtttgtcacgaccatgcatggccgcctcgatctgcccgagcagcagccggtgttcgacaccttcaacaccgcgccggtgatctcgatttcgaacgcgcagcgccatccgctgccgcaggccaggtggctgaccaccgtgtatcacggcctgccggagcagctttatacgccgcagccggtcgagcagaagtatcttgcgtttctcggccggatctcgccggaaaagcgggtcgacaccgcgatcaggattgcgggccgctgcggcatgccgattcgcatcgccgccaaagtggatgccgccgatcgcgagtatttcgaacgcgacatccggccgttgctcgatttgccgtacgtggagttcatcggcgagattgcggatcatcagaaggccgaattcctgtccggggcgcacgcgttgctgtttccgatcgactggcccgagccgttcggcctcgtcatgatcgaagcgatggcatgcggcacgccggtcatcgcgttcaaccgcggctcggtgccggaagtgctggaagacggtgtgacgggctttatcgtggaagacgagatcggcgcggtggcggcggtcaatcgcctgcacaagatgccgcgagcgggcgtgcggcagcgcttcgaggagcgtttcacgtcgcaccgcatggctcaacagtatgtgaacgcgtatcagtcggtgattcgcgcgcagaagcgttcgcgcttcaaggtgatcgacacgtcgggaagctga

SEQ ID NO: 143574 - protein, 355 aa, Burkholderia xenovorans LB400
MKIAQIAPLTESVPPKLYGGTERVVSYITEALVDLGHDVTLFASGDSVTNAKLEAVWPRALRLDPGIRDRVAPHMLLMELVRRQAENFDVLHFHLDYYSFSVFKRQETPFVTTMHGRLDLPEQQPVFDTFNTAPVISISNAQRHPLPQARWLTTVYHGLPEQLYTPQPVEQKYLAFLGRISPEKRVDTAIRIAGRCGMPIRIAAKVDAADREYFERDIRPLLDLPYVEFIGEIADHQKAEFLSGAHALLFPIDWPEPFGLVMIEAMACGTPVIAFNRGSVPEVLEDGVTGFIVEDEIGAVAAVNRLHKMPRAGVRQRFEERFTSHRMAQQYVNAYQSVIRAQKRSRFKVIDTSGS

SEQ ID NO: 143575 - DNA, 1164 bp, Ralstonia metallidurans CH34
  CDS (1)..(1164): transl_table=11
atggcaggcacgaccggggatacctcacccaccggcgctccgatgcgcatcctgctggttaccaccggcctgaagatgggcggcgccgagcaccaggtagtggcgctggcacacgcgtttctggcgcagggtcaggcggtggccatcctgagcctgtcaccgggccgcgagatcgacgtgcccgccgatgcgcacgtcctcgaactgaacatgagcaagacgccggccggcatggcacgggcgctctggcaggcacgcggactggtcaagtcgtggcggccggacgtgattcacgcgcacatgattcacgccaacgtcttcacgcgcctgctgactcgaatcgtccagtgcccgccggtggtctgtaccgcgcacagctttcgcgaaggcggccgactgcggatgatcgcgtatcggctgaccgaccgatggagcgcgctgacgacccacgtcagcgaggacgggcgcgaaggcatggtcgcctcgggtgccgtgcaagccgaccgcattgcggtgatgccgaatggcatcgacatcgaacggtttcggccctcggcggcgttgcggggcaccacgcgcgcgcgtctgggcatcagcgctggaacaaggctggccctgaatgtcgggcgactggttccggagaaggcacaagcgcttctgctgcgcgccttcgcgcagatcgaccccgccacgcttccgctccatctgctgatcgccggtggcggcccactccatcaggccctggccgagcagatcacggcgctgaacctgagttcgcgcgtcacgctgctggggccacgcagcgacgtgcccgccctgctcaacgcagcggatacgttcgtgctctcttccgacattgaaggactgccgatggtgctggtggaagcgctggccagcggctgccctgtggtagccaccgatgcacccggcgttcgagaagtcgtgcaggaccaggggaccatcgtgccgcgcgacgacgcgacagcgctggccgtcgcgctggatgcagcgctgcgccacgggcgaggttcgtccgcggacgaagccgcacgccgggcggcaatgatcgccaggttctcgatcgacgcggtggcgcaacgctggctggagatctacaccggcctcgccggcacaaccccctgcccccgtgtggaggctgcctga

SEQ ID NO: 143576 - protein, 387 aa, Ralstonia metallidurans CH34
MAGTTGDTSPTGAPMRILLVTTGLKMGGAEHQVVALAHAFLAQGQAVAILSLSPGREIDVPADAHVLELNMSKTPAGMARALWQARGLVKSWRPDVIHAHMIHANVFTRLLTRIVQCPPVVCTAHSFREGGRLRMIAYRLTDRWSALTTHVSEDGREGMVASGAVQADRIAVMPNGIDIERFRPSAALRGTTRARLGISAGTRLALNVGRLVPEKAQALLLRAFAQIDPATLPLHLLIAGGGPLHQALAEQITALNLSSRVTLLGPRSDVPALLNAADTFVLSSDIEGLPMVLVEALASGCPVVATDAPGVREVVQDQGTIVPRDDATALAVALDAALRHGRGSSADEAARRAAMIARFSIDAVAQRWLEIYTGLAGTTPCPRVEAA

SEQ ID NO: 143577 - DNA, 1095 bp, Acidobacteria bacterium Ellin345
  CDS (1)..(1095): transl_table=11
atgcgagttgccttagtcgcaccgcctttcataccagtccctcctcgcaagtatggcggcaccgaacttttcgttgcgcagttagccgagggactcaagaagcaagggatcgatgtagtggtgtatgccaacggggaatccaccgttgacacggaagtgcgatcgctctacgcgaaatcgcagtggcctatcgaaggcgaagtgtttgccaatctcacggacatcaaccacagcgcgtgggcgattcgtgatgcctccaaagcctgcgacatcattcacgtgaacagtgctcccgcgctcgccatgtcacgcctcgtcgacgtgcccatggtctacaccatgcaccacgtccacgacgaacatctcgccaagttctacgcctactatccggaggttgagttcgttaccatcagcgacttccagcgtcaacgcgagtccatggcgagaatgcgcaccatccaccatggcctcgacaccaatctctacacctggaaggatggcaggcgcgaacacctgagcttcctcggacgaatcgcccccatgaaaggcacccacctcgcaatcgaggtcgcgaagcgtgccggaatccccttaaagatcgccggtgaaatccagccctgctaccgcggctactgggaatcgcaggtcaaaccgcacgtcgatggcaagttcatcgaatacgtcggcgaggccgacctgccggcaaagaacgagctcctcaagaactccatcgccatgctcttcccaattcagtggcatgaacctttcggcctcgtaatgatcgaagctatggcttgcggagcacccgtactcgcgctgtcgggcggtgcggtagaagaggttgtctcgcacggcgtcggcggcttcatctgcaaagacgtggaagatatggctgcgcgcgccaaagacgccaataagttcgatcccgcccgcgttcgcgaatacgtagaacgtgagttctcgctggaaaaaatggtttcgcgttacgccgagttgttccgcgatgtcgtcgagtcgcgcgccctcgccgcacccgaggccgaagacattgaaccgttgacgcaattgtcaggagggaacactatcgcagcatga

SEQ ID NO: 143578 - protein, 364 aa, Acidobacteria bacterium Ellin345
MRVALVAPPFIPVPPRKYGGTELFVAQLAEGLKKQGIDVVVYANGESTVDTEVRSLYAKSQWPIEGEVFANLTDINHSAWAIRDASKACDIIHVNSAPALAMSRLVDVPMVYTMHHVHDEHLAKFYAYYPEVEFVTISDFQRQRESMARMRTIHHGLDTNLYTWKDGRREHLSFLGRIAPMKGTHLAIEVAKRAGIPLKIAGEIQPCYRGYWESQVKPHVDGKFIEYVGEADLPAKNELLKNSIAMLFPIQWHEPFGLVMIEAMACGAPVLALSGGAVEEVVSHGVGGFICKDVEDMAARAKDANKFDPARVREYVEREFSLEKMVSRYAELFRDVVESRALAAPEAEDIEPLTQLSGGNTIAA

SEQ ID NO: 143579 - DNA, 1164 bp, Myxococcus xanthus DK 1622
  CDS (1)..(1164): transl_table=11
atgaacgccccgctcaacgtggccatcacctgctttccaaccttcggtggcagcggcatggtcgccacggagattggccttgcgatggcggaccggggccaccgcgtccacttcattgctcgggacctgccggtacgcctccatggcgcgaaccggaaagtcgtcttccacgaggtgacggagagcgactacccggcgctccagcagtccggcacctatcccatcgcgctggcctccaagatgatcgaggtcgccagctacgagcgcctggacatcctgcacgtccactacgcggtgccccacgccaccgccgcgtggatggcgcgcgaggtgctgggccacaaggcgccgcgagtcgtcaccacgctgcacgggacggacaccacgctggtgggaatcgaccccagctacctgccgattacgcgcttctccatcacgcgaagcgacgcggtgacggtgccgtcggcctacctgcgccgcgcgacgtggcggggcttcgacattcccgagagcgtccccatcgacgtcatcgccaacttcgtggacaccgcccgctatgccccggtgcgagaccgcgcctgcctgcgcgcgctcttccccgccctgcgtgaccacgagccggtgctcatccacgtctccaacttccggccggtgaagcgcatcaccgacgtggtcgccatcttcaccgaggtccaccgtcaccgtccctgccgcttggtgatggtgggagacggtccggagcgctcgcccgcggagcggatgctgcgggagatgggcctggagggccgcgtcgcgttcctcggcaagcaggaccgcttcgaggaactggtcgccgcctccgacgtcttcctgctccccagcgagcaggagagcttcgggctcgccgcgctggaagcgctcagctgcggcattcccgtggtggccagcgacctgggcggaatcccggagctcgtcacgcatggggagacgggcttcctggcgccgctgggtgacgtcccggccatggcccggcacgtgctcacattggtcgaggacgcggagcgttggcagggcttctcacaccgcgcgcgggcacaggtcctggaacgcttccagaaggaacccgccatcgaccgctacgaggcgctctaccgccggctcctgacggggcccctccgtcgctga

SEQ ID NO: 143580 - protein, 387 aa, Myxococcus xanthus DK 1622
MNAPLNVAITCFPTFGGSGMVATEIGLAMADRGHRVHFIARDLPVRLHGANRKVVFHEVTESDYPALQQSGTYPIALASKMIEVASYERLDILHVHYAVPHATAAWMAREVLGHKAPRVVTTLHGTDTTLVGIDPSYLPITRFSITRSDAVTVPSAYLRRATWRGFDIPESVPIDVIANFVDTARYAPVRDRACLRALFPALRDHEPVLIHVSNFRPVKRITDVVAIFTEVHRHRPCRLVMVGDGPERSPAERMLREMGLEGRVAFLGKQDRFEELVAASDVFLLPSEQESFGLAALEALSCGIPVVASDLGGIPELVTHGETGFLAPLGDVPAMARHVLTLVEDAERWQGFSHRARAQVLERFQKEPAIDRYEALYRRLLTGPLRR

SEQ ID NO: 143581 - DNA, 1236 bp, Mycobacterium sp. MCS
  CDS (1)..(1236): transl_table=11
atgtcgctgacggtgctcatcaacgccggcccgtggctgaccgtgccgccgcacgggtacggcgggatcgagaacatgatcgcgacgttgatccccgaactgcgcagcgccggcgtgcgggtggtgctggccaccgtggcgggcagcacggtcgacgtcgacgagaagatcgtcggcttcgacgaaccgcagttcgggcatctcaccgagccgtacaaccaggtgatgggaatcgccgccacccatatgcaccggctggtgacggagttggcggaccgccatgacgtcgacctggtccatgaccacctcgaagcggtggggcccacggtgctcgcggcggccggctcccggctaccacccgttctgcacacgctgcactgggatctggccaaacaccctggcctgtacgggaacctggcggtcgaccacctctgggtgaacggcgtgtccgccgcgcagatcgcgctcggtccggcgcggctgcggcagcgcagcctcggtcacgtccacctggcgacgccgctgacccggttcccgcacaacccggtgcgaaagcgtcgccacgtcgcgctcgtcgcgcggatctcgccgaccaaggggcagcacgtggcggcacggctggcccaccggggcggtttcgagctggtgctggccggtccggtcgggccctacgcggacgccgcggaactggccgccgacccccacgcggagcggtatcccgatgttcggtattaccgcgacgcggtggcaccgctcgtcgacgaccggcgggtgcgttgggtcgggaccctcgagggcgaggcccgtgaccgcctggtggccacggcccgcgccacgctcttccccctcacctggaatgagcccggggggaccgcggtgatcgaatcgctggcgctgggcaccccggtggtggcctatcggcgggggtgccttccggagttggtggccccggacaccggccgcctcgccgaaccgggcgacgaggcggcgctggccgaattgctttcgcaggtcgacgagatcgaaccggcgcggtgccgggccgaggcgcagcgccggttctcacccgcggtcatggcggccgggtacctgcggatgtacgaggaatgcgtcacccggggtcgcacatcggggccgctcaatacgcgtcgtgcaggcggatccactcgtagggcggtcgctggggccacccggcgggcgagtcctcccaggtctcctgacggccgtacggggtga

SEQ ID NO: 143582 - protein, 411 aa, Mycobacterium sp. MCS
MSLTVLINAGPWLTVPPHGYGGIENMIATLIPELRSAGVRVVLATVAGSTVDVDEKIVGFDEPQFGHLTEPYNQVMGIAATHMHRLVTELADRHDVDLVHDHLEAVGPTVLAAAGSRLPPVLHTLHWDLAKHPGLYGNLAVDHLWVNGVSAAQIALGPARLRQRSLGHVHLATPLTRFPHNPVRKRRHVALVARISPTKGQHVAARLAHRGGFELVLAGPVGPYADAAELAADPHAERYPDVRYYRDAVAPLVDDRRVRWVGTLEGEARDRLVATARATLFPLTWNEPGGTAVIESLALGTPVVAYRRGCLPELVAPDTGRLAEPGDEAALAELLSQVDEIEPARCRAEAQRRFSPAVMAAGYLRMYEECVTRGRTSGPLNTRRAGGSTRRAVAGATRRASPPRSPDGRTG

SEQ ID NO: 143583 - DNA, 1107 bp, Mesorhizobium sp. BNC1
  CDS (1)..(1107): transl_table=11
atggctctgacgattctcagcgttgcctatccattcgcggcgatcgggccggacgcggtgggcggcgctgagcaggtgctttccgcgctcgatcgcgcgatggtgcgaaacggtcatcgctccatcgtgatcgcttgcgaaggatcaaaaacggcgggggaactggtgcccctggctgcgcagggaggcaggatcgacgattccgttcggcacagggtttggggggaggtgcgccagctaatcggcgaggttctgatgcgggagcgggtggatctggtgcacctacatgggctcgatttccacgcttacctcccggaaagtgcgctcacagtggcaacgctgcacctgccgctggactggtatcccggctggatcttcgaaagccgcgccaatctctttctccactgcgtttcggaaattcagcaccgcaccgcgccggtaggcgccccgctgctgccgccgatcccgaatggggttccgcttgagcttttcctcacgcgacagcgcaagcgcgatcacgcaatcgtcctcagccggatttgcccggaaaagggaatccacatggcaatccaagcctgccggcttgccgatgcagctcttctgataggcggtcaggtgtttccttacgaggcgcatgagcgctatttcaaagaggagcttgcgccttttctggattcgcggcggcggttccttggaccactcgttttcaaccgaaagcgacggctccttgcgtctgcccgatgcgcgcttgtgcccagcctggtggcggaaacaagctcgctcacggcaatggaagcgctcgcctgcggcacgcctgtaatcgcctttgagaacggcgcgttgccaggcgtggtcgagaatggacgcaccggttttctcgtcaagaatgtttcagagatggcagaggcgatcatggctgcatcatccctcgatccccaggtctgccgggacgcggcttggcagctcttttcaccgcagcggatggagcagcgctatctcgatctctatcaggggcttgcaggcatggcgcgaccaaggcagtccagcgcggaattcgccgccggtacgatcaagcagcaagcgcaagcccacccatcttttcgatga

SEQ ID NO: 143584 - protein, 368 aa, Mesorhizobium sp. BNC1
MALTILSVAYPFAAIGPDAVGGAEQVLSALDRAMVRNGHRSIVIACEGSKTAGELVPLAAQGGRIDDSVRHRVWGEVRQLIGEVLMRERVDLVHLHGLDFHAYLPESALTVATLHLPLDWYPGWIFESRANLFLHCVSEIQHRTAPVGAPLLPPIPNGVPLELFLTRQRKRDHAIVLSRICPEKGIHMAIQACRLADAALLIGGQVFPYEAHERYFKEELAPFLDSRRRFLGPLVFNRKRRLLASARCALVPSLVAETSSLTAMEALACGTPVIAFENGALPGVVENGRTGFLVKNVSEMAEAIMAASSLDPQVCRDAAWQLFSPQRMEQRYLDLYQGLAGMARPRQSSAEFAAGTIKQQAQAHPSFR

SEQ ID NO: 143585 - DNA, 1086 bp, Mesorhizobium sp. BNC1
  CDS (1)..(1086): transl_table=11
atgaaaattgcacaaattgctccgctggccgaaagcgtgcccccccgcttttacggtggcacggagcgaatcgtctcctttctcacggaagaacttgtccgccgcggccatgaggtgaccctgttcgcttcaggcgactcgctcacttcggcagaactggtcgcctgttcggatcgtgccttgcgcctcaatccagacgtgcgcgacccgatcccgcaccatctcatccttctggaagaggtgcgtcggcgtgcggatgaattcgacgttttgcatttccacatcgaccttctgcattttccgctgatccgcccgatcgctcaccgtaccataacgacactccatggccgcctcgacctgcctgatctgatgccattttatcagacatttccggagatccctgtcgtctcgatctccaacagccaacgcgatccgttgccgatggcgaattgggttgccacggtacagcacggtcttcctttggatctgctcccgttccgcccgaaacccgaggaccgatatctggcattccttggacgcatttcaccggaaaaaagacccgaccgcgccattgaaatcgccgcgcgcgcgggcatgcgccttaagattgcagccaagatcgacaaggccgatcaggactactggctcactgtcatcaaacccatgatcgaccaccaccccaatgtggaatatattggtgaggtgaacgagcgtggaaaggccgagtttcttggcaacgcatctgcccttctctttcccatagactggccggaacccttcgggctcgttatgattgaagctatggcgtgcggcactccggtgattgccttcccttgtggttcggtgccggaagtattggacaatggcatctccggatttatcgtccattccatggatgaggccgtcgccgcggttccgcttgctctggccctggatcgtgcaaccgtccggcgccgtttcgaggagcgcttcagcagcgagcgcatggcagccgcctatctggaagtatacgagaggttactgcatcaccggatgcgaaccgtcccgttcccggccgaagtggtcggcatccagacggtcgcttga

SEQ ID NO: 143586 - protein, 361 aa, Mesorhizobium sp. BNC1
MKIAQIAPLAESVPPRFYGGTERIVSFLTEELVRRGHEVTLFASGDSLTSAELVACSDRALRLNPDVRDPIPHHLILLEEVRRRADEFDVLHFHIDLLHFPLIRPIAHRTITTLHGRLDLPDLMPFYQTFPEIPVVSISNSQRDPLPMANWVATVQHGLPLDLLPFRPKPEDRYLAFLGRISPEKRPDRAIEIAARAGMRLKIAAKIDKADQDYWLTVIKPMIDHHPNVEYIGEVNERGKAEFLGNASALLFPIDWPEPFGLVMIEAMACGTPVIAFPCGSVPEVLDNGISGFIVHSMDEAVAAVPLALALDRATVRRRFEERFSSERMAAAYLEVYERLLHHRMRTVPFPAEVVGIQTVA

SEQ ID NO: 143587 - DNA, 1113 bp, Rhodococcus sp. RHA1
  CDS (1)..(1113): transl_table=11
gtgaacgtcgacgccctgcgcatcgccctgatcgcctccagccggcaccccatccgccagcccttccccggcggcctcgaatcgcacgtctggcacctggcgcggagcctgtgcgcggacgggcatcgagtcagtctgttcgccggacccggatccgatccgggtctcggttgcgcgcagctgacggtggagaccttggaaacgagtgcggccgcccggcaggacgtgtcgatgccaccgatggacttcctgcgggaccaccacgcctacctgcggttgatgctcgatctcgccggaccgctggcggattcgtccgacgtggtgcacaaccacagcctgcactacctccccgtcgccatggctcccgcggtcccgacacccgtgctgtcgacattgcacactccgcccaccccgtggctcgagtcggctctcgccgtccgggccggcaccgacgcccatttcgtggccgtgagcaagcacaccgccgcagcgtggagtcacgcgatcgaccgcatcgacgtcgtgccgaacggggtcgacgtcgaccgctggcctcagggtgacggcggcccgcacctcatctggttcggccgactggtagcggagaagggtgcgcacgtcgcgatcgcggcggcgcgccgagcgggcttcgcgatccgccttgcggggcccatcagcgatccgggctacttcgagagcacgatcgcacccctgctgggtcccggcgtgacctatctgggccacctagcccagcccgagttggcgaccgcgatcggcggttcggcggcggcggtgatcaccccgctgtgggacgaaccgtacggtctggtcgtcgccgaagcgctcgcctgcggaacgccggtcgccgcgttcgcgcgcggcgggatccccgaggtcctctccgccgactgcggtcgcctcgttgtgcccgacgacgtcgacgccctcgcccgggtgataccgcaggtcgtcgcgttgccacgccgggtagcccgcgaacacgcacggagccactgctcggaacgtcgcatggtggacgcctacgtgaacatctaccggcggctcgcggcgaaccgggtccgcgccgacggcgaccggaaggtggcatcgtga

SEQ ID NO: 143588 - protein, 370 aa, Rhodococcus sp. RHA1
MNVDALRIALIASSRHPIRQPFPGGLESHVWHLARSLCADGHRVSLFAGPGSDPGLGCAQLTVETLETSAAARQDVSMPPMDFLRDHHAYLRLMLDLAGPLADSSDVVHNHSLHYLPVAMAPAVPTPVLSTLHTPPTPWLESALAVRAGTDAHFVAVSKHTAAAWSHAIDRIDVVPNGVDVDRWPQGDGGPHLIWFGRLVAEKGAHVAIAAARRAGFAIRLAGPISDPGYFESTIAPLLGPGVTYLGHLAQPELATAIGGSAAAVITPLWDEPYGLVVAEALACGTPVAAFARGGIPEVLSADCGRLVVPDDVDALARVIPQVVALPRRVAREHARSHCSERRMVDAYVNIYRRLAANRVRADGDRKVAS

SEQ ID NO: 143589 - DNA, 1191 bp, Mycobacterium avium 104
  CDS (1)..(1191): transl_table=11
atgcgcggcgctgatttcgtgttgccgaccgatgtcccggaagccggccgaccgctgcggatcgtgctcgtcgccccgccgtatttcgacgtcccgccggacgggtacggcggcgtggaggccgtcgtggccgatctcgccgacatgctggtggcccgcggacaccaggtcaccctgctcggcgccggcgaaccgggcacggcggccaggttcatcccgctgtgggaccggaccgtgcccgagcggctgggtgagccctaccccgagatcatgcacgcgctgaaggtgcgcagcgccatcacccggatcgccaaagaggacggcgtcgacatcgtgcacgaccacaccttcgccgggccgatgaacgccccgatctaccaggggctgggcgtgcccacggtggtcaccgtgcacggcccgatcgacgacgacctgcatccctactaccgcgagctcagtggcgacgtcggcctggtggccatcagcgaccgtcagcggcagctggctccggagctgaattgggttggccgcgtacacaatgcgctgcgcatcgacgagtggccgttcgagaccgaaaagcatgactacgcactgtttttgggccggtatgcgccgtacaagggtgcgcacctggcgctgcgggccgcgcacgaggccggcatcccgctggtactggccggcaaatgcagtgagccctcggaaaaggagtacttcgaggactgcgtgcggccgctgctcaccgacaacgaccacgtgttcggcgaggccgacgcggtcagcaagcgaaagctgttgtcgcgcgcccgttgcctgctgttcccgatccagtgggaggagccgttcggcatcgtgatgatcgaggcgatggtctgtggtacgcccgtcgtcgccctgcgcggcggcgcggtctcggaggtggtcgccgacggggtcacgggcgtggtctgcgatcacccggacgaactgcccggggccatcgcccgggcccagaccctggacccgcacgcatgccggcgccacgtcgccgcgaatttcgctgtggcacagttcggttcggcgtacgaagccatctaccgcaacgtgctgcagcatgcgacggcggcgccgcgccggatgcgcagcaccggcctggtggaatcgatcgaaaccggaaggcgcgcctgcgacttcaggcagaaggcaccggcatga

SEQ ID NO: 143590 - protein, 396 aa, Mycobacterium avium 104
MRGADFVLPTDVPEAGRPLRIVLVAPPYFDVPPDGYGGVEAVVADLADMLVARGHQVTLLGAGEPGTAARFIPLWDRTVPERLGEPYPEIMHALKVRSAITRIAKEDGVDIVHDHTFAGPMNAPIYQGLGVPTVVTVHGPIDDDLHPYYRELSGDVGLVAISDRQRQLAPELNWVGRVHNALRIDEWPFETEKHDYALFLGRYAPYKGAHLALRAAHEAGIPLVLAGKCSEPSEKEYFEDCVRPLLTDNDHVFGEADAVSKRKLLSRARCLLFPIQWEEPFGIVMIEAMVCGTPVVALRGGAVSEVVADGVTGVVCDHPDELPGAIARAQTLDPHACRRHVAANFAVAQFGSAYEAIYRNVLQHATAAPRRMRSTGLVESIETGRRACDFRQKAPA

SEQ ID NO: 143591 - DNA, 1152 bp, Mycobacterium smegmatis str. MC2 155
  CDS (1)..(1152): transl_table=11
gtgagcggcaacgatatcctcgccccggccgatgtggacgatccgctgcggatcgtgctcgtcgcgccgccctacttcgacattccccccaagggctacggcggcaccgaagccgtcgtcgcggatctcgccgatacgctgaccgcccgcggccaccacgtgacggtgttgggtgcaggagcaccggggactgctgcgcgcttccaacccctgtgggagcgcacacttcccgatcgtctgggccagccgtacccggagatcatgcacgcgctcaaggtgcgtaaggccatcgagcgcatcgccgccaccgaaggcgtcgacatcgtgcacgatcacacgttcgcaggcccgctcaacgctccgttctaccgcaagctcgggttgcccactgtggtcacggtgcacggcccgatcgacgaggacctgtacccctattaccgcgaactcggcgacgacatcggcctgatcgcgatcagcgaccgccagcgtgagctcgctcccgacctgaattgggttggccgcgtgcacaatgcgctgcgtatcgacgactggccgttcaacaccgtgaagaaggactatgcgctgttcctcggccggtacgcgccgtacaagggtgcgcacctcgcgctggaggccgggcacgccgcaggcatgccgctggtcctggcaggcaagtgcagtgaaccgcccgagatcgcgtacttcgacgagcaggtgaaaccgctgctcaccgacagcgatcacgtgttcggcatggccgacgcgcaggccaagcgcaagctgctcgccgaggcccgctgcctggtcttcccgatccagtgggaagagccgttcggcatggtgatgatcgaggccatggcctgcggtacaccggtggtcgcgctgcgtggcggcgcggtgcccgaggtgatcgtcgacggtgtcacgggcgtgatctgcgatgtgcccgaggaacttccggcggcgatggaaaaggccacgcatctcgaccccgccgcgtgccgcaggcacgtcgcggcgcacttcggggtcggccggttcggcgcgggatacgagcagatctaccgcaacgtgctgcgtcagcgcacgcggatgacgttgcgcgaggtgctgaccgagccacccggtgtggccgagcgggcgagcgcatga

SEQ ID NO: 143592 - protein, 383 aa, Mycobacterium smegmatis str. MC2 155
MSGNDILAPADVDDPLRIVLVAPPYFDIPPKGYGGTEAVVADLADTLTARGHHVTVLGAGAPGTAARFQPLWERTLPDRLGQPYPEIMHALKVRKAIERIAATEGVDIVHDHTFAGPLNAPFYRKLGLPTVVTVHGPIDEDLYPYYRELGDDIGLIAISDRQRELAPDLNWVGRVHNALRIDDWPFNTVKKDYALFLGRYAPYKGAHLALEAGHAAGMPLVLAGKCSEPPEIAYFDEQVKPLLTDSDHVFGMADAQAKRKLLAEARCLVFPIQWEEPFGMVMIEAMACGTPVVALRGGAVPEVIVDGVTGVICDVPEELPAAMEKATHLDPAACRRHVAAHFGVGRFGAGYEQIYRNVLRQRTRMTLREVLTEPPGVAERASA

SEQ ID NO: 143593 - DNA, 1266 bp, Nocardioides sp. JS614
  CDS (1)..(1266): transl_table=11
atgcgggtcgcactgttgtcctaccggagcaagccccactgcggtgggcagggcatctacatccggcacctcagtcgcgagttgaccaacttgggccactcggtcgaggtgttctccggccagccgtaccccgagctggacgaaggcgtggcgctgaccaagctccccagcctcgacctctaccgtgagcctgacccgttccgggtgcccaagctcaaggagttccgcgaccgcatcgacgtcgaggagttcgcgacgatgtgcggggccggcttcccggaaccgaagacgttcagcctgcgcgccgcccgcgcgctgcgggaccgggtcgaggacttcgacatcgtccacgacaaccaggtgctcggctacggcctgctcgagatcgagaagatggggctgccgctgatcaccacgctgcaccacccgatcaccttcgaccgccgcatcgacatggccgccacccgcaacccgtggcgcaagttcacgctcagccgctggtacggcttcttgaggatgcagggccgcgtggctcgccaggcgcgccggatcatgacgccctcggagacctccaagcgggacatcgtcaaggacttcggggtcgaccccgagcggatgcaggtgatcctgctcggcgtcgacgacggcttcgtgcctcccaccgagccgcgggtgccgggacggatcctcgcgatggcgagcgcggacgcgccgatgaagggcatctcgacgttgctcgaggccttcgccaagctgcgcaccgagcgtgacctggagctgctgctcgtcaccaagccgacgccgggcgggcgcacggagcggctgatcgacaagctctcgatcggcgacgcggtccggttcgtgcacggcgtcagcgacgccgagctggtcgagctgatgggctccgcggagctcgcctgtgtgccctcgctctacgagggattctcgctgccgaccgccgagctgatggcctgcgcgaccccgttggtggtctcccgcgccggcgcgatccccgaggtcgtcggccccgacgggctgtgcgcggacctggtgagccccggcgacgtcggcgagctgacggcggcgatcgccgccctgctcgacgaccccgagcgccgggagcggtacggcgccgccggccgccggcgggtcgaggagctgttcagctggcgggcggtcgcgcagcaggtcgcggcggcctacgaggacgtgatcgcggactaccggtccgagaagcagaaggaggccacgcgtgctcaccgttga

SEQ ID NO: 143594 - protein, 421 aa, Nocardioides sp. JS614
MRVALLSYRSKPHCGGQGIYIRHLSRELTNLGHSVEVFSGQPYPELDEGVALTKLPSLDLYREPDPFRVPKLKEFRDRIDVEEFATMCGAGFPEPKTFSLRAARALRDRVEDFDIVHDNQVLGYGLLEIEKMGLPLITTLHHPITFDRRIDMAATRNPWRKFTLSRWYGFLRMQGRVARQARRIMTPSETSKRDIVKDFGVDPERMQVILLGVDDGFVPPTEPRVPGRILAMASADAPMKGISTLLEAFAKLRTERDLELLLVTKPTPGGRTERLIDKLSIGDAVRFVHGVSDAELVELMGSAELACVPSLYEGFSLPTAELMACATPLVVSRAGAIPEVVGPDGLCADLVSPGDVGELTAAIAALLDDPERRERYGAAGRRRVEELFSWRAVAQQVAAAYEDVIADYRSEKQKEATRAHR

SEQ ID NO: 143595 - DNA, 1086 bp, Nostoc punctiforme PCC 73102
  CDS (1)..(1086): transl_table=11
atgagaattgctcaagtagctccattatgggaaagagttccacctccagcttatggaggtatagagttagtagtggggttactaaccgatgaattagtccgacgcggacacgaagtaactttatttgcatcgggagattctatcagtctggcaaaacttgtgtcagttcatccccgtgcgctcagactcgatcgcactatcaaagattacagcgtttatgaaacgctgaatctcgcttcggcgtatgaacgcgcagaagagtttgatattattcactcccatatcgggcatggggcactggcttacgcaaatctcgtcacaacccctacggttcacacgttgcatgggatttttacctctgacaacgaaaagatgtttagttttggtaaaaaacaaccctacgttagtatttctgatgcacaacgagaaccaaggttagggttgaactgtatagcaacggtctacaacggaattgatgtcagcagttataattttcacgcccaaccagaagatccgccttacttagcgtttttgggtcggatgtctcctgaaaagggagcgcatttagcaatagaaattgctaaacaagccggttggtgcttgaaaatggcaggcaaggtagatgtcgttgatgtggaatactttgagaaggaaatcaaaccccacatcgacggagagcaaattcagtatttgggtgaagctaatcatgctcaaaaaaatgccctcatgggaggcgcatttgcaactctgttccccattacttggcgggaaccctttggattagtgatggttgagtcaatggcttcgggtacgccagtgattgcgatgaacttggggtctactgaagaggtaatttcccacggtaagacgggtttcctctgcaataatcttcaagagtgcatcagtgctgtggatcgggtaatagagttagaccgctatacttgtcgccaatatgtcgaagaccttttcagcgttgagcaaatgactgatggctatgaagcggtttatcaaaaaataatagcagaacgattttctcggaatgggcattcacgcaatttgattgctttaagtagcgatcgcatttaa

SEQ ID NO: 143596 - protein, 361 aa, Nostoc punctiforme PCC 73102
MRIAQVAPLWERVPPPAYGGIELVVGLLTDELVRRGHEVTLFASGDSISLAKLVSVHPRALRLDRTIKDYSVYETLNLASAYERAEEFDIIHSHIGHGALAYANLVTTPTVHTLHGIFTSDNEKMFSFGKKQPYVSISDAQREPRLGLNCIATVYNGIDVSSYNFHAQPEDPPYLAFLGRMSPEKGAHLAIEIAKQAGWCLKMAGKVDVVDVEYFEKEIKPHIDGEQIQYLGEANHAQKNALMGGAFATLFPITWREPFGLVMVESMASGTPVIAMNLGSTEEVISHGKTGFLCNNLQECISAVDRVIELDRYTCRQYVEDLFSVEQMTDGYEAVYQKIIAERFSRNGHSRNLIALSSDRI

SEQ ID NO: 143597 - DNA, 1071 bp, Nostoc punctiforme PCC 73102
  CDS (1)..(1071): transl_table=11
atgaaaatcgctcaagttgcccccttatgggaaagggttccacctcctacttatggaggaatagaactggtggtgagtcgcttgactgatgaacttgttcgtcgcggtcatgaggtaacattatttgcctctggcgattctcaaactttggctaatttagaagcagtttatccacgtgcattacgcttagacccgaatgttaaagagtatgcagtgtacgaaatgctagaactgagcaaagtttaccaacgtgctaaagaattcgatcttatccattctcatgtagggatttcggcattacctttagcgagtttcataacagcaacttctacagtgcataccctgcacaataattttacaaacgacacccgtcacgcatttagctactaccagaagcaaccatacgtcagcattagtaactcgcagcgtcaagtcgatctaaattatgttggcactgtttataacggaattgagctagcagattatcctttcgtagcccaaccgtcagaacctctatatttagcatttttaggtcgtttttcgccagaaaaagggccacaccatgcgatcgctattgcaaagcagagtggttggcgcttgaagatggcaggaaaggttgatgtcggcgactctaagttttttgaacaagagattgccccccacattgatggtcagcaaattgaatatctcggcgaaattaaccacgccgaaaaaactgaacttctgggcaatgctgccataactctttttcccattaactggcaagaaccttttggtttagtgatgactgaatcaatggcaactggtacaccagtaattgccatgaatttcggctcagtacctgaagtaattgcccacggtaaaacaggttttatctgcaaaagctatgcagaaatgacggcaatgattcccctagctttggaactcaatcgtcaaacctgtcgaaaacatgtagaaagcaactttagtgttaaccaaatggttaacggatatgaagctatttacagacaaattattaaagaccgtatagaatcgaatggtcgcattcatgctacgaaaatacatttttga

SEQ ID NO: 143598 - protein, 356 aa, Nostoc punctiforme PCC 73102
MKIAQVAPLWERVPPPTYGGIELVVSRLTDELVRRGHEVTLFASGDSQTLANLEAVYPRALRLDPNVKEYAVYEMLELSKVYQRAKEFDLIHSHVGISALPLASFITATSTVHTLHNNFTNDTRHAFSYYQKQPYVSISNSQRQVDLNYVGTVYNGIELADYPFVAQPSEPLYLAFLGRFSPEKGPHHAIAIAKQSGWRLKMAGKVDVGDSKFFEQEIAPHIDGQQIEYLGEINHAEKTELLGNAAITLFPINWQEPFGLVMTESMATGTPVIAMNFGSVPEVIAHGKTGFICKSYAEMTAMIPLALELNRQTCRKHVESNFSVNQMVNGYEAIYRQIIKDRIESNGRIHATKIHF

SEQ ID NO: 143599 - DNA, 1062 bp, Crocosphaera watsonii WH 8501
  CDS (1)..(1062): transl_table=11
atgctgaagttgttatttttgtcaacccctgttggacctttaggatcggggatcggcggaggggttgagctaactttgcttaacctaggccaagaaatgagtcaacggggacatcaagtaactattgtcgcgcccgaaagttcaaaggttgatcatatttcttgtaaacaaatttcaggaacttgtcaagaaatggcccaacataatcatcgggatacaccgattattttacccgaaaattccgttttagctaatatgtgggactatgctagaagggtacaagatgagtatgatttaatcgttaatttcgcttttgattggttacctttttatcttactcctttttttgcgactcctattgttcatcttatcagtatgggttctatgacggatgctctggatgagattatgaaccgagttgctaaaaattatcccaatacaattggagttcatagtcatgctcaagcggcaacttttccttttaataatatttgtcgtgttgttggaaatgggttaaatttatctttatataattattgtcatacccctgaaaactatttagcttgggtgggaagaattaccccagaaaaagccttagaagatgccatagaagcagcagcaattgttaatattcctctgaaaatttttggtaagattacagatgagcaatactgggaaaatattcgtcaaaatcatcctaatgccccctatcaatacgaaggattttttaataccatagaattgcaggaaaaattaggtaaatgtcaggctttgttgatgactccgagatgggtagaagcgtttggaaatgtagctattgaggcattagcttgtggtgttcctgttattgcttatcaacggggtggcccagcagaaattgtgcaagatgaaagaacaggatttttggttgaacctgatagtatttctgggttggttgatgctatcgatcatattgataaaattgagaggaaacaatgtcgccaacaagctgaaacagaatattctctaaaagtattaggcgatcgctttgaaacttggttttatgagttacttaacaaatag

SEQ ID NO: 143600 - protein, 353 aa, Crocosphaera watsonii WH 8501
MLKLLFLSTPVGPLGSGIGGGVELTLLNLGQEMSQRGHQVTIVAPESSKVDHISCKQISGTCQEMAQHNHRDTPIILPENSVLANMWDYARRVQDEYDLIVNFAFDWLPFYLTPFFATPIVHLISMGSMTDALDEIMNRVAKNYPNTIGVHSHAQAATFPFNNICRVVGNGLNLSLYNYCHTPENYLAWVGRITPEKALEDAIEAAAIVNIPLKIFGKITDEQYWENIRQNHPNAPYQYEGFFNTIELQEKLGKCQALLMTPRWVEAFGNVAIEALACGVPVIAYQRGGPAEIVQDERTGFLVEPDSISGLVDAIDHIDKIERKQCRQQAETEYSLKVLGDRFETWFYELLNK

SEQ ID NO: 143601 - DNA, 1089 bp, Prosthecochloris aestuarii DSM 271
  CDS (1)..(1089): transl_table=11
atgaacccgttacgaatagcccagatagctccactgattgaaagtgttcctcctgcaatgtacggcgggacggaaagggttgtctatcatcttactgaagagcttgtcgagagaggccatgatgtcacgctctttgcttccggcgattccctgacttcggcaacgttgtgttcgccggttatgaaaagtcttcgtcttaccgggcagcagtcagccgggaccttaagttctctttatactctggcaatggtttatgaggttatggcgggaaagtttgacattattcattcgcatgtcgagtttttgacttttccttatgccgccaaatcccttacccctacggttcttacgttccacggacgtcttgattttcccgaaaccctgcggctgttgcggatgtatcgtaatctgcactttgtttccatcagtgactctcagcgggcttccgcccgggatctcaactggcagcagaccgtctatcacggctatcctgaggacgctttcggctttagtgacaagccgtctgattattttctctatctcggtcgtctttcgccggagaaagcgcctcatgaagcaatcataatcgcaaaagagtgtggggtgcgattgaaaatagccgctaaagtcgatcctgtcgatcaggcttattttgctcaacaggtagctcctttgctggatcatcctctgatcgaataccttggagaggtcgacgaaagtggaaagattcatttgttgcgtcatgcccgtgcattactcaacaccattaactggccggagccattcggtctggttatgatcgagtctctggcatgcggaacaccggttattgtccgccgctgcggttcggcgcctgaaattatcgagcatgggaagaccggttttatctgtcagtcccgcgacgattttgtccgggcggttcgtggtgtcggcactcttaagcgtgatctttgcaggaaggcatttgaaggtcgctttacgcgtcgccatatggctgacggttatgaacaaatatacaatcgccttctgaatccggatggtgttcaatcgggttctttcgatgagggttcttcactttgccggccttga

SEQ ID NO: 143602 - protein, 362 aa, Prosthecochloris aestuarii DSM 271
MNPLRIAQIAPLIESVPPAMYGGTERVVYHLTEELVERGHDVTLFASGDSLTSATLCSPVMKSLRLTGQQSAGTLSSLYTLAMVYEVMAGKFDIIHSHVEFLTFPYAAKSLTPTVLTFHGRLDFPETLRLLRMYRNLHFVSISDSQRASARDLNWQQTVYHGYPEDAFGFSDKPSDYFLYLGRLSPEKAPHEAIIIAKECGVRLKIAAKVDPVDQAYFAQQVAPLLDHPLIEYLGEVDESGKIHLLRHARALLNTINWPEPFGLVMIESLACGTPVIVRRCGSAPEIIEHGKTGFICQSRDDFVRAVRGVGTLKRDLCRKAFEGRFTRRHMADGYEQIYNRLLNPDGVQSGSFDEGSSLCRP

SEQ ID NO: 143603 - DNA, 1116 bp, Sulfitobacter sp. EE-36
  CDS (1)..(1116): transl_table=11
atgaagatcgccgtcatcggacatgtgcgtttctccatcgcgcgccccttcatgggcgggatggaggcccattgctggcacctctgccgtggcctgcgagcgcggggtcatgacgtgacccttttcgccgccggtgacagcgattggggcggtaaggtcgagccggtcgtggacgttcattatgaccgggagtttccttggcaccaatggcatggcacgccggagctcacggggcatctggatgcggcgttcgaaagtatcttaccgcgccttgccgagggtggtttcgacgtggtgcataacaattccttgcaccgcttccccccgcgtttcgccgcgcggcaccgaatcccgatggtgacctccctacatgtgccgccgttcgatgtattgaagcgtgccgtcgccgatggtggggcaccgtggtcgctgttcaccacctgttcgcagcggcaattgggagcgtggtttgatgacgcagaagctcccttcgccagagttgtaccgaatggtattgatcttgcggactggccgttccgcccggaaggcgatggcaccgcggtatggatgggccgtatcacgccgaccaaagggacgcatttggccgctcaggcagctaagattgctggcatcccgcttaggatttacggcacgattgaggatcaggggtactttgataccgaaattgcgccgctgttagctgagcgcgtccaatacggtggacacctgcaaggcgctgacctgaccaatgccatcgctcgcgcctctgtcctgctgttcaccccgctatgggatgaacccttcggactggcggcgattgaggcgatggcttgtggtctgccgattgcagcggttgagaatggggcgatccgggaggttgcgggggatgttgcgcgttatgcgggggcggatgctggggagctggccgaggcgttgagggaggcgatcggcatcccgcgctgggcggcgcgggagagggttgagaggttatttacgatagagcggatgttggcggcgtatgaggggttctatggccgggcggttgaggctgtacgggtagactttggcgtgcctacctttgaacggtttcgactaccctccattttatgctgctga

SEQ ID NO: 143604 - protein, 371 aa, Sulfitobacter sp. EE-36
MKIAVIGHVRFSIARPFMGGMEAHCWHLCRGLRARGHDVTLFAAGDSDWGGKVEPVVDVHYDREFPWHQWHGTPELTGHLDAAFESILPRLAEGGFDVVHNNSLHRFPPRFAARHRIPMVTSLHVPPFDVLKRAVADGGAPWSLFTTCSQRQLGAWFDDAEAPFARVVPNGIDLADWPFRPEGDGTAVWMGRITPTKGTHLAAQAAKIAGIPLRIYGTIEDQGYFDTEIAPLLAERVQYGGHLQGADLTNAIARASVLLFTPLWDEPFGLAAIEAMACGLPIAAVENGAIREVAGDVARYAGADAGELAEALREAIGIPRWAARERVERLFTIERMLAAYEGFYGRAVEAVRVDFGVPTFERFRLPSILCC

SEQ ID NO: 143605 - DNA, 984 bp, Moraxella catarrhalis
  CDS (1)..(984): transl_table=11
atgaaaattttacatgtattattaacttcattgccgataccaccgaatgattatggcggtacagaaagagtattatgggcattgtatcaagggcaaactgccttggggcatcaggtgcgttttttactcaaagccaatgccaatcatgcaccttatgtgcaggtttttgataagtcaaagccattacatgagcaaattgatgactgggcggatatggtacattttcactttccttatgaaggtgagttacataaaccttttgtttgcacagagcacagtaacagtgaagttgaaaaagagtttccaatcaacaccatttatctgtcttctaaacatgccgaaaataatcacgcaacttgttatgtgcataatggattatactggcctgattatggcgagccaaattttaagccaaaagattactgccattttttagccaaagcatcttggcgtattaagaacttacaaggtgctgtacgcattgcaaaaaaagcaaacaaaccattgcatattttggggggcaatcgctttaatatccgtcgcaatccctattgttatttatcttcacggttgcattttcatggaatggttggcggagtaaagaaaaatgagctaattgccaactcacaagcgttaatctttcctgtgttgtggcatgagccttttgggcttgcagtcattgaaagcctatatttgggctgccctgtatttgccacaccttttggggcaatgcctgatgttgttacccaagaagtggggcttttgtcagacagttatgcggttttaagtgaagcccttaaagatgtggcacaatttgaccgccttgcgtgccatgaacatgctaagagacattttagtcatttgtctatgtcaaacgcttatttagactgttatgaaaaagttttggcaggtgagagcctaaacccatcacgacccatttcaaaatcaaatattaaagctcgtcaaaaaatgtcagatgaataa

SEQ ID NO: 143606 - protein, 327 aa, Moraxella catarrhalis
MKILHVLLTSLPIPPNDYGGTERVLWALYQGQTALGHQVRFLLKANANHAPYVQVFDKSKPLHEQIDDWADMVHFHFPYEGELHKPFVCTEHSNSEVEKEFPINTIYLSSKHAENNHATCYVHNGLYWPDYGEPNFKPKDYCHFLAKASWRIKNLQGAVRIAKKANKPLHILGGNRFNIRRNPYCYLSSRLHFHGMVGGVKKNELIANSQALIFPVLWHEPFGLAVIESLYLGCPVFATPFGAMPDVVTQEVGLLSDSYAVLSEALKDVAQFDRLACHEHAKRHFSHLSMSNAYLDCYEKVLAGESLNPSRPISKSNIKARQKMSDE

SEQ ID NO: 143607 - DNA, 1296 bp, Streptomyces tenjimariensis
  CDS (1)..(1296): transl_table=11
gtgagtacggatgtgagcacggatccgagttcgccgagcaaccgccccccgcacatactcagactcaccccccacctctactggccacagctcgccggcagatcctggccggtgaggttcgacgccatcggcgggatgcagtcgcagatctaccgcctcacccggcagctcgacgagcggggcgtgcgccagaccgtgctgacgctccggctccccggcgccccccggcgctggccgatctccggccgtaccgaggtgcgcggcgtacggataccggtgctgccgctgcggtcccggatccgcgggatggtcgacctgaacctggcctgggccctgggcgtggccgccgacctcgtacggcgccgggagcgccccgacatcctccatgtgcactgcagcggcgtcatcatcccgccgctgctgggctggctgctgacccggctgctccgggtgccgctggtgctgaccgtgcactgctcgatcatcgtcacgtaccacccgatgaaccggctggacggcatgctccagccgctggcgcgctggattgagtgccgggcgatccgcgcctcggcccgcacgatcacgctcaccccgcgcacgatcccgctcctgacccggcggaccggagtgccgaaggagcggttcgcggtgctgcccgacgtgatcgacgccgacgccttcgccgcccgggcgacgccggaggcggtgcgggacgcccgggcggcgtgggggctgcccgaggggagacctgtcgtcggatacgtcggccggatcgcgcgggagaagggctggccgatcatcctggacatagcggaggagctgcgcgacaccgatgtgcactggctgatctgcggggacggcaacgaacgcgacctgttcgagcgggcggtacgggaacgcgggctgaccggccgggtgaccgtgaccgggtacgtcccgaacgaggacgtacccgccgcgatgggcgccatggacctgctgctgatggccccgctgcacgaggagttcggcagtgtgatgctggaggccatggcgtgcggcctgccgatcgtggcggtcggcgtcggcggagtggccgacgtcctggagcacggcgagctgggccggctggtgcccgagcgcacgcccgccgccttcgccaagggcatacgggagtccctggccgagccggagtggcgggcggccaccgcggagcgggcggcgaagacggtccgcgcccggtacgacctggggcaggtcgccgcgaggacggccgaggtgtacgaggaggtcgtccgcgcccggcgccgcggctga

SEQ ID NO: 143608 - protein, 431 aa, Streptomyces tenjimariensis
MSTDVSTDPSSPSNRPPHILRLTPHLYWPQLAGRSWPVRFDAIGGMQSQIYRLTRQLDERGVRQTVLTLRLPGAPRRWPISGRTEVRGVRIPVLPLRSRIRGMVDLNLAWALGVAADLVRRRERPDILHVHCSGVIIPPLLGWLLTRLLRVPLVLTVHCSIIVTYHPMNRLDGMLQPLARWIECRAIRASARTITLTPRTIPLLTRRTGVPKERFAVLPDVIDADAFAARATPEAVRDARAAWGLPEGRPVVGYVGRIAREKGWPIILDIAEELRDTDVHWLICGDGNERDLFERAVRERGLTGRVTVTGYVPNEDVPAAMGAMDLLLMAPLHEEFGSVMLEAMACGLPIVAVGVGGVADVLEHGELGRLVPERTPAAFAKGIRESLAEPEWRAATAERAAKTVRARYDLGQVAARTAEVYEEVVRARRRG

SEQ ID NO: 143609 - DNA, 1029 bp, Streptomyces viridochromogenes
  CDS (1)..(1029): transl_table=11
atgaggccgttgaaggtggcgctggtcaacatcccgctgcgggtcccggggagcgatgcctggatctccgtacccccacagggatacggcggcatccagtgggtcgtcgccaacctgatggacgggctgctggaactcggccacgaggtcttcctgctgggtgccccgggcagcccggccggacgcccggggctgaccgtcgtgccggcgggcgagccggaggagatcgagcggtggctgcggaccgcggacgtcgacgtggtccacgaccacagcggcggtgtcatcggcccggccgggctgccgccgggcaccgccttcatcagctcgcaccacttcaccacccggccggtcaaccccgtgggctgtacctacagttcccgggcgcagcgcgcccactgcgggggcggcgacgacgcgcccgtgatcccgatcccggtcgacccggcgcgctaccggtccgccgcggaccaggtggccaaggaggacttcctgctcttcatggggcgggtctcgccgcacaagggggcgctggaggcggccgcgttcgcgcacgcctgcggccggcgcctggtgctggccgggcccgcctgggagccggagtacttcgacgagatcactcgccggtacggctcgaccgtcgagccgatcggtgaggtgggcggcgagcggcggctcgacctgctcgcctccgcacacgcggtgctggccatgtcccaggcggtcaccgggccgtggggcggcatctggtgcgagccgggtgcgacggtggtctccgaggccgccgtgagcggcactcccgtcgtgggcacgggcaacggctgcctggccgagatcgtgccctcggtcggcgaagtcgtgggatacggcaccgacttcgcgcccgacgaagcacgccggaccctggcagggctgccggcatccgacgaggtccggcgtgcggcggtccggttgtggggccatgtgacgatcgccgaacggtatgtggagcagtaccgcaggctgctggccggagcgacctggaagtga

SEQ ID NO: 143610 - protein, 342 aa, Streptomyces viridochromogenes
MRPLKVALVNIPLRVPGSDAWISVPPQGYGGIQWVVANLMDGLLELGHEVFLLGAPGSPAGRPGLTVVPAGEPEEIERWLRTADVDVVHDHSGGVIGPAGLPPGTAFISSHHFTTRPVNPVGCTYSSRAQRAHCGGGDDAPVIPIPVDPARYRSAADQVAKEDFLLFMGRVSPHKGALEAAAFAHACGRRLVLAGPAWEPEYFDEITRRYGSTVEPIGEVGGERRLDLLASAHAVLAMSQAVTGPWGGIWCEPGATVVSEAAVSGTPVVGTGNGCLAEIVPSVGEVVGYGTDFAPDEARRTLAGLPASDEVRRAAVRLWGHVTIAERYVEQYRRLLAGATWK

SEQ ID NO: 143611 - DNA, 22 bp, Artificial sequence
  primer
atgaaaatcgcgcagatcgttc

SEQ ID NO: 143612 - DNA, 20 bp, Artificial sequence
  primer
tcatgggttcgggcctcctg

SEQ ID NO: 143613 - protein, 427 aa, Artificial sequence
  consensus sequence
  Variant (3)..(3): Xaa in position 3 is any amino acid
  Variant (5)..(9): Xaa in position 5 to 9 is any amino acid
  Variant (11)..(13): Xaa in position 11 to 13 is any amino acid
  Variant (15)..(17): Xaa in position 15 to 17 is any amino acid
  Variant (20)..(20): Xaa in position 20 is any amino acid
  Variant (22)..(53): Xaa in position 22 to 53 is any amino acid
  Variant (54)..(99): Xaa in position 54 to 99 is any or no amino acid
  Variant (101)..(102): Xaa in position 101 to 102 is any amino acid
  Variant (104)..(104): Xaa in position 104 is any amino acid
  Variant (106)..(153): Xaa in position 106 to 153 is any amino acid
  Variant (154)..(194): Xaa in position 154 to 194 is any or no amino acid
  Variant (196)..(213): Xaa in position 196 to 213 is any amino acid
  Variant (214)..(229): Xaa in position 214 to 229 is any or no amino acid
  Variant (232)..(235): Xaa in position 232 to 235 is any amino acid
  Variant (236)..(236): Xaa in position 236 is any or no amino acid
  Variant (238)..(241): Xaa in position 238 to 241 is any amino acid
  Variant (243)..(245): Xaa in position 243 to 245 is any amino acid
  Variant (247)..(252): Xaa in position 247 to 252 is any amino acid
  Variant (253)..(257): Xaa in position 253 to 257 is any or no amino acid
  Variant (259)..(283): Xaa in position 259 to 283 is any amino acid
  Variant (284)..(304): Xaa in position 284 to 304 is any or no amino acid
  Variant (306)..(312): Xaa in position 306 to 312 is any amino acid
  Variant (313)..(315): Xaa in position 313 to 315 is any or no amino acid
  Variant (317)..(318): Xaa in position 317 to 318 is any amino acid
  Variant (320)..(322): Xaa in position 320 to 322 is any amino acid
  Variant (324)..(328): Xaa in position 324 to 328 is any amino acid
  Variant (329)..(338): Xaa in position 329 to 338 is any or no amino acid
  Variant (340)..(340): Xaa in position 340 is any amino acid
  Variant (343)..(346): Xaa in position 343 to 346 is any amino acid
  Variant (348)..(349): Xaa in position 348 to 349 is any amino acid
  Variant (351)..(351): Xaa in position 351 is any amino acid
  Variant (353)..(353): Xaa in position 353 is any amino acid
  Variant (356)..(356): Xaa in position 356 is any amino acid
  Variant (358)..(360): Xaa in position 358 to 360 is any amino acid
  Variant (362)..(364): Xaa in position 362 to 364 is any amino acid
  Variant (366)..(368): Xaa in position 366 to 368 is any amino acid
  Variant (369)..(370): Xaa in position 369 to 370 is any or no amino acid
  Variant (372)..(372): Xaa in position 372 is any amino acid
  Variant (373)..(373): Xaa in position 373 is any or no amino acid
  Variant (375)..(398): Xaa in position 375 to 398 is any amino acid
  Variant (399)..(403): Xaa in position 399 to 403 is any or no amino acid
  Variant (405)..(410): Xaa in position 405 to 410 is any amino acid
  Variant (411)..(413): Xaa in position 411 to 413 is any or no amino acid
  Variant (415)..(422): Xaa in position 415 to 422 is any amino acid
  Variant (424)..(426): Xaa in position 424 to 426 is any amino acid
GGXEXXXXXLXXXLXXXGHXVXXXXXXXXXXXXXXXXXXXXXXXXXXXXXXXXXXXXXXXXXXXXXXXXXXXXXXXXXXXXXXXXXXXXXXXXXXXXXXDXXHXHXXXXXXXXXXXXXXXXXXXXXXXXXXXXXXXXXXXXXXXXXXXXXXXXXXXXXXXXXXXXXXXXXXXXXXXXXXXXXXXXXXXXXXXXXGXXXXXXXXXXXXXXXXXXXXXXXXXXXXXXXXXXGRXXXXXKXXXXAXXXAXXXXXXXXXXXLXXXXXXXXXXXXXXXXXXXXXXXXXXXXXXXXXXXXXXXXXXXXXXGXXXXXXXXXXLXXAXXXLXXXXXXXXXXXXXXXEXFGXXXXEXXAXGXPVXAXXXGXXXEXXXXXGXXGXXXXXXXXXXXXXXXXXXXXXXXXXXXXXRXXXXXXXXXFXXXXXXXXYXXXY

SEQ ID NO: 143614 - DNA, 783 bp, AZOTOBACTER VINELANDII
  CDS (1)..(783): transl_table=11
atgaatgtccttcttgtctatgcccaccccgaatcccgatccttgaacggttcgctcaaggatttcgccattcagcgcctggagcgtgcgggccatacggtccgggtgtcggacctgtacgccatgaactggaaggctacgctggatgcggacgacaacaccgcgcggcagcctggcgcgcgcttcgatccgtccatggactccagacaggcgttcgagaatggcacgcagagcaccgacatcgcgcgcgagcaggacaagctgcgctgggccgatggcgtaatcctgcagtttccgctgtggtggttctcgatgccggccatcctcaagggctggatcgaacgcgtgtatgcctacggcttcgcctatggcgtgggcgagcactcggacacgcactggggcgaccgctacggcgaaggcatgctggccggcaagcgtgccatgctggtggtgacggccggcggctgggcgtcgcactacgagccacgcggcatcaacgggcccatcgacgacatcctgtttcccatccagcacggcatcctcttctatccaggcttcgacgtgctgccatcccatgtgatctatcggacgagcaggatcgacgaggcggggttctcgaaggcctgcgatgcgctgggacaacggctggatgacctctggacggccgaccccgttcctttccgcaggcagaacgccggggactacctcattccggagctgacgctgaagcccgggctggcgccggggaggtctggtttcgacatccacgtcgaacgggattag

SEQ ID NO: 143615 - protein, 260 aa, AZOTOBACTER VINELANDII
MNVLLVYAHPESRSLNGSLKDFAIQRLERAGHTVRVSDLYAMNWKATLDADDNTARQPGARFDPSMDSRQAFENGTQSTDIAREQDKLRWADGVILQFPLWWFSMPAILKGWIERVYAYGFAYGVGEHSDTHWGDRYGEGMLAGKRAMLVVTAGGWASHYEPRGINGPIDDILFPIQHGILFYPGFDVLPSHVIYRTSRIDEAGFSKACDALGQRLDDLWTADPVPFRRQNAGDYLIPELTLKPGLAPGRSGFDIHVERD

SEQ ID NO: 143616 - DNA, 798 bp, Mesorhizobium loti MAFF303099
  CDS (1)..(798): transl_table=11
atgaaagttctgcttgtcttcgcccaccctgaatcacgctcgctgagcggcgcgcttcgtgacgtcgccataagggaactcgaggctcaagggcatgaggtgcgcgtatcggacctgtacgccgatggctggaaatccgaaatcgatcgcgccgacttcccttcgctggaacccgatgcgcggctcatcccggtcgcggcttccaagaagggtttcgaggccaatacgctaaccgcagatgtaaaggccgagatcgagaagctgctgtgggccgacaccttgatcctgcagttcccgctttggtggttcgccatgccggcaatcctcaagggctgggtcgaccgtgtgttcgcctacggattcgcctatggcgttggtgagcacagcgatcggcgctggggcgatcgctatggcgagggcacccttgtcgggaaacgcgctatgttgatcgtgaccgccgggggttgggaggagcactacacgccgcgcgggatcaacggacccatcgacgacctgctgtttccgatcaatcacgggatcctttattaccccggatacgacgtgcttccgccgttcgtggtctacaaggtcgatcgtctcgacgagaccggcttcgagcccgtggctgaacggctgcgtgacaggatgaggacgcttgcgacgacggcgcccattccataccgtcggcaaaatggcggagattatctcattccgagcatgaatctccgccctgagctgggcgatcccggggcaaacggtttcgcgcttcactccaaccaagcaggcgatgccagctga

SEQ ID NO: 143617 - protein, 265 aa, Mesorhizobium loti MAFF303099
MKVLLVFAHPESRSLSGALRDVAIRELEAQGHEVRVSDLYADGWKSEIDRADFPSLEPDARLIPVAASKKGFEANTLTADVKAEIEKLLWADTLILQFPLWWFAMPAILKGWVDRVFAYGFAYGVGEHSDRRWGDRYGEGTLVGKRAMLIVTAGGWEEHYTPRGINGPIDDLLFPINHGILYYPGYDVLPPFVVYKVDRLDETGFEPVAERLRDRMRTLATTAPIPYRRQNGGDYLIPSMNLRPELGDPGANGFALHSNQAGDAS

SEQ ID NO: 143618 - DNA, 780 bp, Pseudomonas aeruginosa PAO1
  CDS (1)..(780): transl_table=11
atgaacgtactcatcgtctatgcccatcccgagccgcgctccctcaacggtgcgctcaaggacttcgcggtcgcccgcctcgaggcggccggccatgcggtgcaggtttcggacctctacgcgatgggctggaaggccgtgctcgatgccggcgacagcctcgagcgcgaggccagcgaacgcttcgatccttccgcaacttccctgcgcgccttcgagaacggttggcagagcgtcgacatcgccggtgagcaggacaagctgcgctgggccgatacgctgatcctgcaattcccgctctggtggttcagcatgccggcgatcctcaagggttggatcgatcgcgtctatgcctgcggcttcgcctacggggtcggcgaacattccgacagccactggggcgaccgctacggcgagggccggatgcagggcaagcgggcgatgctggtagtcaccgccggcggctgggagtcgcactacgccgcgcgcggtatcaacggaccgatggacgacctgctgttccccatccaccacggcatcctgcattaccccggcttcgaggtattgccgccgttcgtcgtctatcgcagcggccggatcgacgcggagcgtttcgccgcgctgagcgagcagttgggccggcgcctcgatgacctgcagcgcgctgcgccgatcccgttccgccggcagaacggcggcgactacctgatcccggcgctgaccctgcgcgacgaacttgccccgcagcgggccggtttcgccatgcacctggccgaatga

SEQ ID NO: 143619 - protein, 259 aa, Pseudomonas aeruginosa PAO1
MNVLIVYAHPEPRSLNGALKDFAVARLEAAGHAVQVSDLYAMGWKAVLDAGDSLEREASERFDPSATSLRAFENGWQSVDIAGEQDKLRWADTLILQFPLWWFSMPAILKGWIDRVYACGFAYGVGEHSDSHWGDRYGEGRMQGKRAMLVVTAGGWESHYAARGINGPMDDLLFPIHHGILHYPGFEVLPPFVVYRSGRIDAERFAALSEQLGRRLDDLQRAAPIPFRRQNGGDYLIPALTLRDELAPQRAGFAMHLAE

SEQ ID NO: 143620 - DNA, 813 bp, Sinorhizobium meliloti 1021
  CDS (1)..(813): transl_table=11
atgaaaatcctgctcgtctttgcccacccggaatcgcgctcgctcaacggagcgctccgcgacgtcgcgatcgaggagctcacggcccaaggtcacgaagtgcgggtctcggatctctatgccgacggttggaaatccgaagtcggtcacgccgacttccctctcctgccgccggatgcgcggctcgtgccggtcgcggcgtccaagacggccttcgaagccggcgctttgacggaagatgtaaaggcggagatcgaaaagctgctgtgggcggacgttctgattcttcaattcccgctctggtggttttccatgcctgccattctcaagggctgggtcgaccgggtgtttgcctacggcttcgcctatggcgtcggcgaacatagcgacaagcgctggggcgaccgctatggcgaaggcagcctggcaggcaagcgcgcgatgctgatcgtcaccgccggcggttgggaagagcactattccgcccgcggggtgaacggaccaatcgacgaccttctgttcccgatcaatcacggcatcctctattatcccggctatgacgtgcttcctcccttcgtggcttatcgcgccgatcgcctcgacgaagccggattcactgaggtcgctgagggtcttcgcgaaaggatgcggacgatcgggaccgtgtcacccattccctatcggcagcagaatggcggagattatctcattccgagcatgcagctccgccccggactgggagatccggctgcgcccagctttgcccttcacctcaatgagacgcgggaggccctccgtcaggcgggcgagtag

SEQ ID NO: 143621 - protein, 270 aa, Sinorhizobium meliloti 1021
MKILLVFAHPESRSLNGALRDVAIEELTAQGHEVRVSDLYADGWKSEVGHADFPLLPPDARLVPVAASKTAFEAGALTEDVKAEIEKLLWADVLILQFPLWWFSMPAILKGWVDRVFAYGFAYGVGEHSDKRWGDRYGEGSLAGKRAMLIVTAGGWEEHYSARGVNGPIDDLLFPINHGILYYPGYDVLPPFVAYRADRLDEAGFTEVAEGLRERMRTIGTVSPIPYRQQNGGDYLIPSMQLRPGLGDPAAPSFALHLNETREALRQAGE

SEQ ID NO: 143622 - DNA, 708 bp, Pseudomonas putida KT2440
  CDS (1)..(708): transl_table=11
atgcttgtgaatgtactgatcgtccacgctcaccccgaaccgcaatcgttcacggcagccctgcgtgaccaggctgtggaaaccttccgtgcccaaggtcatcaggtgcaggtcagtgacttgtacgccatgggctggaacccggtggccagtgccgatgactttacccagcgcgagaaccccgagtacctcgtgtatgcgctggagcagcgtcagggcgtcaagcgcggtgccattgccgcagatatccagcaggagctggacaagctgttgtgggccgatctgctggtgctgaacttcccgatcttctggttctcggccccggccatgctcaagggctggatcgaccgggtgctggtgtcgggggtgtgctatggcggcaagcgcttctacgaccagggcgggttggccggcaagagggcgctggtgaccgtgaccctgggcgggcgcgagcacatgtttggcgacggcgcgattcacgggccgctggaagacatgctgcggccgattctgcggggcacgctggcctatgtcgggttcgaggtgctgccgccgttcgtggcgtggcatgtgccgtacatcagtgctgatgcgcggcaggactttctgcagcaataccggcagcgtctggagcagctctcggacgaccagccactggtgttcccgcgcctggcgcagttcgatgaagcgttgtacccgctgacgtga

SEQ ID NO: 143623 - protein, 235 aa, Pseudomonas putida KT2440
MLVNVLIVHAHPEPQSFTAALRDQAVETFRAQGHQVQVSDLYAMGWNPVASADDFTQRENPEYLVYALEQRQGVKRGAIAADIQQELDKLLWADLLVLNFPIFWFSAPAMLKGWIDRVLVSGVCYGGKRFYDQGGLAGKRALVTVTLGGREHMFGDGAIHGPLEDMLRPILRGTLAYVGFEVLPPFVAWHVPYISADARQDFLQQYRQRLEQLSDDQPLVFPRLAQFDEALYPLT

SEQ ID NO: 143624 - DNA, 819 bp, Rhodopseudomonas palustris CGA009
  CDS (1)..(819): transl_table=11
atgtcagggagcctggccgtgaaagttcttctggtatttgcccatcctgaaccgcgctcgttgaacggcgcgctccgcgacgtcgcggtcgccgagctgcagcgcctcggccacgaggtccaggtctccgatctctatgcgatgggttggaagccggcgatcgaccgcgccgatttcccgaacctggcatccgacgagcggttgctgccgaccgaggcgtcgaaggcggcgtttggcgccggcgagttgacccaggacgtccgcgacgagatcgacaagctgctttgggcggacgttgtgatcctgcaattcccgctgtggtggttcagtatgccggcgatcctgaagggctgggtcgagcgggtgttcgcctgcggcttcgcctacggcgtcggcgagcacagcgacaagcggtggggcaatcgctacggcgagggcgttctggctggcaagcgcgcgatgctaatcgtgacgaccggcggctgggagcagcactacggcccgcgcggcatcaacgggccgatcgacgacctgctgtttccgatccaccacggcattctgttctatccgggctgcgaggtgctgccgccctacgtgctgtatcaggcgggtcgtctcgattccgtcgggttcgaaaccgcggccgagcggctgcgggcgcgaatgcgcacgctcgccgagacgccgccgattccgtaccggcgccagaacggcggcgactacctgatcccggccatggagctgcggccggagctcggcgagcccggtgccgaaggctttgcggtccacctgagccaagaagtcggctccagcgcttga

SEQ ID NO: 143625 - protein, 272 aa, Rhodopseudomonas palustris CGA009
MSGSLAVKVLLVFAHPEPRSLNGALRDVAVAELQRLGHEVQVSDLYAMGWKPAIDRADFPNLASDERLLPTEASKAAFGAGELTQDVRDEIDKLLWADVVILQFPLWWFSMPAILKGWVERVFACGFAYGVGEHSDKRWGNRYGEGVLAGKRAMLIVTTGGWEQHYGPRGINGPIDDLLFPIHHGILFYPGCEVLPPYVLYQAGRLDSVGFETAAERLRARMRTLAETPPIPYRRQNGGDYLIPAMELRPELGEPGAEGFAVHLSQEVGSSA

SEQ ID NO: 143626 - DNA, 783 bp, Vanderwaltozyma polyspora DSM 70294
  CDS (1)..(783)
atgaaagttttaattgtttttgctcatccagatgaacgttctttaaacggttccttgttgaaggtttctgtcaaacaactagaagatgatggacatgaagtcaaggtcagtgacttgtatagaatgaaatggaaggctgttattgacgaggatgatttcttgaatcacaataagggagaaaggttacaagttgcagctgcctctggtggtgcatttttcaacaacaaattaactgaagatgttgttcaagaacatgaaaaattgcaatgggctgatactgttattttccaattcccaatgtggtggttccaaatgccagcaattttaaagggttgggttgatagagtttattctttgggttatgcttgcggggttggtgaacacaatgaaaccaaatggggtgaccgttacggtgatggttttttcaaaggtaagcgtggtatgctaatggtaactattggtggtccagtaagtaattacagtgaaagaggtatttgcggtcctatcgatgatgttctattcccaatcaaccatggtatcttatactatcctggtttcagtgttttaccttcatttaaagtttttaaatctaatactatgacttcagaggtatatgacgattgggccgctaaattagaagaacatttgcacaacattgaaaacatggtgccaattccttacagaagtcaaaatgatggtgactattctattccatctttggagatgaaaccaggatttggaaagccgggtgctcaaggtttctctttacatatcgatagctaa

SEQ ID NO: 143627 - protein, 260 aa, Vanderwaltozyma polyspora DSM 70294
MKVLIVFAHPDERSLNGSLLKVSVKQLEDDGHEVKVSDLYRMKWKAVIDEDDFLNHNKGERLQVAAASGGAFFNNKLTEDVVQEHEKLQWADTVIFQFPMWWFQMPAILKGWVDRVYSLGYACGVGEHNETKWGDRYGDGFFKGKRGMLMVTIGGPVSNYSERGICGPIDDVLFPINHGILYYPGFSVLPSFKVFKSNTMTSEVYDDWAAKLEEHLHNIENMVPIPYRSQNDGDYSIPSLEMKPGFGKPGAQGFSLHIDS

SEQ ID NO: 143628 - DNA, 783 bp, Vanderwaltozyma polyspora DSM 70294
  CDS (1)..(783)
atgaaagttttaatagtttttgctcatccagatgaacgttcgttaaacggttccttgttgaaggtcaccgtcaaacaactagaagatgatggccatgaagtcaaagtcagtgacttgtatagaatgaaatggaaggctgttattgatgaggatgattttttgaatcacaataagggagaaaggttacaagttgcagctgcctctggtggtgcatttttcaacaacaaattaactgaagatgttgttcaagaacatgaaaaattgcaatgggctgatactgttatcttccaattcccaatgtggtggttccaaatgccagctattttaaagggttgggttgatagagtttattctttgggcttggcttacggtgttggtgaacataacgaaaccaaatggggtgaccgtttcggtgatggtgttttcaaaggcaaacgcggtatgctaatggtaactataggtggttcagtaagtaattacagtgaaagaggtatttgtggtcctatcgatgatgttctattcccaattaaccacggtatcttatactatcctggtttcactgttttaccttcatttaaaatttttaaatccagtaccatgactccagaggtatatgacgattgggtcgctaaattaaaagaacatttgcacaacgtcgaaaacatggaacctattccttacagaagacaaaatggtggtgaatattctattccatcgttggagttgaaaccagaatttggaaagtcgggtgctcaaggtttctctttacatattcacaactaa

SEQ ID NO: 143629 - protein, 260 aa, Vanderwaltozyma polyspora DSM 70294
MKVLIVFAHPDERSLNGSLLKVTVKQLEDDGHEVKVSDLYRMKWKAVIDEDDFLNHNKGERLQVAAASGGAFFNNKLTEDVVQEHEKLQWADTVIFQFPMWWFQMPAILKGWVDRVYSLGLAYGVGEHNETKWGDRFGDGVFKGKRGMLMVTIGGSVSNYSERGICGPIDDVLFPINHGILYYPGFTVLPSFKIFKSSTMTPEVYDDWVAKLKEHLHNVENMEPIPYRRQNGGEYSIPSLELKPEFGKSGAQGFSLHIHN

SEQ ID NO: 143630 - DNA, 783 bp, Vanderwaltozyma polyspora DSM 70294
  CDS (1)..(783)
atgaaagttttaattgtttttgctcatccagacgaacgttcattaaatggctctttattggaagtagctgtcaaacaattgaaagatgatggacatgaagttaaagtcagtgatttatacaagatgaaatggaaggctgttattgatgaggatgatttcttgaatcacaataagggagaaaggttacaagttgcagctgcctctggtggtgcatttttcaacaacaaattaactgaagatgttgttgccgaacaagaaaaattagaatgggctgatacggttatattccaatttccattatggtggtattcaatgccatcaattttaaaaggttgggttgaaagagtttattcacttggtttagcttatggagttggtgagcataatgaaactaaatggggtgatcgttatggtgatggtaaatttaaaggtaagcgcggtatgctacttataacagttggtggctctaacacacattacagtgcaagaggtattagtggaccaattgaagatttactattcccaattaatcatggtattttattctatccaggatttgacgtattgccaccatttacagtatatagtgcaaatacaatggaacctaaagtttttgaagaatggtcagaaaaattaagagaacatttacataatattgaaactttagaacctattaaatatagaagacaaaatggaggtgattatattttcccatcattagaattgaaacctgagattggtgacaaaaatgaccatggtttctccttacacattgaaaaatag

SEQ ID NO: 143631 - protein, 260 aa, Vanderwaltozyma polyspora DSM 70294
MKVLIVFAHPDERSLNGSLLEVAVKQLKDDGHEVKVSDLYKMKWKAVIDEDDFLNHNKGERLQVAAASGGAFFNNKLTEDVVAEQEKLEWADTVIFQFPLWWYSMPSILKGWVERVYSLGLAYGVGEHNETKWGDRYGDGKFKGKRGMLLITVGGSNTHYSARGISGPIEDLLFPINHGILFYPGFDVLPPFTVYSANTMEPKVFEEWSEKLREHLHNIETLEPIKYRRQNGGDYIFPSLELKPEIGDKNDHGFSLHIEK

SEQ ID NO: 143632 - DNA, 777 bp, Burkholderia pseudomallei 668
  CDS (1)..(777): transl_table=11
atgaacgtcttgctggtctatgcccatcccgagccgaaatcgctgaacggctcgctgaagaatttcgcgctccggcatctcgaggaagccgggcacgcggtgcaggtttccgatctgtacgcgatgcaatggaaagcggcgctcgacgccgacgacaataccgcacgccggcccgatacgcgcttcgatccgtcgctcgattcgaagcatgcgttcgagaacggcacgcaggcggccgacatcgcacgcgagcaggacaagctgcgctgggccgacgcgctcgtcctgcagtttccgctgtggtggttctcgatgccggcgatcctgaagggctgggtcgagcgcgtgtacgcgttcggcttcgcgtacggcgtcggcgagcattcggatacgcactggggcgatcgctacggcgagggctcgatgaaaggcaagcgcgcgatgctgatcgtgacgacgggcgggtgggcatcgcattacggcccgcgcggcatcaacgggccgatcgacgacctgctgtacccgattcatcacggcatcctgtattaccccggcttcgacgtgctgccgccgtttctcgtgcatcgggcgaaccgcatcgacgagacgcgcttcgcgacgatccgcgatgcgctcgggcagcgcctcgacacgctgtggacgaccgcgccgatcgccttccgtgcgcagaatgccggcgatgacgagattccacagctcacgctgcgggccgacatcgcgccgggaaggtcggggttcgccgcgcatatcgcgtga

SEQ ID NO: 143633 - protein, 258 aa, Burkholderia pseudomallei 668
MNVLLVYAHPEPKSLNGSLKNFALRHLEEAGHAVQVSDLYAMQWKAALDADDNTARRPDTRFDPSLDSKHAFENGTQAADIAREQDKLRWADALVLQFPLWWFSMPAILKGWVERVYAFGFAYGVGEHSDTHWGDRYGEGSMKGKRAMLIVTTGGWASHYGPRGINGPIDDLLYPIHHGILYYPGFDVLPPFLVHRANRIDETRFATIRDALGQRLDTLWTTAPIAFRAQNAGDDEIPQLTLRADIAPGRSGFAAHIA

SEQ ID NO: 143634 - DNA, 780 bp, Salinispora tropica CNB-440
  CDS (1)..(780): transl_table=11
atgaactcgctgatcgtttacgcccacccggagccgaagtcgctcaacggctccctgaaggacctcgccatctccaccttgcggaccgccgggcacgaggtgcgggtcagcgacctgtacgcgatgcggtggaaggcggttgtggacgccaccgactacggccccgaggcctccaatccgctcagggtcgcccgggactcaggccgggccttcgacgccgggacactcaccccggatgtcctcatcgagcaggagaagctgcgatgggccgacgtgattatctttcagtttccgctgtggtggtacaccatgcccgcgatcctcaagggctgggtggatcgggtgttcagctcccacttcgcatacggcgtcggcgagtacagcgacaccaggttcggtgaccgtttcggtgaaggcactcttgccggcaggaaggcgctgctgtcggtgaccgtcggtggatcggagtcgcactactgcgctcgtgggatcaacggcccgatcgaggacctcctgtttccgatccagcacggcatcctctaccaccccggcatcgaggtgctgccgccgttcgtgctctacagcgccgaccggttgaccagcgaagactacgcggacgtcgccaaagcctggaagcaacgcctgctcaccctggattcgactgagccgatcgcgttccgacagcagaactccggcgactacgagatcccctcgctacgtctgaaggagggggtggagcccgccggccgtaccggctttgggctgcatctgcgacactga

SEQ ID NO: 143635 - protein, 259 aa, Salinispora tropica CNB-440
MNSLIVYAHPEPKSLNGSLKDLAISTLRTAGHEVRVSDLYAMRWKAVVDATDYGPEASNPLRVARDSGRAFDAGTLTPDVLIEQEKLRWADVIIFQFPLWWYTMPAILKGWVDRVFSSHFAYGVGEYSDTRFGDRFGEGTLAGRKALLSVTVGGSESHYCARGINGPIEDLLFPIQHGILYHPGIEVLPPFVLYSADRLTSEDYADVAKAWKQRLLTLDSTEPIAFRQQNSGDYEIPSLRLKEGVEPAGRTGFGLHLRH

SEQ ID NO: 143636 - DNA, 789 bp, Pseudomonas stutzeri A1501
  CDS (1)..(789): transl_table=11
atgaatgttctgatcgtctatgcccatcccgaaccgcgttccctgaacggcgccctgaaggatttcactgtccagcggctgcgcactgctggccacgccgtgcagctgtccgatctgtacgccatgggctggaaagcccccatcgacgcccgagacagcctggatcacgacctggagagccgcttcgacccctcgcaggattcgcgccgtgcgttcgccagcggccggcagagcccggacatcgccgccgagcaggacaaactgcgctgggccgatgcgctgatcctgcagttcccgctctggtggttctcgatgccggccatcctcaagggctgggtcgatcgggtgtatgcctacggcttcgcctacggtgtaggcgagcactcggatgcgcgctggggtgatcgttacggcgaaggcacgatggtcggcaagcgggccatgcttatcgttaccaccggtggttgggcatcgcactacagcccgcgcggtatcaacgggccgatggacgatctgctgtttccgatccagcacggcatcctgcattaccccggcttcgatgtactgccgccgttcgtggtgtaccgtaccagccgcatcgatgaggcgcgctttgccgacatccgcgaacaactgggtgagcgcctcgacagcctgtggcgcactgagccgattgcgtaccgcaagcagaacggtggggattacgagattccggcgctgacgctgcggcccgaagtggcgccgggcgctgaggggctctgcatccacgtgatcggctccgatggttga

SEQ ID NO: 143637 - protein, 262 aa, Pseudomonas stutzeri A1501
MNVLIVYAHPEPRSLNGALKDFTVQRLRTAGHAVQLSDLYAMGWKAPIDARDSLDHDLESRFDPSQDSRRAFASGRQSPDIAAEQDKLRWADALILQFPLWWFSMPAILKGWVDRVYAYGFAYGVGEHSDARWGDRYGEGTMVGKRAMLIVTTGGWASHYSPRGINGPMDDLLFPIQHGILHYPGFDVLPPFVVYRTSRIDEARFADIREQLGERLDSLWRTEPIAYRKQNGGDYEIPALTLRPEVAPGAEGLCIHVIGSDG

SEQ ID NO: 143638 - DNA, 819 bp, Pseudomonas mendocina ymp
  CDS (1)..(819): transl_table=11
atgtcgaaaagagtactgatcatctatgcccatcccgagccttcgtcgctaacgcggcaactggtggatgtgtctgttgaatgcttgactgcgcaagggcacgaggtcctgcagtccgatctatacgccatgggctggaaagcgatattcgacgagcacgacttccctgagcgggccaaccctcagcggctgtcgttcggcgcagagtccgcccacgcctatcgttatcgccgccagagccctgacgtggcggcagagcaagacaaggtcctagcggcagatgccgtcatcttccagtttccactttggtggtacggcatgccggccatcatgaagggatggatcgaccgcgtctgggcagccggactcgcccatggctacaagggcgctggcaacacctaccgctatggtgacggagccttcaagggcaaacgggccatgttgtcggtcgctgtcggcggccccgcagaagattactcgccgcgcggtatcaacggaccactcgagcagttgctgtttccgatcacgcatggctcgctctacttccccgggttcgatgtgctgccgacgttcgccatatacggcactggcaacttgaccgccgcagatgtcatggcagccaaagaggcttggcgtgctcgtctcgcggatttgttcacagacgcgccaatccccttccggccccaaaatggcggggactatacgccccgccacgagcttaaaccgcatgtggccgtgggccagacagggataatggcgcacgttgccgatggcgaaacagcccggcggcagcagctggaaacggaggaggcgttatga

SEQ ID NO: 143639 - protein, 272 aa, Pseudomonas mendocina ymp
MSKRVLIIYAHPEPSSLTRQLVDVSVECLTAQGHEVLQSDLYAMGWKAIFDEHDFPERANPQRLSFGAESAHAYRYRRQSPDVAAEQDKVLAADAVIFQFPLWWYGMPAIMKGWIDRVWAAGLAHGYKGAGNTYRYGDGAFKGKRAMLSVAVGGPAEDYSPRGINGPLEQLLFPITHGSLYFPGFDVLPTFAIYGTGNLTAADVMAAKEAWRARLADLFTDAPIPFRPQNGGDYTPRHELKPHVAVGQTGIMAHVADGETARRQQLETEEAL

SEQ ID NO: 143640 - DNA, 783 bp, Bradyrhizobium sp. ORS278
  CDS (1)..(783): transl_table=11
atgaacgtcctgatcgttttcgctcaccccgaaccccgctcgttgaatggcgccttgcgcgacgttgccgtcgccgagctgaaggcgcagggccacgaggtccggatctcagatctctatgtgatgggctggaaatcggcggccgaccgcgccgacttcccgctcctggcgccggatgcgcctctgaatgtcgccgcagcctccggcgaggccttcaagaatggcaccttgacccaggacgtcagggccgagcaggacaagctgctctgggccgacgcggtcatcctgcaatttccgctgtggtggttcacgatgccggcaatcctgaaggggtgggtcgaccgggtctattcctacggattcacctatggcgtcggcgagcacagcgacaagcgctggggcaatcggtacggggaaggcgtgttcgccggcaagcgtgcgatgctggtcgtgaccaccggcggctgggccgagcactattccgaccgcggcatcaacgggccgatcgacgacgtgctgtttccgatcaaccacggcgtcctgttctatcccggcttcgacgtgcttccggccttcgtggcgcacagggcgagccggatcgatgctgccggatttgctgaccttgccgaacggctgcgtgcgcgcatgcggacgctgttcacagatcagcccattgcgtaccggcgacagaaccacggcgactatctgatcccgtcgatgcagctgcgtcccgggcttggcgattccgacgcccacggcttcgcgctgcatatcgcgcgatga

SEQ ID NO: 143641 - protein, 260 aa, Bradyrhizobium sp. ORS278
MNVLIVFAHPEPRSLNGALRDVAVAELKAQGHEVRISDLYVMGWKSAADRADFPLLAPDAPLNVAAASGEAFKNGTLTQDVRAEQDKLLWADAVILQFPLWWFTMPAILKGWVDRVYSYGFTYGVGEHSDKRWGNRYGEGVFAGKRAMLVVTTGGWAEHYSDRGINGPIDDVLFPINHGVLFYPGFDVLPAFVAHRASRIDAAGFADLAERLRARMRTLFTDQPIAYRRQNHGDYLIPSMQLRPGLGDSDAHGFALHIAR

SEQ ID NO: 143642 - DNA, 789 bp, Bradyrhizobium sp. BTAi1
  CDS (1)..(789): transl_table=11
atgaacgtgcttctcgtcttcgcccatcccgaaccccgctcgctgaacggcgccttgcgcgacgcggccgttgccgagctcgcggcccaggggcacgaggtcagggtctcagacctctacgccatgggctggaagtcggccgccgaccgtgccgactttccgcagcttccaccagacgcgcgcctcaacgtcgcgaccgcgtccggcgaagctttcaaggcgcagatcctcaccgcggacgtcagggccgagcaggacaagctgctctgggctgacgcggtcatcctgcagtttccgctgtggtggttcacgatgcccgcgatcctgaaggggtgggtcgaccgcgtctattcccaaggcttcacttatggcgtcggcgagcacagcgacaagcgctggggcaaccgctatggcgagggcgtcttcgccggcaagcgggcgatgctggtggtgaccacaggcggctgggaggagcactattcggagcgcggcatcaacgggccgatcgacgacctgctgtttccgatcaaccacggcatcctgttctatcccggcttcgatgtgcttccggccttcgtcgcgcacaaggtgggccggctcgatgaagcgggcttttcagatgtcgcggagcgactgcgcgcgcggatgcggacgctgtttacggatcagccgattccctatcgtcgccagaaccacggcgactatctgattccgtcgatgcagctccggccggagcttggcgaggagggcacgcgcggcttcgcgctgcatgtggccgccgcgcgatga

SEQ ID NO: 143643 - protein, 262 aa, Bradyrhizobium sp. BTAi1
MNVLLVFAHPEPRSLNGALRDAAVAELAAQGHEVRVSDLYAMGWKSAADRADFPQLPPDARLNVATASGEAFKAQILTADVRAEQDKLLWADAVILQFPLWWFTMPAILKGWVDRVYSQGFTYGVGEHSDKRWGNRYGEGVFAGKRAMLVVTTGGWEEHYSERGINGPIDDLLFPINHGILFYPGFDVLPAFVAHKVGRLDEAGFSDVAERLRARMRTLFTDQPIPYRRQNHGDYLIPSMQLRPELGEEGTRGFALHVAAAR

SEQ ID NO: 143644 - DNA, 708 bp, Pseudomonas putida F1
  CDS (1)..(708): transl_table=11
atgcttgtgaatgtactgatcgtccacgctcaccccgaaccgcaatcgttcacggcagccctgcgtgaccaggctgtggaaaccttccgtgcccaaggtcatcaggtgcaggtcagtgacttgtacgccatgggctggaacccggtggccagtgccgatgactttacccagcgcgagaaccccgagtacctcgtgtatgcgctggagcagcgtcagggcgtcaagcgcggtgccattgccgcagatatccagcaggagctggacaagctgttgtgggccgatctgctggtgttgaacttcccgatcttctggttctcggccccggccatgctcaagggctggatcgaccgtgtgctggtgtcgggggtgtgctatggcggcaagcgcttctacgaccagggcggcttggccggcaagagggcgctggtgaccgtgaccctgggcgggcgcgagcacatgtttggcgatggcgcgattcacgggccgctggaagacatgctgcggccgatcctgcggggcacgctggcctatgtcgggttcgaagtgctgccgccgttcgtggcttggcatgtgccttacatcagtgctgctgcgcggcaggactttctgcagcaataccggcagcgtctggagcagctctcggacgaccagccactggtgttcccgcgcctggcgcagttcgatgaagcgttgtacccgctgacgtga

SEQ ID NO: 143645 - protein, 235 aa, Pseudomonas putida F1
MLVNVLIVHAHPEPQSFTAALRDQAVETFRAQGHQVQVSDLYAMGWNPVASADDFTQRENPEYLVYALEQRQGVKRGAIAADIQQELDKLLWADLLVLNFPIFWFSAPAMLKGWIDRVLVSGVCYGGKRFYDQGGLAGKRALVTVTLGGREHMFGDGAIHGPLEDMLRPILRGTLAYVGFEVLPPFVAWHVPYISAAARQDFLQQYRQRLEQLSDDQPLVFPRLAQFDEALYPLT

SEQ ID NO: 143646 - DNA, 780 bp, Pseudomonas aeruginosa PA7
  CDS (1)..(780): transl_table=11
atgaacgtactgatcgtctatgcccatcccgaaccacgctcgctcaacggcgcgctcaaggatctcgcggtcgcgcgcctcgaggcggccggtcatgcggtgcaggtctcggatctctacgcgatgggctggaaggccgcgctcgacgccgcggacagcctcgaacccgcgaccggcgagcgcttcgatccgtcccgcgactcactgcgtgccttccagaacggccggcagagcgccgatatcgccgccgagcaggacaagctgcgccgggccgatgcgctgatcctgcaattcccgctctggtggttcggcatgccggcgatcctcaagggctggatcgaccgcgtctatgcctgcggtttcgcctacggggtcggcgagcactccgacagccactggggcgaccgctacggcgagggacggatgcagggcaagcgggcgatgctggtggtcagcgccggcggctgggagtcgcactacgccgcgcgcggcatcaacgggccgatcgacgacctgttgtttcccatccaccatggcatcctgcattaccccggcttcaccgtgttgccgccgttcgtcgtctaccgcaccggccggctcgacgccgggcgcttcgccgcgctcggcgagcaactggggcagcgcctggacgaactgtggcggaccgcgccgattccgttccgccggcagaacggtggcgactacgcgattcccgcgctgaccctgcgcgacgagatcgccccggggcgggtcggcttcgccgcgcacctggcggagtag

SEQ ID NO: 143647 - protein, 259 aa, Pseudomonas aeruginosa PA7
MNVLIVYAHPEPRSLNGALKDLAVARLEAAGHAVQVSDLYAMGWKAALDAADSLEPATGERFDPSRDSLRAFQNGRQSADIAAEQDKLRRADALILQFPLWWFGMPAILKGWIDRVYACGFAYGVGEHSDSHWGDRYGEGRMQGKRAMLVVSAGGWESHYAARGINGPIDDLLFPIHHGILHYPGFTVLPPFVVYRTGRLDAGRFAALGEQLGQRLDELWRTAPIPFRRQNGGDYAIPALTLRDEIAPGRVGFAAHLAE

SEQ ID NO: 143648 - DNA, 777 bp, Serratia proteamaculans 568
  CDS (1)..(777): transl_table=11
atgaatgttttactggtctatgctcaccctgaaccgcagtctttaaatggctcccttaaggatttatcggtccaacgtttgaaagctgctgggcaccaggtacaggtttccgatctgtatgccatgcaatggaaagccacgctcgatgccaatgacagcagggttcccccgctaggatcacgctttgatccctcactcgattcccagcatgcctttgccaacgggttacagagccaggacattgagctggagcaggaaaaactacgctgggcggatacggtcattttgcagtttcccctgtggtggttttccatgccggcaatccttaaaggctgggttgaacgcgtctatgcctacggatttgcctatggcgtcggggaacactctgactcacgctggggtgatcgttatggcgaaggcaccctggcggggaaacgggcaatgctgattgttaccaccggtggttgggaatctcattacgctgcgaggggtatcaatggcccgatcgatgacatcctgttccctatccagcatggcatcctgcattaccccggtttcgaggtgctccccccctttgtcatctatcgtaccggccgaatggatgaaacacgttttaccgagatcggtgacgccctggggcaacggctggacgacctggcgcataccgcaccaatccctttccgccgacaaaatgcgggcgaatacgagatcccggcattaaccctgaaacccgatattgcccccggccggggtggttttggtgcacatatagaataa

SEQ ID NO: 143649 - protein, 258 aa, Serratia proteamaculans 568
MNVLLVYAHPEPQSLNGSLKDLSVQRLKAAGHQVQVSDLYAMQWKATLDANDSRVPPLGSRFDPSLDSQHAFANGLQSQDIELEQEKLRWADTVILQFPLWWFSMPAILKGWVERVYAYGFAYGVGEHSDSRWGDRYGEGTLAGKRAMLIVTTGGWESHYAARGINGPIDDILFPIQHGILHYPGFEVLPPFVIYRTGRMDETRFTEIGDALGQRLDDLAHTAPIPFRRQNAGEYEIPALTLKPDIAPGRGGFGAHIE

SEQ ID NO: 143650 - DNA, 789 bp, Azorhizobium caulinodans ORS 571
  CDS (1)..(789): transl_table=11
atgaatgtcctgtttgttttcgcccatcccgagcggcgttcgctcaacggggcgctcctcgacgtcgccatcgaaacgctggaggccgctgggcacacggtgcaggtgtccgacctctatgcgctgggctggaaggcgcaggccgatcgagccgacttccccggtctcgatcccgacgcgccgctcaatgtcgccgccgcctcgggtgcggccttcgccgccggcaccctcaccgccgatgtgcaggcggaacacgagaagctgcgctgggccgatacggtcattctccagttcccgctctggtggttcaccatgccggcgatcctgaagggctgggtggaccgcgtgtatgcctatggtttcgcctatggcgtgggcgagcacagcagcacccgctggggcgaccgctatggcgagggcagcatggccggaaagcgcgccatgctcatcgtcaccaccggcggctggcaggaacattattccgggcgcggcatcaacgggcccatggaggacgtgctgttccccatcaaccacggcattctctactaccccggcttcgacgtgctgccgccctacgtcgcccatcgcaccaaccggctcgacgcggcgggcttcgaggccctggcgtctcagttgcgggagcggatgcgcacgctcgatacgacggcgcccattccctatcgccgccagaacgggggcgactatctcattcccagcatggagctgcgccccgatctggagcccggcgcgacgggtttcggcgtccatcgggagaaggccggcggctga

SEQ ID NO: 143651 - protein, 262 aa, Azorhizobium caulinodans ORS 571
MNVLFVFAHPERRSLNGALLDVAIETLEAAGHTVQVSDLYALGWKAQADRADFPGLDPDAPLNVAAASGAAFAAGTLTADVQAEHEKLRWADTVILQFPLWWFTMPAILKGWVDRVYAYGFAYGVGEHSSTRWGDRYGEGSMAGKRAMLIVTTGGWQEHYSGRGINGPMEDVLFPINHGILYYPGFDVLPPYVAHRTNRLDAAGFEALASQLRERMRTLDTTAPIPYRRQNGGDYLIPSMELRPDLEPGATGFGVHREKAGG

SEQ ID NO: 143652 - DNA, 780 bp, Salinispora arenicola CNS-205
  CDS (1)..(780): transl_table=11
atgaagacgctgatcgtctatgcccacccggagccgaagtcgctcaacggctcgctgaaggacctcgccgtctccaccctgcgcaccgccgggcacgaggtgcgggtcagcgacctgtacgcgatgaactggaaggcggtcgtggacagcacggaccacgaccccgacgcctccggtcggctgaaggtcgccctggactcgggccgagccttcgacgccgggacactcaccccggacgtcctcgccgagcaggagaagctgcggtgggccgacatggtcatccttcagtttccgctgtggtggttcaccatgcccgcgatcctcaagggctgggtggaccgggtgttcagcttccactttgcgtacggcgtcggcgagtacagcgccaccaggttcggtgaccgcttcggcgaaggcaccctggccggcaggaaggcactgctgtcggtgactgccggtggatcggagccgcactactctgatcgcgggatcaacggacccatcgaggacctgctgtttccgatccagcacggcatcctctactacccgggtatggaggtgctgccgccgttcgtgctgtacggcgccgatcggctgaccgacgaggactacccggacatcgccaaagcctggacgcagcgcctgctcgccctggagtcgaccgagccgatcgcgttccgacagcagaactccggcgactacgagatcccctcgttgcggctgaaggagggggtggagcccacgggccgtaccagcttcggactgcacctgcgggactga

SEQ ID NO: 143653 - protein, 259 aa, Salinispora arenicola CNS-205
MKTLIVYAHPEPKSLNGSLKDLAVSTLRTAGHEVRVSDLYAMNWKAVVDSTDHDPDASGRLKVALDSGRAFDAGTLTPDVLAEQEKLRWADMVILQFPLWWFTMPAILKGWVDRVFSFHFAYGVGEYSATRFGDRFGEGTLAGRKALLSVTAGGSEPHYSDRGINGPIEDLLFPIQHGILYYPGMEVLPPFVLYGADRLTDEDYPDIAKAWTQRLLALESTEPIAFRQQNSGDYEIPSLRLKEGVEPTGRTSFGLHLRD

SEQ ID NO: 143654 - DNA, 792 bp, Gluconacetobacter diazotrophicus PAl 5
  CDS (1)..(792): transl_table=11
atgaatgtcctgatcgtcttcgcccacccggaaagacactcgctcaacggcgccctgctcgacgtcgccgtcgccgaactggcggcccagggacatgaggtgcgggtgtcggacctctatgccatgcattggaaggccgcagtcgacaaggacgattttcctgccctgtcgtcggacggaccgctgaaggtctggaaagcgtcccatgacgggttcgcggcggatgcgctgacgccggatgtgaaggcggaacaggagaagctgctgtgggccgatatggtcattctgcagttcccgttatggtggttcgccatgccggccattctcaagggctgggtggaccgcgtctatgcctccggcttcgcctatggggtgggcgaacacagcgaccggcgctggggcgaccggtatggcgaaggggtcatggccggcaagcgtgcgatgctgatggtcacggccggagggtggccggaacattattcggatcgcgggatcaacggcccgatcgacgatctgctgttcccgatcaaccatggaatccttttctatcccggtttcaccgtcctgccgcccttcgtggcctatcgtgtcgatcggatggacgagccgaaattcacgattctggcggaccaagtgcgcgagcggatgaagacactggagacgatcgcaccgattccctaccgcaagcagaatgacggcgactaccagatcccgaccatggaactgctgccggaactggcaccgccgggtgcgcgcggcttcgaagtgcatctcgcgcctgaacgcgactga

SEQ ID NO: 143655 - protein, 263 aa, Gluconacetobacter diazotrophicus PAl 5
MNVLIVFAHPERHSLNGALLDVAVAELAAQGHEVRVSDLYAMHWKAAVDKDDFPALSSDGPLKVWKASHDGFAADALTPDVKAEQEKLLWADMVILQFPLWWFAMPAILKGWVDRVYASGFAYGVGEHSDRRWGDRYGEGVMAGKRAMLMVTAGGWPEHYSDRGINGPIDDLLFPINHGILFYPGFTVLPPFVAYRVDRMDEPKFTILADQVRERMKTLETIAPIPYRKQNDGDYQIPTMELLPELAPPGARGFEVHLAPERD

SEQ ID NO: 143656 - DNA, 792 bp, Gluconacetobacter diazotrophicus PAl 5
  CDS (1)..(792): transl_table=11
atgaatgttctgatcgtcttcgctcatccggaaagacactcgctcaacggcgccctgcttgacgtcgccgtctctgaactgacggcccagggacatgacgttcaggtgtcggatctctatgccatgcactggaaggctgcagttgacagggacgattttcccggcctgtcgtccgacggaccgctgaaagtctggaaagcgtccaatgacgggttcgcggcagatgcgctgacgccggacgtgaaggcggaacaagagaaattgctgtgggccgatacggtcattctgcagttcccgttatggtggttcgccatgccggccattctcaaaggctgggtggaccgggtctatgcctccggcttcgcctatggggtgggcgaacacagcgagcagcgctggggcgaccggtatggcgaaggggtcatggccggcaagcgcgcaatgctgatggtcaccgcaggcgggtggcccgaacattattcggaccgcgggatcaacggcccgatcgacgatctgctgttcccgatcaatcatgggatccttttctatcccggcttcaccgttctgccgcccttcgtggcctatcgtgtcgatcggatggacgagcctaaattcacgcttctcgcggaacaattgcgcgagcggatgacgaccttggaaacgatcgcgccgattccttatcgcaagcagaattacggcgactaccagatcccgaccatggaactgctgcccggactggcgccccccggagcgcacggcttcgcggtgcatcttgcccccgagcgcgactga

SEQ ID NO: 143657 - protein, 263 aa, Gluconacetobacter diazotrophicus PAl 5
MNVLIVFAHPERHSLNGALLDVAVSELTAQGHDVQVSDLYAMHWKAAVDRDDFPGLSSDGPLKVWKASNDGFAADALTPDVKAEQEKLLWADTVILQFPLWWFAMPAILKGWVDRVYASGFAYGVGEHSEQRWGDRYGEGVMAGKRAMLMVTAGGWPEHYSDRGINGPIDDLLFPINHGILFYPGFTVLPPFVAYRVDRMDEPKFTLLAEQLRERMTTLETIAPIPYRKQNYGDYQIPTMELLPGLAPPGAHGFAVHLAPERD

SEQ ID NO: 143658 - DNA, 669 bp, Bordetella petrii DSM 12804
  CDS (1)..(669): transl_table=11
atgcagtcagccagcaaaaagaaagtgcttatcgtccatgctcacccggaacgaacatccgtgacgagccaactcgccgagattgcttgcgcggtgctccgatcccaggggcacgaggtcatgcagtccgacctgtacggcatggggtggaaagcggtgttcgatgcgaacgatttccctacgcgggtcaagcatgatcgcctgtcgttcatcgatgagtcgggacacgcgtttgccaatggttgccagacgcccgacgtcgaggaagagcaacgcaagattctggcggccgacgcggtgattttgcttttcccgctgtggtggttcagcatgccagccatcatgaagggctgggtggacagggtatgggcctttggcctggcctatggctaccagggggccggcaacgcgtatcgctatggcgacggtggctttgcgggaaagcgggcgctgctggcggtttctgttggcgggccagagcgggactactcgcccaggggcatcaatgggccgctggagcaactgctgtttcccattacgcatggcacgctgttcttccccggcatgcaggtgctgcctaccttcgcggtgtatggggcaggcgggatcgacgccaaaggcatggctgaagccggtgcggcctggggggcccgggtggaacggctgtga

SEQ ID NO: 143659 - protein, 222 aa, Bordetella petrii DSM 12804
MQSASKKKVLIVHAHPERTSVTSQLAEIACAVLRSQGHEVMQSDLYGMGWKAVFDANDFPTRVKHDRLSFIDESGHAFANGCQTPDVEEEQRKILAADAVILLFPLWWFSMPAIMKGWVDRVWAFGLAYGYQGAGNAYRYGDGGFAGKRALLAVSVGGPERDYSPRGINGPLEQLLFPITHGTLFFPGMQVLPTFAVYGAGGIDAKGMAEAGAAWGARVERL

SEQ ID NO: 143660 - DNA, 786 bp, Methylobacterium radiotolerans JCM 2831
  CDS (1)..(786): transl_table=11
atgaacaccctgatcgtcttcgcccatccggagccgcgctccctctgcggcgcgctccgggacgagaccgtggccgcgctggcggcgcagggccacgcggtcgcagtgtccgatctctacgccatgaactggaccgcggcggtcgaccgcgcggacttcccggacctcgcccccgaggcgcgcctccgcgtgccggccgcctcggggcaggccgccgcggccggccgcctgaccgaggacgtggttgccgagcaggccaagctcctctgggccgatcagctgatcctgctgttcccgctctggtggttcggcctgccggcgatcctcaagggctggatcgaccgggtctacgcgcacggcttcgcctacggcgtcggcgagcacagcgaccgccgctggggcgaccgctacggcgagggccgcctcgcgggccggcgcgccatgctgatcgtgaccgcgggcggctgggaggagcactattccgcgcgcgggatcaacgggccgatcgacgacctgctgttcccgatccagcacgggatcctgcactatcccggctacacggtgctgccgcccttcgtcgtctaccgggccgacggactcgacgcggccgcgttcgcggccgtcgcggagcgcctgcgggaccgcctgtccgcgctcgcgacgacgcccccgatcccgttccggcggcagaatggcggcgactacctgatccccggcatgcagctccggccggggctggaggcgccgggcgcgcgcggcttcgccctccaccgcgacggcacgtga

SEQ ID NO: 143661 - protein, 261 aa, Methylobacterium radiotolerans JCM 2831
MNTLIVFAHPEPRSLCGALRDETVAALAAQGHAVAVSDLYAMNWTAAVDRADFPDLAPEARLRVPAASGQAAAAGRLTEDVVAEQAKLLWADQLILLFPLWWFGLPAILKGWIDRVYAHGFAYGVGEHSDRRWGDRYGEGRLAGRRAMLIVTAGGWEEHYSARGINGPIDDLLFPIQHGILHYPGYTVLPPFVVYRADGLDAAAFAAVAERLRDRLSALATTPPIPFRRQNGGDYLIPGMQLRPGLEAPGARGFALHRDGT

SEQ ID NO: 143662 - DNA, 798 bp, Beijerinckia indica subsp. indica ATCC 9039
  CDS (1)..(798): transl_table=11
atgaacattttgcttgtctttgcccatcccgaaccgcgctcgctcaacggcgcgctccgcgacatcgcggtcaaggaactcgaggctcaaggccacgaggtgcgggtgtcggacctctatgccatgcattggaaatccgagatcgaccgcgccgacttcccggcgctggcgccggacgaacggttgaaagtatggagagcctcaacagaggggttcgctgccaagacactcaccgaagacgtgagagccgagcaggagaagcttctgtgggccgatgtcttgatccttcagtttccgctctggtggttcaccatgccggcgatcctcaagggctgggtcgagcgggtatatgcgagtggtttcgcctatggggtcggcgagcacagcgacaagcgctggggcgaccgctacggtgaggggaaactggcaggcaagcgggccatgttgatcgtgacggccggcggctgggaggagcattattccgcccgcgggatcaacgggccgatcgacgacctgctgttccccatcaatcacggtatcctctattatccgggttacgacgtgcttccgcctttcgtggtctacaaagtcgatcgcctcgatgaagccggcttcgagaccgtggccgagcacctgcgcgaaaggatgcggaccctcgcgaccaccgcgcccattccctatcgacggcagaatggcggtgactatctgatcccaagcatgcagcttcgtcccgacctgggcgatccagaggcgaccggcttcgcggttcatctgaaggatgcaagcacggcgggctag

SEQ ID NO: 143663 - protein, 265 aa, Beijerinckia indica subsp. indica ATCC 9039
MNILLVFAHPEPRSLNGALRDIAVKELEAQGHEVRVSDLYAMHWKSEIDRADFPALAPDERLKVWRASTEGFAAKTLTEDVRAEQEKLLWADVLILQFPLWWFTMPAILKGWVERVYASGFAYGVGEHSDKRWGDRYGEGKLAGKRAMLIVTAGGWEEHYSARGINGPIDDLLFPINHGILYYPGYDVLPPFVVYKVDRLDEAGFETVAEHLRERMRTLATTAPIPYRRQNGGDYLIPSMQLRPDLGDPEATGFAVHLKDASTAG

SEQ ID NO: 143664 - DNA, 855 bp, Stenotrophomonas maltophilia K279a
  CDS (1)..(855): transl_table=11
atgcagtcagccaacaaaaagaaagcgctcatcgtccatgctcatcccgagcggacatccgtgacataccagctcgctgaaatcgcccgtgaggtgttgaaagcccaaggccacgaggtcatgcaatccgacctgtacggcatgggctggaaagctgtattcgatggtcaggactttcccaagcgggcgaatcaggatcgcctgtcgttcatcgaggagtccggacatgcgttctccacgggttgccagacgcccgacgttgaggaggaacaacgcaagattctggctgccgacgcggtaatcctgctgttccccctttggtggtacagcatgccggcgatcatgaagggctgggtggatcgcgtgtgggcctttggcctggcctatggttaccaaggggccggcaacgcctatcgctacggcgaaggtggttttgcaggcaagcgcgcgctgctggcggtctctgtcggtgggcctgagcgggactattccccccgtggcatcaacgggccgctggaacaactgttgttccccatcacgcacggcacgctgtttttccccggtatgcaggtgctgcccactttcgcggtgtacgggacaggagggattgacgccaaaggtatagccgaagccactgcgacttggcgcactcgagtggaacggctgttcgaggatgaacccatcgcttttcgcccgcagaacggcggtgactacccggatcgccacgttctggcgaaccacgttgcaccgaatcagacggggctgatggcacacgttgccgatatttctcgatctgcccccgacaccgaggtacttcgccctttgagcgtttccgcagtcagtgtggaggcatga

SEQ ID NO: 143665 - protein, 284 aa, Stenotrophomonas maltophilia K279a
MQSANKKKALIVHAHPERTSVTYQLAEIAREVLKAQGHEVMQSDLYGMGWKAVFDGQDFPKRANQDRLSFIEESGHAFSTGCQTPDVEEEQRKILAADAVILLFPLWWYSMPAIMKGWVDRVWAFGLAYGYQGAGNAYRYGEGGFAGKRALLAVSVGGPERDYSPRGINGPLEQLLFPITHGTLFFPGMQVLPTFAVYGTGGIDAKGIAEATATWRTRVERLFEDEPIAFRPQNGGDYPDRHVLANHVAPNQTGLMAHVADISRSAPDTEVLRPLSVSAVSVEA

SEQ ID NO: 143666 - DNA, 780 bp, Pseudomonas aeruginosa C3719
  CDS (1)..(780): transl_table=11
atgaacgtactcatcgtctatgcccatcccgagccgcgctccctcaacggtgcgctcaaggacttcgcggtcgcccgcctcgaggcggccggccatgcggtgcaggtttcggacctctacgcgatgggctggaaggccgtgctcgatgccggcgacagcctcgagcgcgaggccagcgaacgcttcgatccttccgcaacttccctgcgcgccttcgagaacggttggcagagcgtcgacatcgccggtgagcaggacaagctgcgctgggccgatacgctgatcctgcaattcccgctctggtggttcagcatgccggcgatcctcaagggttggatcgatcgcgtctatgcctgcggcttcgcctacggggtcggcgaacattccgacagccactggggcgaccgctacggcgagggccggatgcagggcaagcgggcgatgctggtagtcaccgccggcggctgggagtcgcactacgccgcgcgcggtatcaacggaccgatggacgacctgctgttccccatccaccacggcatcctgcattaccccggcttcgaggtattgccgccgttcgtcgtctatcgcagcggccggatcgacgcggagcgtttcgccgcgctgagcgagcagttgggccggcgcctcgatgacctgcagcgcactgcgccgatcccgttccgccggcagaacggcggcgactacctgatcccggcgctgaccctgcgcgacgaacttaccccgcagcgggccggtttcgccatgcacctggccgaatga

SEQ ID NO: 143667 - protein, 259 aa, Pseudomonas aeruginosa C3719
MNVLIVYAHPEPRSLNGALKDFAVARLEAAGHAVQVSDLYAMGWKAVLDAGDSLEREASERFDPSATSLRAFENGWQSVDIAGEQDKLRWADTLILQFPLWWFSMPAILKGWIDRVYACGFAYGVGEHSDSHWGDRYGEGRMQGKRAMLVVTAGGWESHYAARGINGPMDDLLFPIHHGILHYPGFEVLPPFVVYRSGRIDAERFAALSEQLGRRLDDLQRTAPIPFRRQNGGDYLIPALTLRDELTPQRAGFAMHLAE

SEQ ID NO: 143668 - DNA, 780 bp, Pseudomonas aeruginosa 2192
  CDS (1)..(780): transl_table=11
atgaacgtactcatcgtctatgcccatcccgagccgcgctccctcaacggtgcgctcaaggacttcgcggtcgcccgcctcgaggcggccggtcatgcggtgcaggtttcggacctctacgcgatgggctggaaggccgtgctcgatgccggcgacagcctcgagcgcgaggccagcgaacgcttcgatccttccgcaacttccctgcgcgccttcgagaacggttggcagagcgtcgacatcgccggtgagcaggacaagctgcgctgggccgatacgctgatcctgcaattcccgctctggtggttcagcatgccggcgatcctcaagggttggatcgatcgcgtctatgcctgcggcttcgcctacggggtcggcgaacattccgacagccactggggcgaccgctacggcgagggccggatgcagggcaagcgggcgatgctggtagtcaccgccggcggctgggagtcgcactacgccgcgcgcggtatcaacggaccgatggacgacctgctgttccccatccatcacggcatcctgcattaccccggcttcgaggtattgccgccgttcgtcgtctatcgcagcggccggatcgacgcggagcgtttcgccgcgctgagcgagcagttgggccggcgcctcgatgacctgcagcgcactgcgccgatcccgttccgccggcagaacggcggcgactacctgatcccggcgctgaccctgcgcgacgaacttgccccgcagcgggccggtttcgccatgcacctggccgaatga

SEQ ID NO: 143669 - protein, 259 aa, Pseudomonas aeruginosa 2192
MNVLIVYAHPEPRSLNGALKDFAVARLEAAGHAVQVSDLYAMGWKAVLDAGDSLEREASERFDPSATSLRAFENGWQSVDIAGEQDKLRWADTLILQFPLWWFSMPAILKGWIDRVYACGFAYGVGEHSDSHWGDRYGEGRMQGKRAMLVVTAGGWESHYAARGINGPMDDLLFPIHHGILHYPGFEVLPPFVVYRSGRIDAERFAALSEQLGRRLDDLQRTAPIPFRRQNGGDYLIPALTLRDELAPQRAGFAMHLAE

SEQ ID NO: 143670 - DNA, 795 bp, Burkholderia cenocepacia PC184
  CDS (1)..(795): transl_table=11
atgacgaagatgaatgtgctgttcgtgtatgcccatcccgaaccgcgttcgctgaacggcgcgctgcgcgacttcgccgtcgcgcatctcgaagcggccggccacgcggtgcaggtgagcgacctgtatgcgatgaactggaaggcggtgctggacgcgaaagacgtgaccgatcgcgcgcccgatgcgcggttcgatccgtcgctcgattcgaagcgcgcgttcgcagcgggtacgcaaagcgaagacatcgcacgcgagcaggacaagctgaagtgggccgacgcggtgatcctgcagtttccgctgtggtggttctcgatgccggcgatcatgaaaggctggttcgagcgcgtgtacgcgtacggttttgcgtacggcgtcggcgagcattccgatacgcactggggcgatcgctacggtgaaggttcgctggccggcaagcgggcgatgatcgtcgtcacgacgggcggatgggagtcgcactacagcccgcgcggcattaacgggccgatcgacgacctgctgttcccgatccagcacggcgtgctgtattacccgggattcgacgtgctgccgccgttcgtgatctatcagacgggcaagatgaacgccgcgcgcttcgacaaaacctgtacggcgctcggccagcgtctcgacgagctgtggaccacgccgccgattccgtttcgccggcagaacgcgggcgattacgaaattccggcgctgacgttgaaagaggagatcgcgccggggaaggtggggttcgccgcgcatctggcgagcgatcggtga

SEQ ID NO: 143671 - protein, 264 aa, Burkholderia cenocepacia PC184
MTKMNVLFVYAHPEPRSLNGALRDFAVAHLEAAGHAVQVSDLYAMNWKAVLDAKDVTDRAPDARFDPSLDSKRAFAAGTQSEDIAREQDKLKWADAVILQFPLWWFSMPAIMKGWFERVYAYGFAYGVGEHSDTHWGDRYGEGSLAGKRAMIVVTTGGWESHYSPRGINGPIDDLLFPIQHGVLYYPGFDVLPPFVIYQTGKMNAARFDKTCTALGQRLDELWTTPPIPFRRQNAGDYEIPALTLKEEIAPGKVGFAAHLASDR

SEQ ID NO: 143672 - DNA, 777 bp, Burkholderia pseudomallei 406e
  CDS (1)..(777): transl_table=11
atgaacgtcttgctggtctatgcccatcccgagccgaaatcgctgaacggctcgctgaagaatttcgcgctccggcatctcgaggaagccgggcacgcggtgcaggtttccgatctgtacgcgatgcaatggaaagcggcgctcgacgccgacgacaataccgcacgccggcccgatacgcgcttcgatccgtcgctcgattcgaagcatgcgttcgagaacggcacgcaggcggccgacatcgcacgcgagcaggacaagctgcgctgggccgacgcgctcgtcctgcagtttccgctgtggtggttctcgatgccggcgatcctgaagggctgggtcgagcgcgtgtacgcgttcggcttcgcgtatggcgtcggcgagcattcggatacgcactggggcgatcgctacggcgagggctcgatgaaaggcaagcgcgcgatgctgatcgtgacgacgggcgggtgggcatcgcattacggcccgcgcggcatcaacgggccgatcgacgacctgctgtacccgattcatcacggcatcctgtattaccccggcttcgacgtgctgccgccgtttctcgtgcatcggacgaaccgcatcgacgagacgcgcttcgcgacgatccgcaatgcgctcgggcagcgcctcgacacgctgtggacgaccgcgccgatcgccttccgtgcgcagaatgccggcgattacgagattccacagctcacgctgcgggccgacatcgcgccgggaaggtcggggttcgccgcgcatatcgcgtga

SEQ ID NO: 143673 - protein, 258 aa, Burkholderia pseudomallei 406e
MNVLLVYAHPEPKSLNGSLKNFALRHLEEAGHAVQVSDLYAMQWKAALDADDNTARRPDTRFDPSLDSKHAFENGTQAADIAREQDKLRWADALVLQFPLWWFSMPAILKGWVERVYAFGFAYGVGEHSDTHWGDRYGEGSMKGKRAMLIVTTGGWASHYGPRGINGPIDDLLYPIHHGILYYPGFDVLPPFLVHRTNRIDETRFATIRNALGQRLDTLWTTAPIAFRAQNAGDYEIPQLTLRADIAPGRSGFAAHIA

SEQ ID NO: 143674 - DNA, 780 bp, Burkholderia cenocepacia J2315
  CDS (1)..(780): transl_table=11
atgaatgtgctgatcgtgtatgcccatcccgaaccgcgttcgctgaacggcgcgctgcgcgatttcgccgtcgcgcatctcgaagcggccggccacgcggtgcaggtgagcgacctgtatgcgatgaactggaaggcggtgctggacgcgaacgacgtgaccgatcgcgcgcccgacgcgcggttcgatccgtcgctcgattcgcggcgcgcgttcgcggcgggtacgcaaagcgacgacatcgcgcgcgagcaggacaagctgaagtgggccgacgcggcgatcctgcagtttccgctgtggtggttctcgatgccggcgatcatgaagggctggttcgagcgcgtgtacgcgtacggttttgcgtacggcgtcggcgagcattccgatacgcactggggcgatcgctacggcgaaggttcgctggccggcaaacgcgcgatgatcgtcgtcacgacgggcgggtgggagtcgcactacagcccgcgcggcatcaacgggccgatcgacgacttgctgtttccgatccagcacggcgtgctgtattacccggggttcgacgtgctgccgccgttcgtgatctatcagacgggcaagatgaacgccgcgcgcttcgacaaaacctgtacggcgctcggccagcgtctcgacgctctgtggaccacgccgccgattccgtttcgccggcagaacgcgggcgattacgagattccggcgctgacgttgaaggaggacatcgcgccggggaaggtggggttcgccgcacacgtgaccgcctga

SEQ ID NO: 143675 - protein, 259 aa, Burkholderia cenocepacia J2315
MNVLIVYAHPEPRSLNGALRDFAVAHLEAAGHAVQVSDLYAMNWKAVLDANDVTDRAPDARFDPSLDSRRAFAAGTQSDDIAREQDKLKWADAAILQFPLWWFSMPAIMKGWFERVYAYGFAYGVGEHSDTHWGDRYGEGSLAGKRAMIVVTTGGWESHYSPRGINGPIDDLLFPIQHGVLYYPGFDVLPPFVIYQTGKMNAARFDKTCTALGQRLDALWTTPPIPFRRQNAGDYEIPALTLKEDIAPGKVGFAAHVTA

SEQ ID NO: 143676 - DNA, 783 bp, Klebsiella pneumoniae 342
  CDS (1)..(783): transl_table=11
atgaaagtactgctgatttacgcccatccggaaccgcgctcgcttaatggcgcgctgaaaaattttgccgtccgccatctgcagcaggccgggcatgaagtgcaagtctccgatctctacgccatgcgctggaaggcagggtatgacgccgatgacagcggcgccccgccggtcggcgagttctggcggccgaccctcgattccaaacaggcctttgcccagggcacccaaagtgcggatatcgcagccgagcaggaaaagctgctgtgggccgatacggtgattttccagttcccgctgtggtggttctcaatgcccgccatcatgaagggctggatcgaccgggtgtacgcctggggctttgcctatggcgtcggcgagcacagcgaccgccactggggcgatcgctatggggaaggcaccttcgtcggcaagcgggcgatgctgatcgtcaccgccggcggctgggcggaacactattcaccgcgcgggatcaatggccccatcgacgacatcctgttccccattcagcacggtatgctgttctatcccggctttgaggtgcttccgccgctggtgttctaccgcacggataaaaccgatgccgggcaattcgccgaccagtgcgccacgctggccgagcggctggacacgctgtggcaaaccgagcccattccattccgccggcagaatcatggcgattatctgatcccgtcgctgacgctgcgcccggagctggcgccggggcaaagcggcctggcggtgcatctggcaacgaaataa

SEQ ID NO: 143677 - protein, 260 aa, Klebsiella pneumoniae 342
MKVLLIYAHPEPRSLNGALKNFAVRHLQQAGHEVQVSDLYAMRWKAGYDADDSGAPPVGEFWRPTLDSKQAFAQGTQSADIAAEQEKLLWADTVIFQFPLWWFSMPAIMKGWIDRVYAWGFAYGVGEHSDRHWGDRYGEGTFVGKRAMLIVTAGGWAEHYSPRGINGPIDDILFPIQHGMLFYPGFEVLPPLVFYRTDKTDAGQFADQCATLAERLDTLWQTEPIPFRRQNHGDYLIPSLTLRPELAPGQSGLAVHLATK

SEQ ID NO: 143678 - DNA, 792 bp, Gluconacetobacter diazotrophicus PAl 5
  CDS (1)..(792): transl_table=11
atgaatgttctgatcgtcttcgcccatccggaaagacactcgctcaacggcgccctgcttgacgtcgccgtctctgaactgacggcccagggacatgacgttcaggtgtcggacctgtatgccatgcactggaaggctgcagtcgataaggatgactttcctgccctgtcgtccgacgaaccgctgaaggtctggaaagcgtccaatgacgggttcgcggcgaacgcgctcacggaggatgtgaaggccgagcaggagaagctgctctgggccgatacagtcattctgcagttcccgttgtggtggttcgccatgccagccatcctcaagggctgggttgaccgggtctatgcctccggcttcgcctatggggtgggcgaacacagcgagcagcgctggggcgaccggtatggcgaaggggtcatggaaggcaagcgcgcaatgctgatggtcaccgcaggcgggtggcccgaacattattcggaccgcgggatcaacggcccgatcgacgatctgctgttcccgatcaatcatgggatccttttctatcccggcttcaccgttctgccgcccttcgtggcctatcgtgtcgatcggatggacaagccgaaattcacgcttctcgcggaacaattgcgcgagcggatgaagaccctggaaacgatcgcgccgattccttatcgcaagcagaattacggcgactatcagatcccgaccatggaactgctgcccggactggcgccgccgggtacgcgcggcttcgaggtgcatctggcccctgagcgcgactga

SEQ ID NO: 143679 - protein, 263 aa, Gluconacetobacter diazotrophicus PAl 5
MNVLIVFAHPERHSLNGALLDVAVSELTAQGHDVQVSDLYAMHWKAAVDKDDFPALSSDEPLKVWKASNDGFAANALTEDVKAEQEKLLWADTVILQFPLWWFAMPAILKGWVDRVYASGFAYGVGEHSEQRWGDRYGEGVMEGKRAMLMVTAGGWPEHYSDRGINGPIDDLLFPINHGILFYPGFTVLPPFVAYRVDRMDKPKFTLLAEQLRERMKTLETIAPIPYRKQNYGDYQIPTMELLPGLAPPGTRGFEVHLAPERD

SEQ ID NO: 143680 - DNA, 822 bp, Rhodobacter sphaeroides KD131
  CDS (1)..(822): transl_table=11
atgaatgtgctcatcgtccatgcccatcccgaaccccggtcgctcggcgcggccctgcgcgatgtggccattgcggaactgacggccggggggcatgcggtcgagctgtcggacctgcatgccatgggctggaaggccgtggtggatcgcgccgactttcccgcgctcgaccccggcgcgcggctgcgggtcccctcggcctcggggcaggcgatggcgaccgccacgctgacggaagatgtggcggccgagcaggagaagctgcgccgggccgacctgctgatccttcagtttccgctctggtggttcaccatgcccgcgatcctgaaagggtgggtcgaccgcgtctatgcccatggcttcgcctatggcgtgggcgagcacagcgaccgccgctggggcgaccgctatggcgagggcactttcgccggcaagcgggccatgctgatcgtgacggccggaggatgggagacgcactactcggcgcgcggcatcaacggcccgatcgaggatctgctgttcccgatccatcacggcatcctgcactatccgggatacgatgtgctgcctcccttcctcgtctatcgcgcggatcggctggatcaggccggtttccaggaagtggccgagcgcctgcgccagcggatgcgtatgctcgacagcctccggccgatccccttccgtcgtcagaacggtggggactacctgatctcggagcttacgctccgcgccgagctcgcggcaccgggcgcgagcggcttcgccctgcacctcacggccgaagacggtggagatcccagagatcccgatccaacgcggtga

SEQ ID NO: 143681 - protein, 273 aa, Rhodobacter sphaeroides KD131
MNVLIVHAHPEPRSLGAALRDVAIAELTAGGHAVELSDLHAMGWKAVVDRADFPALDPGARLRVPSASGQAMATATLTEDVAAEQEKLRRADLLILQFPLWWFTMPAILKGWVDRVYAHGFAYGVGEHSDRRWGDRYGEGTFAGKRAMLIVTAGGWETHYSARGINGPIEDLLFPIHHGILHYPGYDVLPPFLVYRADRLDQAGFQEVAERLRQRMRMLDSLRPIPFRRQNGGDYLISELTLRAELAAPGASGFALHLTAEDGGDPRDPDPTR

SEQ ID NO: 143682 - DNA, 798 bp, Agrobacterium radiobacter K84
  CDS (1)..(798): transl_table=11
atgaaaattctgcttgtctttgcccatcccgaacctcgctcgctcaacggcgcgctgcgcgacgtcgccatcaaggagctggaagcccagggccatgaggtacgggtgtcagacctctatgccgacggctggaaatccgagattgaccgcgccgacttcccctcgttggcgccggatgcacgtcttatagcggtcgctgcctccaagaatgcctttgatgccgacacgttgaccgacgatgtcaaagccgagattgagaagcttctgtgggcggatacactgatcctgcaattccctctctggtggttctccatgccggccattctgaagggctgggtcgagcgggtctttgcttatggtttcgcctatggcgtcggcgaacatagcgataagcgatggggggatcgttacggggagggcaccctggcgggcaagcgcgcgatgctgatcgtcaccgccggcggctgggaggcgcattactcgccgcgcggggtcaacggaccaatcgacgacctgcttttcccgatcaatcacggcatcctctattatcccggctatgacgtgctgccgcccttcgtgacctacagcgtcgatcgtctcgatgaagccggcttcgggtccgttgccgaaggcctgcgcgagcggatgcggacgctcggctccacgccgcccatcccctatcggcaacagaatggcggcgattatctgatcccgagcatgcagctccgcccggagctgggcgagaccgctgcgaccggctttgtcctgcatttgaaggatgagacgatggctgattag

SEQ ID NO: 143683 - protein, 265 aa, Agrobacterium radiobacter K84
MKILLVFAHPEPRSLNGALRDVAIKELEAQGHEVRVSDLYADGWKSEIDRADFPSLAPDARLIAVAASKNAFDADTLTDDVKAEIEKLLWADTLILQFPLWWFSMPAILKGWVERVFAYGFAYGVGEHSDKRWGDRYGEGTLAGKRAMLIVTAGGWEAHYSPRGVNGPIDDLLFPINHGILYYPGYDVLPPFVTYSVDRLDEAGFGSVAEGLRERMRTLGSTPPIPYRQQNGGDYLIPSMQLRPELGETAATGFVLHLKDETMAD

SEQ ID NO: 143684 - DNA, 777 bp, Burkholderia mallei ATCC 23344
  CDS (1)..(777): transl_table=11
atgaacgtcttgctggtctatgcccatcccgagccgaaatcgctgaacggctcgctgaagaatttcgcgctccggcatctcgaggaagccgggcacgcggtgcaggtttccgatctgtacgcgatgcaatggaaagcggcgctcgacgccgacgacaataccgcacgccggcccgatacgcgcttcgatccgtcgctcgattcgaagcatgcgttcgagaacggcacgcaggcggccgacatcgcacgcgagcaggacaagctgcgctgggccgacgcgctcgtcctgcagtttccgctgtggtggttctcgatgccggcgatcctgaagggctgggtcgagcgcgtgtacgcgttcggcttcgcgtacggcgtcggcgagcattcggatacgcactggggcgatcgctacggcgagggctcgatgaaaggcaagcgcgcgatgctgatcgtgacgacgggcgggtgggcatcgcattacggcccgcggggcatcaacgggccgatcgacgacctgctgtacccgattcatcacggcatcctgtattaccccggcttcgacgtgctgccgccgtttctcgtgcatcggacgaaccgcatcgacgagacgcgcttcgcgacgatccgcgatgcgctcgggcagcgcctcgacacgctgtggacgaccgcgccgatcgccttccgtgcgcagaatgccggcgattacgagattccacagctcacgctgcgggccgacatcgcgccgggaaggtcggggttcgccgcgcatatcgcgtga

SEQ ID NO: 143685 - protein, 258 aa, Burkholderia mallei ATCC 23344
MNVLLVYAHPEPKSLNGSLKNFALRHLEEAGHAVQVSDLYAMQWKAALDADDNTARRPDTRFDPSLDSKHAFENGTQAADIAREQDKLRWADALVLQFPLWWFSMPAILKGWVERVYAFGFAYGVGEHSDTHWGDRYGEGSMKGKRAMLIVTTGGWASHYGPRGINGPIDDLLYPIHHGILYYPGFDVLPPFLVHRTNRIDETRFATIRDALGQRLDTLWTTAPIAFRAQNAGDYEIPQLTLRADIAPGRSGFAAHIA

SEQ ID NO: 143686 - DNA, 801 bp, Pseudomonas syringae pv. syringae B728a
  CDS (1)..(801): transl_table=11
atgaacgtacttattgtctacgcccaccccgaaccgcgctcgctgaacgggtcgttgaaagacttcgccgtcgatcatctgcagaacaacggccatcaggtgcaggtgtccgacctttaccagatgggctggaagccgatcatcgacgccaacgatgcacccggtctcgagagcagcagccgctttgaccctgcccttgagtcgcaacgcgtatttgccgccggtattcagccgccggacatcgaggccgaacaggccagattgctctgggcagacgccgtcatatttcagtttccgctctggtggttttcgatgcccgcgatcatgaaaggctggatagagcgggtgtacgcctgtggtttcgcctacggcgtgggcgagcacagcgaccagcactggggtgatcgctacggtgaaggaacgctggcaggcaagcgcgccatgctgacggtgaccatgggcggctgggattcccattacagcgagcgtggcgtaaacggggcgctgaacgacgtgctttttcctatccagcacggcatcctgttctatccaggtttcgatgtgctcgcgcccttccccgtgtaccgggcaggcaaggtggacagcgcaacctttgcgcggatttgcgccgactacggcaaccgcctggataccctgttcacccttgagcccttgccatttcgcagacagaacgacggtgactacgagatcccggcactgaccttgcgtcctgagcttgcagcgggtcggcagggactgggcattcaccttcgtgatgaggatgggcctgcggatctttag

SEQ ID NO: 143687 - protein, 266 aa, Pseudomonas syringae pv. syringae B728a
MNVLIVYAHPEPRSLNGSLKDFAVDHLQNNGHQVQVSDLYQMGWKPIIDANDAPGLESSSRFDPALESQRVFAAGIQPPDIEAEQARLLWADAVIFQFPLWWFSMPAIMKGWIERVYACGFAYGVGEHSDQHWGDRYGEGTLAGKRAMLTVTMGGWDSHYSERGVNGALNDVLFPIQHGILFYPGFDVLAPFPVYRAGKVDSATFARICADYGNRLDTLFTLEPLPFRRQNDGDYEIPALTLRPELAAGRQGLGIHLRDEDGPADL

SEQ ID NO: 143688 - DNA, 699 bp, Pseudomonas fluorescens Pf-5
  CDS (1)..(699): transl_table=11
atgttgatcgtccacgcccaccccgaaccgcagtccttcaccgccgccttgcgtgaccaggcccgcagcaccctggaggcccaggggcaccaggtacaggtcagcgacctgtacgcgatgaactggaacccggtggccagcgccgcggattttgcctcccgggacaacccggattacctggtgtatgccctggaacagcgcctgggggtgaagaaccagagcattgccgcggatatccaggccgagctggacaagctgctgtgggccgacctgttgatcctcaacttcccggtgttctggttctcggtgccggccatgctcaagggctggatcgaccgggtgctggtgtcgggggtgtgttatggcggcaagcgtttctatgaccagggcgggctggcgggcaagaaagccctggtgaccctgaccctgggcgggcgcgagcacatgttcggcgaaggcgcgattcacggcccgctgcaggacatgctgcgcccgctgctgcgcggcactttggcctatgtcggctatgacgtgctggaacccttcgtggcctggcacgtgccctacatcagccaggaggctcgcgaagccttcctgcacagctaccgccagcgcctgcagcacctggcggacgaccagcccctggtcttcccgcgcctggaccagttcgacgaagccctgtaccccttgccggtctga

SEQ ID NO: 143689 - protein, 232 aa, Pseudomonas fluorescens Pf-5
MLIVHAHPEPQSFTAALRDQARSTLEAQGHQVQVSDLYAMNWNPVASAADFASRDNPDYLVYALEQRLGVKNQSIAADIQAELDKLLWADLLILNFPVFWFSVPAMLKGWIDRVLVSGVCYGGKRFYDQGGLAGKKALVTLTLGGREHMFGEGAIHGPLQDMLRPLLRGTLAYVGYDVLEPFVAWHVPYISQEAREAFLHSYRQRLQHLADDQPLVFPRLDQFDEALYPLPV

SEQ ID NO: 143690 - DNA, 873 bp, Burkholderia pseudomallei 1710b
  CDS (1)..(873): transl_table=11
ttgcaatacctggaatattggaaatcaatttccaatatacccgagcagccgataacctgcgttcacctctccagtcaatccatcgattctcccgatatgaacgtcttgctggtctatgcccatcccgagccgaaatcgctgaacggctcgctgaagaatttcgcgctccggcatctcgaggaagccgggcacgcggtgcaggtttccgatctgtacgcgatgcaatggaaagcggcgctcgacgccgacgacaataccgcacgccggcccgatacgcgcttcgatccgtcgctcgattcgaagcatgcgttcgagaacggcacgcaggcggccgacatcgcacgcgagcaggacaagctgcgctgggccgacgcgctcgtcctgcagtttccgctgtggtggttctcgatgccggcgatcctgaagggctgggtcgagcgcgtgtacgcgttcggcttcgcgtacggcgtcggcgagcattcggatacgcactggggcgatcgctacggcgagggctcgatgaaaggcaagcgcgcgatgctgatcgtgacgacgggcgggtgggcatcgcattacggcccgcgcggcatcaacgggccgatcgacgacctgctgtacccgattcatcacggcatcctgtattaccccggcttcgacgtgctgccgccgttcctcgtgcatcggacgaaccgcatcgacgagacgcgcttcgcgacgatccgcgatgcgctcgggcagcgcctcgacacgctgtggacgaccgcgccgatcgccttccgtgcgcagaatgccggcgattacgagattccacagctcacgctgcgggccgacatcgcgccgggaaggtcggggttcgccgcgcatatcgcgtga

SEQ ID NO: 143691 - protein, 290 aa, Burkholderia pseudomallei 1710b
MQYLEYWKSISNIPEQPITCVHLSSQSIDSPDMNVLLVYAHPEPKSLNGSLKNFALRHLEEAGHAVQVSDLYAMQWKAALDADDNTARRPDTRFDPSLDSKHAFENGTQAADIAREQDKLRWADALVLQFPLWWFSMPAILKGWVERVYAFGFAYGVGEHSDTHWGDRYGEGSMKGKRAMLIVTTGGWASHYGPRGINGPIDDLLYPIHHGILYYPGFDVLPPFLVHRTNRIDETRFATIRDALGQRLDTLWTTAPIAFRAQNAGDYEIPQLTLRADIAPGRSGFAAHIA

SEQ ID NO: 143692 - DNA, 807 bp, Rhodospirillum rubrum ATCC 11170
  CDS (1)..(807): transl_table=11
atgaagattttgctggttttcgcccaccccgaaccgcgctcgctcaatggcgccttgcgcgatgtcgccgtgaccgagcttcgcgcccaaggtcacgaggtgcgggtttcagacctttacgcgatgggctggaaggcggcgatcgaccgcgacgactttccggctttgcccccaaaggcgcgtttgcaagtcgccgccgcctcgggcgaagcccttgccgcccaggccctgaccggggatgtgacggccgagcaggacaagctgctgtgggccgatctcctgatcttgcagtttcctttgtggtggtatgcgatgccagccattctcaagggctgggtcgaccgtgtctatgcctacggcttcgcctatggcgttggcgagcacagcgacaggcggtggggcgagcgtttcggcgaaggtcggcttgccgggaaacgcgccatgctgatcgtgaccaccggcggctgggaagagcattattcggcgcgcgggatcaatggcccgatcgacgacctgctgttccccatcacccatggcatccttttttatccgggctatgcggtgctgccgtccttcgtcgcctatcgggtcgatcgcctagacggccccggcttcgacgccctggccgagcgcttgcgccaacgcctgcgcggcctttccaccacgccccccatcccgttccgacggcaaaacggcggcgagtatgccatcccgagcctggaattgcgcccggacctaggcgcggcgggggcgatgggcttcgcgctgcatcaagaagacggtgatcatgttgataaagctcgataa

SEQ ID NO: 143693 - protein, 268 aa, Rhodospirillum rubrum ATCC 11170
MKILLVFAHPEPRSLNGALRDVAVTELRAQGHEVRVSDLYAMGWKAAIDRDDFPALPPKARLQVAAASGEALAAQALTGDVTAEQDKLLWADLLILQFPLWWYAMPAILKGWVDRVYAYGFAYGVGEHSDRRWGERFGEGRLAGKRAMLIVTTGGWEEHYSARGINGPIDDLLFPITHGILFYPGYAVLPSFVAYRVDRLDGPGFDALAERLRQRLRGLSTTPPIPFRRQNGGEYAIPSLELRPDLGAAGAMGFALHQEDGDHVDKAR

SEQ ID NO: 143694 - DNA, 780 bp, Frankia sp. CcI3
  CDS (1)..(780): transl_table=11
atgaagacgctgatcgtctacgcgcatccggagccgaagtcactcaacggctcgttgaaggacctcgcagtgtccaccttggcgaccgccgggcacgaggtacgggtgagcgatctgtacgcgatgaactggaaggcggtcgtggacgccgcggactacggtcccgacgcctcacgcccgctgaaggtcgctctggactcgggccgggccttcgacgccgggacgctcactccggatgtcctcgccgagcaggagaaactgtggtgggcggacacgatcatcttccagttcccgctgtggtggtacacgatgcccgcgatcctcaaaggctgggtggaccgggtgttcaccttccacttcgcgtacggcgtcggcgagcacagcgacaccaaatacggcgagcgcttcggcgaaggcaccctcgcgggaaggaaggccctgctgtcggtgaccgccggcgggcccgaggcgcactacgccgcgcgcgggatcaacggccccatcgacgatcttctgttcccgatccaccacggcatcctctactacccgggcatcgaggtactgccgccgttcgtgctgtacggcaccgaccagatgaccggcgaggactacccgaacgtcgccaaagcctgggagcagcgcctgctcaccctggagtcgaccgagccgatcgcgttccgaccacagaacttcggtgactacgagatcccctcgctgcacctgaagaagggactggagcccgcgggccgcacgggtttcgggctgcacgtgcgcagttga

SEQ ID NO: 143695 - protein, 259 aa, Frankia sp. CcI3
MKTLIVYAHPEPKSLNGSLKDLAVSTLATAGHEVRVSDLYAMNWKAVVDAADYGPDASRPLKVALDSGRAFDAGTLTPDVLAEQEKLWWADTIIFQFPLWWYTMPAILKGWVDRVFTFHFAYGVGEHSDTKYGERFGEGTLAGRKALLSVTAGGPEAHYAARGINGPIDDLLFPIHHGILYYPGIEVLPPFVLYGTDQMTGEDYPNVAKAWEQRLLTLESTEPIAFRPQNFGDYEIPSLHLKKGLEPAGRTGFGLHVRS

SEQ ID NO: 143696 - DNA, 801 bp, Rhodopseudomonas palustris HaA2
  CDS (1)..(801): transl_table=11
atgaaagttcttctggtcttcgcccatcccgaacctctttcgctgaatggcgctctgcgcgacgccgcggtcgcggagctgcagcgccagggccacgaggtgcggatctcggacctctatgcccagaactggaagcccgcgatcgaccgcgccgattttccgaacctcgcgcctgacgagcgcttgctgacgagcgcggcctccaaggcgagcttcgacgccggagagctgacgcaggatgtccgcgccgagatcgacaagctgctctgggcggatgtcctgatcctgcaattcccgctgtggtggttcagtatgccggcgatcctcaagggctgggtcgaccgcgtctacgcctgcggatttgcctatggggtcggcgagcacagcgacgagcgatggggtgaccgttacggcgaaggcaatctggccggcaagcgcgcgatgctgatcgtgaccaccggcggctgggaacagcactacggcgcccgcggcgtcaacgggccgatcgacgacctgctgtttccgatccaccacggcattctgttctacccgggctacgacgtgctgccgccgttcgtcgtgtatcaggccggccgtctcgaccaggcggggttcgaaatcaccgccgagcagctgcgcgagcggatgcgcacgctcgcgaccacgccgccgattccctaccggcgccagaacggcggcgactacctgatcccgagcatggagctgcgccccggtctgggcgcccccggcagcagcggctttgcactccacttgcgggacgagacggcggccccgctgtga

SEQ ID NO: 143697 - protein, 266 aa, Rhodopseudomonas palustris HaA2
MKVLLVFAHPEPLSLNGALRDAAVAELQRQGHEVRISDLYAQNWKPAIDRADFPNLAPDERLLTSAASKASFDAGELTQDVRAEIDKLLWADVLILQFPLWWFSMPAILKGWVDRVYACGFAYGVGEHSDERWGDRYGEGNLAGKRAMLIVTTGGWEQHYGARGVNGPIDDLLFPIHHGILFYPGYDVLPPFVVYQAGRLDQAGFEITAEQLRERMRTLATTPPIPYRRQNGGDYLIPSMELRPGLGAPGSSGFALHLRDETAAPL

SEQ ID NO: 143698 - DNA, 786 bp, Ralstonia metallidurans CH34
  CDS (1)..(786): transl_table=11
atgaacgtactgcttgtctatgctcaccccgaaccgaaatcgctgaatggctcgctcaaggacttcgccgtgcaacggctggaggcagcaggccaccaggtgcgggtctcggacctttatgccatgcaatggaaggcgccgctcgatgccggcgactcgctggcacctgcgaatggcacgccgtttcatccgtcgctcgcttcgaagcacgcattcgagaacggactgcaaagtcctgacatcgcacgcgagcaggaaaagctgaagtgggccgacgcggtaatcctgcagtttccgctctggtggttctcaatgcccgccatcctcaagggctggatcgagcgcgtctatgcctttggcttcgcctacggtgtgggcgagcattccgattcgcgctggggcaatcgatatggcgagggcacgcttgcaggcaagcgcgccatgctgatggtgacgactggggggtgggaatcccactacgatgcgcgcgggatcaacggaccgatcgaggacatcctgttcccgatccatcacggcatcctgtactacccgggattcgacgtgctgccgcccttcctggtgtttcggtcgggccggatcgacggcgatcgctatgccgcggtgaccgaagaacttggtcagcggctggacacgctgttcacgacggaacccatcgccttccggccacagaacggcggccagtacgagattccgtcactgatcctgcggtcggacatctcacccggacagaccggattcgcggcgcacgtggcgctggagaactag

SEQ ID NO: 143699 - protein, 261 aa, Ralstonia metallidurans CH34
MNVLLVYAHPEPKSLNGSLKDFAVQRLEAAGHQVRVSDLYAMQWKAPLDAGDSLAPANGTPFHPSLASKHAFENGLQSPDIAREQEKLKWADAVILQFPLWWFSMPAILKGWIERVYAFGFAYGVGEHSDSRWGNRYGEGTLAGKRAMLMVTTGGWESHYDARGINGPIEDILFPIHHGILYYPGFDVLPPFLVFRSGRIDGDRYAAVTEELGQRLDTLFTTEPIAFRPQNGGQYEIPSLILRSDISPGQTGFAAHVALEN

SEQ ID NO: 143700 - DNA, 780 bp, Pseudomonas entomophila L48
  CDS (1)..(780): transl_table=11
atgaatgtgctgatcgtccacgcccaccccgaaccccgctccctcaacggcgccctcaaggaccatgccgtgcgttatttgcaaagtcagggccacagcgtccaggtctccgacctgcacgccatgggcttcaaggccgtgctcgacgcagccgacaacaccgccatgccagcgggcgaggcgttccagccttcggagcattcgcgccaggccttcgccaatggcacacagcgcgccgacatcaccctcgaacaggaaaaactgcgttgggccgacgcgctgatcctgcagttcccgctgtggtggttcggcctgccggcgatcctcaagggctgggtcgagcgggtatacgcctacggtttcgcctatggcgtgggcgagcactccgaccagcactggggcgaccgctacggcgaaggcagcttcgccggcaagcgcgccatgctgatggtcaccaccggcggctgggcctcgcactatgcaccaagaggcatcaacggcccgctggacgacatcctcttccccatccagcacggcatcctgttctaccccggtttcgaggtgctgccgcccttcgtcatccaccgcgccggccgcgtcgatgccacggccttcgccgccgcgtgcacggcattggagcagcgcctggacggcttgtggcacgacgccccgatccccttccgccggcagaacggcggcgactacctgatcccggcgctgaccctgcgcgacgacctcgcccccggcgagcaagggctcggtatccacctgcaaagctga

SEQ ID NO: 143701 - protein, 259 aa, Pseudomonas entomophila L48
MNVLIVHAHPEPRSLNGALKDHAVRYLQSQGHSVQVSDLHAMGFKAVLDAADNTAMPAGEAFQPSEHSRQAFANGTQRADITLEQEKLRWADALILQFPLWWFGLPAILKGWVERVYAYGFAYGVGEHSDQHWGDRYGEGSFAGKRAMLMVTTGGWASHYAPRGINGPLDDILFPIQHGILFYPGFEVLPPFVIHRAGRVDATAFAAACTALEQRLDGLWHDAPIPFRRQNGGDYLIPALTLRDDLAPGEQGLGIHLQS

SEQ ID NO: 143702 - DNA, 780 bp, Burkholderia cenocepacia AU 1054
  CDS (1)..(780): transl_table=11
atgaatgtgctgatcgtgtatgcccatcccgagccgcgttcgctgaacggcgcgctgcgcgatttcgccgtcgcgcatctcgaagcggccggccacgcggtgcaggtgagcgacctgtatgcgatgaactggaaggcgacgctggatccgaacgacgtgaccgatcgtgtacccgatgcgcgattcgatccgtcgctcgattcgaagcgcgcgttcgcagcgggtacgcaaagcgaagacatcgcacgcgagcaggacaagctgaagtgggccgacgcggtgatcctgcagtttccgctgtggtggttctcgatgccggcgatcatgaagggctggttcgagcgcgtatatgcgtacggtttcgcgtacggcgtcggcgaacattccgatacgcactggggcgaccgctacggcgaagggatgttggcaggcaagcgggcgatgatcgtcgtcacgacgggcgggtgggaatcgcactacagccggcgcggcatcaacgggccgatcgacgacttgctgttcccgatccagcacggcgtgctgtattacccggggttcgacgtgctgccgccgttcgtgatctaccggacgggcaagatgaacgccgcgcgtttcgaccagacgtgtacggcgctcggccagcgtctgaacgatctgtggaccacaccgccgattccgttccgccggcagaacgcgggcgattacgagattccggcgctgacgctgaaggaggacatcgcgccggggaaagtggggttcgccgcgcatttgaccgcctga

SEQ ID NO: 143703 - protein, 259 aa, Burkholderia cenocepacia AU 1054
MNVLIVYAHPEPRSLNGALRDFAVAHLEAAGHAVQVSDLYAMNWKATLDPNDVTDRVPDARFDPSLDSKRAFAAGTQSEDIAREQDKLKWADAVILQFPLWWFSMPAIMKGWFERVYAYGFAYGVGEHSDTHWGDRYGEGMLAGKRAMIVVTTGGWESHYSRRGINGPIDDLLFPIQHGVLYYPGFDVLPPFVIYRTGKMNAARFDQTCTALGQRLNDLWTTPPIPFRRQNAGDYEIPALTLKEDIAPGKVGFAAHLTA

SEQ ID NO: 143704 - DNA, 831 bp, Rhodococcus jostii RHA1
  CDS (1)..(831): transl_table=11
atgaagatcctgtgggtatcggcacatcccgaaccgaagtccctgaacgcagcactccgcagcgacgccctcgcggcactgcgcggggccggccacgacatccggacatcggacctgtacgcgatgcgatggaacccggtggtgacagcagacgatttcggacacaacccccaccgccgcctcctcgtcggcgcgcggtcgggtcaggccctgaccgagggcaccctggcccccgacatccgcgccgagcaacgcaaactcgcgtgggccgacgcggtggtcgtgcagttcccgttgtggtggtacggcatgcccgcgatcctcaagggctggttcgaccgggtcttcgtcgagggttacggctacggactgcgccgcgaggacggctccacccggcggtacggcgacggaaccctggccggcaagcgggcgatgacggtcgtcagtttcggcggcagcgccgacagcgcaggcccacgcgggatcaacggccagatggacgaggtcctgttcccgatccaccacggaatcttctggtacacggggatgtccgtattgccaccggtcctgatcgacagcgcggaccggttgcccgccgagcactaccccggtgtcgcggcccggctgatcgatcgcctgtccggcctgttcaccgacgcgccgttgcctttccgctcccagaacggcggcgactacgacgcccggttcgtgctgcacgaggaccgggcgcccggcgtcacgggactgcgcgcccactatgccgacgcggattccggcacatgcgaatcggaggccgaagtccgcatcaccgcgatctgcaacgtgttctaa

SEQ ID NO: 143705 - protein, 276 aa, Rhodococcus jostii RHA1
MKILWVSAHPEPKSLNAALRSDALAALRGAGHDIRTSDLYAMRWNPVVTADDFGHNPHRRLLVGARSGQALTEGTLAPDIRAEQRKLAWADAVVVQFPLWWYGMPAILKGWFDRVFVEGYGYGLRREDGSTRRYGDGTLAGKRAMTVVSFGGSADSAGPRGINGQMDEVLFPIHHGIFWYTGMSVLPPVLIDSADRLPAEHYPGVAARLIDRLSGLFTDAPLPFRSQNGGDYDARFVLHEDRAPGVTGLRAHYADADSGTCESEAEVRITAICNVF

SEQ ID NO: 143706 - DNA, 783 bp, Frankia alni ACN14a
  CDS (1)..(783): transl_table=11
atgaagaccctgatcgtctacgcccacccggagccgacgtcgctcaacggctcgctgaaggacctcgcggtgtccaccctggcgaccgacgggcacgaggtgcgggtcagcgatctgtacgcgatgaactggaaggcggtcgtggacgccgcggactacggccccgacgcctcccgcccgctgaaggtcgccctggactcgggccgggccttcgacgccgggacactcaccccggatgttctcgccgagcaggagaagctgcggtgggctgacacgatcatcttccagtttccgctgtggtggtacacgatgcccgcgatcctcaagggctgggtggaccgggtgttcacctaccacttcgcctacggcgtcggcgagcacagcgacaccaggtacggcgagcgtttcggcgagggcaccctcgcgggccgcagggccctgctgtcggtgaccgccggcggcccgcagtcgcactacgccgctcgcgggatcaacgggcccatcgacgacctgctgttcccgatccagcacggcatcctctactacccgggcatcgaggtgctgccgccgttcgtgctgtacggcaccgaccggatgaccggcgaggactacccggatgtcgccagggcctgggagcagcgcctgctcaccctggagtccaccgagccgatcgcgttccggccgcagaacttcggcgactacgacctcggctcgctgcacctgaaggaggggctggagcccgcgggtcgcacgggtttcgggctgcacgtgcgcggtcagtag

SEQ ID NO: 143707 - protein, 260 aa, Frankia alni ACN14a
MKTLIVYAHPEPTSLNGSLKDLAVSTLATDGHEVRVSDLYAMNWKAVVDAADYGPDASRPLKVALDSGRAFDAGTLTPDVLAEQEKLRWADTIIFQFPLWWYTMPAILKGWVDRVFTYHFAYGVGEHSDTRYGERFGEGTLAGRRALLSVTAGGPQSHYAARGINGPIDDLLFPIQHGILYYPGIEVLPPFVLYGTDRMTGEDYPDVARAWEQRLLTLESTEPIAFRPQNFGDYDLGSLHLKEGLEPAGRTGFGLHVRGQ

SEQ ID NO: 143708 - DNA, 777 bp, Ralstonia eutropha H16
  CDS (1)..(777): transl_table=11
atgaacgtattgcttgtgtatgcccacccggaaccgaggtcgcttaacggcgcgatccgcgactttgccgtgcagcgcttgcgcgatgccgggcaccaggtccaggtctcggacctgtatgcgatgcagtggaaggcccagctcgacggcgccgacaccaaggcgcagccgggcaacgcacccttccacccgtcactggattccaagcacgccttcgagaacgggctgcagagcgatgacattgcgcatgagcaggaaaagctgcgctgggccgacgccgtgatcctgcagttcccgctgtggtggttctcgatgccggccatcctgaagggctgggtcgagcgcgtctatgcctatggttttgcctacggcgtgggtgagcactccgacgagcgctggggcgaccgctatggcgagggcagcctcgccggcaagcgtgccatgctgattgtcacgaccggcggctgggagtcgcactacagcccgcgcgggatcaatggcccgatcgacgacatcctgttcccgatccatcacggaatcctgtactaccccgggtctgacgtgctgccgccgtacctggtgtatcggaccagcaaggttgatgaggcgcgctttgcggggattcgcgaggaattgggccagcggctggatatgctggggacgaccgcaccgatccccttccggcggcagaacgcgggggactaccggattccgcaactgacgctgcgtgaggaggttgagccgggggcagtggggttcgcggcgcatgtgcaatag

SEQ ID NO: 143709 - protein, 258 aa, Ralstonia eutropha H16
MNVLLVYAHPEPRSLNGAIRDFAVQRLRDAGHQVQVSDLYAMQWKAQLDGADTKAQPGNAPFHPSLDSKHAFENGLQSDDIAHEQEKLRWADAVILQFPLWWFSMPAILKGWVERVYAYGFAYGVGEHSDERWGDRYGEGSLAGKRAMLIVTTGGWESHYSPRGINGPIDDILFPIHHGILYYPGSDVLPPYLVYRTSKVDEARFAGIREELGQRLDMLGTTAPIPFRRQNAGDYRIPQLTLREEVEPGAVGFAAHVQ

SEQ ID NO: 143710 - DNA, 795 bp, Mycobacterium smegmatis str. MC2 155
  CDS (1)..(795): transl_table=11
atgacgctcacccatacgcccgaacccggtaccgcgctgtggctctacgcccatccactgcgcgggtctctcaacgaccatctgttccaggccggaaccgaggcgctgtccgagcagtacaccgtgttgacctccgatctgcacgcccagcggttcgacccggtcctcggtgatcgcgacttcgggggccgaacgggcagcatcgtccagatcacggccgacgcgtaccggcgcggtgagcatgccgccgatgtgcgcgaggaacaggccaagctcgcggccgccgaactgctcgtcatacagttcccgctgtggtggtacggaccgcctgccatcctcaagggatggttcgaccgggtcctcacgaacgaattcgcctacggcgatgtcgattccgtgctcgggataccccgccgctacggcgacggccaactcgcaggccgccgggcgctggtgatcgtgacagtgggtgaggacgcacgttcgctgggcacacgcgggatcagcggtgacatcgactcactgctgttccccctcacccacggaaccctgtggtacaccggcgtgggaagtttcgacctgcacgtcatctacgacgccgacagcctgggatccgaaggcctgcaacaggagaccgaacgcctgcgcgaccgtctcaaggccatcgactccgagccggccgaccggttccgccgcctggccgacggtgactaccacggcacccgcgcgctgcgcgaggacatccatccgggccgcaccgacctgggcatccacctcagcgaggcgctcggatag

SEQ ID NO: 143711 - protein, 264 aa, Mycobacterium smegmatis str. MC2 155
MTLTHTPEPGTALWLYAHPLRGSLNDHLFQAGTEALSEQYTVLTSDLHAQRFDPVLGDRDFGGRTGSIVQITADAYRRGEHAADVREEQAKLAAAELLVIQFPLWWYGPPAILKGWFDRVLTNEFAYGDVDSVLGIPRRYGDGQLAGRRALVIVTVGEDARSLGTRGISGDIDSLLFPLTHGTLWYTGVGSFDLHVIYDADSLGSEGLQQETERLRDRLKAIDSEPADRFRRLADGDYHGTRALREDIHPGRTDLGIHLSEALG

SEQ ID NO: 143712 - DNA, 777 bp, Mycobacterium smegmatis str. MC2 155
  CDS (1)..(777): transl_table=11
atgaaggtcctgtgggtgttcgcccatcccgagcaggcgtcgctcaacggttctctcatgcaggagggtctggggatcctcgaggaactcggccacgaataccaggtctcggacctgtacgcgatgaagtggaaggccgcgctggaccgagacgactacacgcgcgacaccgagggccggttctcggtgagccgggcttcgcagcaggcgttccgcacgggcacgctcagcgcggacatcgttgccgaacagcgcaagctcgaatgggccgatctgttcgtcttgcagtttccgctgtggtggtacagcgttccggcgatcctcaagggttggatcgaccgtgtcttcgtcaagggcttcgcgtacggcatcgccgaccctgagaatcccggccgcacactgcgttacggcgacggtccgctcgcgggcaagaaggcgctgacgatcctgacgtcgggcagtccacctgcggcgctgggaccacgcggtatcaacggccaactcgaccaagtgctcttcccgctgttgcacggcacgctgtggtacgtcggcatcgctcccctggcgcccatgtgcctctatggtgccgaccgtttctccgaccatgagttcgcttcggcgacagcggaactacgccgtcgggtcgaggcgatcgacgacgaggagcccatcccgttccgccgccagaacggcggggagtacgacgcggatctcgtgttacggcccgaactggcgcctggcgccacaggtatatcggtgcactatcacgaccggtga

SEQ ID NO: 143713 - protein, 258 aa, Mycobacterium smegmatis str. MC2 155
MKVLWVFAHPEQASLNGSLMQEGLGILEELGHEYQVSDLYAMKWKAALDRDDYTRDTEGRFSVSRASQQAFRTGTLSADIVAEQRKLEWADLFVLQFPLWWYSVPAILKGWIDRVFVKGFAYGIADPENPGRTLRYGDGPLAGKKALTILTSGSPPAALGPRGINGQLDQVLFPLLHGTLWYVGIAPLAPMCLYGADRFSDHEFASATAELRRRVEAIDDEEPIPFRRQNGGEYDADLVLRPELAPGATGISVHYHDR

SEQ ID NO: 143714 - DNA, 804 bp, Azoarcus sp. BH72
  CDS (1)..(804): transl_table=11
atgaatgttctgatcgtctatgcccaccctgaaccgcaatccctgaacggttcactgaaggatttttctgttcaccgcctccagcagggcggtcactcagtccaggtctcggacctctatgccatgcgatggaagccggcactggatgcgagcgacaacacggtgggtgccgccggtgcgcgcttcgaggcgtccgcggattcacggcgggcgttcgaacgcggcacgcagagcgccgatatcgcgggcgagcaggacaagctgcgttgggccgatgccgtcatcctgcaatttccgctgtggtggttctcgatgcccgcgattctcaagggctgggtcgaccgtgtgtacgcctgcggttttgcctatggcgtcggtgagcattccgacgtccgctggggacaacgctatggcgaaggcacgctggcgggaaagcgggcgatgctggtggtgacgaccggcggctgggcatcgcactacggaccgcggggcatcaacgggccgatcgacgatctgctgttccctatccagcacggcgtgctgttctatcccggtttcgatgtgctgccgccgcatgtgatccatcgcaccggcaagatcgatgacgcggcattcgaacgcgtttgcgaggcgctcggccgccgactcgataccttggcgacgactgcgccgattccgttccgtcgccagaacggcggcgactaccgcattccggagctaacgctacagccagaactcgcgccaggcgcttcgggcttcggcatccacctgtcgtccgcagaggcaggcgtgccggccgtgtag

SEQ ID NO: 143715 - protein, 267 aa, Azoarcus sp. BH72
MNVLIVYAHPEPQSLNGSLKDFSVHRLQQGGHSVQVSDLYAMRWKPALDASDNTVGAAGARFEASADSRRAFERGTQSADIAGEQDKLRWADAVILQFPLWWFSMPAILKGWVDRVYACGFAYGVGEHSDVRWGQRYGEGTLAGKRAMLVVTTGGWASHYGPRGINGPIDDLLFPIQHGVLFYPGFDVLPPHVIHRTGKIDDAAFERVCEALGRRLDTLATTAPIPFRRQNGGDYRIPELTLQPELAPGASGFGIHLSSAEAGVPAV

SEQ ID NO: 143716 - DNA, 801 bp, Azotobacter vinelandii
  CDS (1)..(801): transl_table=11
atgaacattcttcttgtccacgcccacccggagcgtacatccgtcacccatcaactcgccggaatctcgtccgaggtactcaagggccaggggcacgaggtcgtgcagtccgacctgtacgccatgggatggaaggcggtgttcgacgaacaggactttcccagccgcgccaatcgggatcgcctgtccttcatcgaggaatcaggccatgcgtttgccaacggcggccagaccgccgacgtggaggaagaacaacgcaagctgctggccgccgatgcggtgatcctgcatttcccgctgtggtggttcagcatgccggcgatcatgaagggctgggtggaccgggtatgggcctacggcctggcctatggctaccggggtgccggcaacgcccatcgctacggcgaaggcggcttcgccggcaagcgcgcgctgctcgccgtcgccgttggcgggccggagatcgactattctccgcgcggcatcaatgggccgttggagcagctgctgtttccgattacgcacggcacgctgttcttcccaggtatgcaggtgctgcccaccttcgcggtctacggggctgccggcctggacgaccgaggcatggccgaggccagcgcggcatggcgcggccggctggacaggctgttcgaggatgcacccatcgcctttcgtccccagaacggcggtgactacccggaccgccatgtgctggccgatcatgtcgcgccgggtcggacgggcttggcggcacatatcgccgaagcgggggaaagccgccgcgtccgtccgggggactga

SEQ ID NO: 143717 - protein, 266 aa, Azotobacter vinelandii
MNILLVHAHPERTSVTHQLAGISSEVLKGQGHEVVQSDLYAMGWKAVFDEQDFPSRANRDRLSFIEESGHAFANGGQTADVEEEQRKLLAADAVILHFPLWWFSMPAIMKGWVDRVWAYGLAYGYRGAGNAHRYGEGGFAGKRALLAVAVGGPEIDYSPRGINGPLEQLLFPITHGTLFFPGMQVLPTFAVYGAAGLDDRGMAEASAAWRGRLDRLFEDAPIAFRPQNGGDYPDRHVLADHVAPGRTGLAAHIAEAGESRRVRPGD

SEQ ID NO: 143718 - DNA, 840 bp, Labrenzia aggregata IAM 12614
  CDS (1)..(840): transl_table=11
atgaaaatcttgattgtttacgcgcatcccgaacctcgttcactgaacgcagcgctccgcgatgtcgcaacaaaggcgctgacagcacagggacatgatgtgcaggtgtcggacctgtatgccgagggatggaaatcacaagtcgaccgagctgattttccctctctggccacggaggaacgtctcgttgcgactgccgcatccaaaaaggattttgaagccgggaccctcaccgaggatgtcagggtcgagatcgaaaaactcctttgggccgatgcccttattcttcagtttcctctctggtggttttccatgccggcaatcttgaagggatgggtagaccgtgtgttcgcttacggtttcgcttatggcgtcggcgaacacagcgacaggcgatggggcgaccgctatggggagggtacgctggcaggcaagcgcgccatgttgatcgtgaccgctggtgggtgggaggagcactacggccctcgcggaataaacggaccgatcgacgatcttctgtttccgatcaatcacggcatcctttactatccggggtatgaagtcctgccgccatttgtaatttatcgagcggaccggttcgacgaatgcaagttcgagccggtggcagagcgcctgcgggaaagaatgcaatcgctgttttcgataccgccgatcccctaccgcccgcaaaatgccggcgattatctgatccccagcatgcagctccgttccgagcttggcgaggagaacgcgagcggcttttcgcttcatctggatcgggacaacgaaagacgctcccttgccggccccggcaggaacggaacgcaaaacagcggatga

SEQ ID NO: 143719 - protein, 279 aa, Labrenzia aggregata IAM 12614
MKILIVYAHPEPRSLNAALRDVATKALTAQGHDVQVSDLYAEGWKSQVDRADFPSLATEERLVATAASKKDFEAGTLTEDVRVEIEKLLWADALILQFPLWWFSMPAILKGWVDRVFAYGFAYGVGEHSDRRWGDRYGEGTLAGKRAMLIVTAGGWEEHYGPRGINGPIDDLLFPINHGILYYPGYEVLPPFVIYRADRFDECKFEPVAERLRERMQSLFSIPPIPYRPQNAGDYLIPSMQLRSELGEENASGFSLHLDRDNERRSLAGPGRNGTQNSG

SEQ ID NO: 143720 - DNA, 777 bp, Ralstonia pickettii 12D
  CDS (1)..(777): transl_table=11
atgaatgtcctgatcgtctacgcccatcccgaacccaagtcgctcaacggcgccctcaaggactttgccgtccagcgtctggaagccgccggccacaccgtgcaggtatcggacttgtacgccatgcaatggaaggccgcgctggatgcaagcgacagcactgttgggccggtcggtccgcatttccatccgtcgctcgattccaagcacgcgttcgagaacggcctgcaagccgatgacattgctgccgaacaagccaagctgcaatgggccgacgccgtgatcctgcagtttccgctgtggtggttttcgatgccggccatcctgaaaggctgggtcgagcgcgtctatgcatacggctttgcctatggcgttggcgagcattccgacacccactggggcgaccgctacggcgaaggcacgctcgccggcaaacgtgccatgctgatcgtcaccacgggtggctgggagtcgcactacagcccgcgcggcatcaacggcccgatcgatgacatcctgttcccgatccagcacggcatcctgtactaccccggctttgaggtcgtgccgccgttcgtgagctaccgcaccggccgcatggacgacgcgcgctttgcgcagaccacgcaggcgctgggccagcgactcgacaccttgttcaccaccgcgccgatcccgttccgcccgcagaatgcaggtgaatacgagatcccgtcgctcacgctgcgtgccgagatcgcgcctgaaaaatcgggcttcgctgcgcatctcgcctag

SEQ ID NO: 143721 - protein, 258 aa, Ralstonia pickettii 12D
MNVLIVYAHPEPKSLNGALKDFAVQRLEAAGHTVQVSDLYAMQWKAALDASDSTVGPVGPHFHPSLDSKHAFENGLQADDIAAEQAKLQWADAVILQFPLWWFSMPAILKGWVERVYAYGFAYGVGEHSDTHWGDRYGEGTLAGKRAMLIVTTGGWESHYSPRGINGPIDDILFPIQHGILYYPGFEVVPPFVSYRTGRMDDARFAQTTQALGQRLDTLFTTAPIPFRPQNAGEYEIPSLTLRAEIAPEKSGFAAHLA

SEQ ID NO: 143722 - DNA, 819 bp, Rhodopseudomonas palustris TIE-1
  CDS (1)..(819): transl_table=11
atgtcagggagcctggccgtgaaagttcttctggtattcgcccatcctgaaccgcgctcgttgaacggcgcgctccgcgacgtcgcggtcgccgagctgcagcgcctcggccacgaggtccaggtctccgatctctatgcgatgggttggaagccggcgatcgaccgcgccgatttcccgaacctggcatccgacgagcggttgctgccgaccgaggcgtcgaaggcggcgttcggcgccggagagctgacgcaggacgtccgcgacgagatcgacaagctgctttgggccgacgtcgtgatcctgcaattcccgctgtggtggttcagcatgccggcgattctgaagggctgggtcgagcgggtgttcgcctgcggcttcgcctacggggtcggcgagcacagcgacaagcggtggggcaatcgctacggcgagggcgttctggccggcaagcgcgcgatgctgatcgtgacgaccggcggctgggagcagcactacggcccccgcggcatcaacgggccgatcgacgacctgctgtttccgatccaccacggcattctgttctatccgggctgcgaggtgctgccgccttatgtgctgtatcaggccggccgtctcgatgctggcgggttcgaggccgcggccgaacggctccgggagcggatgcgcgcgctgggccagacgccgccgattccgtatcggcgccagaacggtggcaactacctgatcccgaccatggagctgcggccggagctcggcccgcccggtgccgaaggttttgcggtccacctgcgcgatggggccggctccacggcctga

SEQ ID NO: 143723 - protein, 272 aa, Rhodopseudomonas palustris TIE-1
MSGSLAVKVLLVFAHPEPRSLNGALRDVAVAELQRLGHEVQVSDLYAMGWKPAIDRADFPNLASDERLLPTEASKAAFGAGELTQDVRDEIDKLLWADVVILQFPLWWFSMPAILKGWVERVFACGFAYGVGEHSDKRWGNRYGEGVLAGKRAMLIVTTGGWEQHYGPRGINGPIDDLLFPIHHGILFYPGCEVLPPYVLYQAGRLDAGGFEAAAERLRERMRALGQTPPIPYRRQNGGNYLIPTMELRPELGPPGAEGFAVHLRDGAGSTA

SEQ ID NO: 143724 - DNA, 780 bp, Burkholderia graminis C4D1M
  CDS (1)..(780): transl_table=11
atgaaagtccttatcgtttatgcacacccagaaccgcgctccttgaatagtgcgctgcgtgatgtcgccgttcacgaactcgaggcgcaaggtcacgaggtacaagtatccgatctttacgccatgaagtggaaatccgaaataagtcggactgatttccccctgctagacgaacaaacacgattgcatgtttcgaatgcctcgaaagtgggattcaacgcgaatgcgctaacaaaagatgtccgggctgagcaggagaaacttctttgggcagacaccttgattctgcaattcccgctctggtggttcacgatgccggcgatcctcaaaggctgggtcgatcgggtgtattcctgcggctttgcacacggaatcggggatcacagcgacaaacgttggggcgatcgttatggcgaaggaagatttgagggaaagcgcgcgatgctcgttgtgaccgcaggcggctgggaagaacattattctcgacgcggcatcaatggcccgatcgacgatctgctctttccgatcaatcacggtatcctgttctaccccggctacaccgtacttccgtcgtttgtagcttacaagaccgaccgccttgacgaagccggtttcagcacgctggagacgcaactacgggaacgaatgcaaacgatcgaaacaatttccccaatcccgtatcgtcgacagaactttggtgactatcttatcccgaccatgcaactgcggcctgatctcgaatcgcccgatgccgtcggcttttctatccatcagggatag

SEQ ID NO: 143725 - protein, 259 aa, Burkholderia graminis C4D1M
MKVLIVYAHPEPRSLNSALRDVAVHELEAQGHEVQVSDLYAMKWKSEISRTDFPLLDEQTRLHVSNASKVGFNANALTKDVRAEQEKLLWADTLILQFPLWWFTMPAILKGWVDRVYSCGFAHGIGDHSDKRWGDRYGEGRFEGKRAMLVVTAGGWEEHYSRRGINGPIDDLLFPINHGILFYPGYTVLPSFVAYKTDRLDEAGFSTLETQLRERMQTIETISPIPYRRQNFGDYLIPTMQLRPDLESPDAVGFSIHQG

SEQ ID NO: 143726 - DNA, 813 bp, bacterium Ellin514
  CDS (1)..(813): transl_table=11
atgaaagtgttcatcgtatatgctcacccggaaccgaaatcgcttaatgccgagcttttgaaattttcggttcaagtgctaaaagaggatggccacgaagttcaagtttcggacctctatgcaatgaaatggaaagcagttgctgaccgtgatgattttccgtggctgagtcatgatgagcggctcgattatgcgaccgcatcaggtgaggctttcacactgaaaaagcagctgccagaaattgaagctgagcaggagaagcttctgtgggccgatttcgtcattttccaatttcctctctggtggtattcgatgcctgcaattttgaagggctgggtcgagagggtttacacttattatttcgcctacggtatcggtgagcacggtggagaaaggtggggagaccgttttggcgaaggcaccctcaaaggccgtaaagcaatgattgtaacgaccgcgggtggacgggagcctcattatcgccctcgtggcgtcaatggatacatggaggatttgctttggccgattcagcacgggattttcttttatccaggcatggattcgttgcctgctttcacgccttttgaagtgggtcatagaaccacgcctgaagaatttgagaagatcaaatttaattacagagaaagactgcttacccttgagacaactccaatcatccagtatcgctcacagaacgggggcgactatgatgggcaacaagtcttaaaacccggccgtgagggcaaaggaattacaggcttggcgattcatcaaattaatcctcgtgttaaaagctacgggggagaatcctga

SEQ ID NO: 143727 - protein, 270 aa, bacterium Ellin514
MKVFIVYAHPEPKSLNAELLKFSVQVLKEDGHEVQVSDLYAMKWKAVADRDDFPWLSHDERLDYATASGEAFTLKKQLPEIEAEQEKLLWADFVIFQFPLWWYSMPAILKGWVERVYTYYFAYGIGEHGGERWGDRFGEGTLKGRKAMIVTTAGGREPHYRPRGVNGYMEDLLWPIQHGIFFYPGMDSLPAFTPFEVGHRTTPEEFEKIKFNYRERLLTLETTPIIQYRSQNGGDYDGQQVLKPGREGKGITGLAIHQINPRVKSYGGES

SEQ ID NO: 143728 - DNA, 825 bp, Burkholderia sp. H160
  CDS (1)..(825): transl_table=11
atgaacgttcttatcgtctatgcgcatcccgaaccgaaatcgttgaacggttcgctgaaggactttacggtccggcatctcgaacgcgccggccatacggtgcaggtgtccgatctgtacgcgatgaactggaaagcgtcgctcgatgcaaacgacagcagtgagcgccacagcaaagagcgcttttttccgtcgagcgaatcgaagcatgcgttcgaaaacggcttgcagagcgacgacatcgcgcgcgagcaggacaagctgaagtgggccgatgcggtgatcctgcagtttccgctctggtggttctcgatgccagcgatcatgaagggctgggtggagcgcgtctatgcctacggtctcgcctatggggtcggcgagcattccgacgcgcgctggggcgagcgttacggcgagggccgtttcgcgggcaagcgcgcgatgctggtcgtgacgacgggcgggtgggagtcgcactacagcgcacgcggcatcaacggtccgatcgacgacgtgctgttcccgatccagcacggtgtgctgtattaccccggcttcgaggtgttgccgccgttcatcgtctatcgtacgagccgcgtcgacgaggcgaagtatgcggaggtcagcgaggcgctcgggcgacggctcgacgctctttggactactgcgccgatcgcgttccggccgcagaatggcggcgcgtatacgattccagcgctcacattgcgggacgatctcgcgccgggccgggtgggttttgccgcgcacctcgaagacgcgggcgtagaggcagcaactgaagcggatgaagcggctgaagcctga

SEQ ID NO: 143729 - protein, 274 aa, Burkholderia sp. H160
MNVLIVYAHPEPKSLNGSLKDFTVRHLERAGHTVQVSDLYAMNWKASLDANDSSERHSKERFFPSSESKHAFENGLQSDDIAREQDKLKWADAVILQFPLWWFSMPAIMKGWVERVYAYGLAYGVGEHSDARWGERYGEGRFAGKRAMLVVTTGGWESHYSARGINGPIDDVLFPIQHGVLYYPGFEVLPPFIVYRTSRVDEAKYAEVSEALGRRLDALWTTAPIAFRPQNGGAYTIPALTLRDDLAPGRVGFAAHLEDAGVEAATEADEAAEA

SEQ ID NO: 143730 - DNA, 831 bp, Janthinobacterium lividum
  CDS (1)..(831): transl_table=11
atgcagtcaaccaatagaaaaattcttatcgtccatgctcatcccgaacagacatccgtaacgtgtcaacttaccgagatagctgccgaggtactgaaggctcaaggccacgaggtaatgcaatcggacctatacgccatgggatggaaggcagcgtttgacagccaggactttcccaaacgagttaaccagaagcgcctgtctttcattgacgaatctggatatgccttttccaacggttgccagactcccgacgtcgaagaagagcagcgaaagatcctggcggcggatgcggtgatcctgctgttcccactatggtggttcagcatgcccgcaatcatgaaggggtggatagatcgcgtgtgggcctttggtttggcctacggctacaaaggggctggcaatgcctatcgctacggtgagggtggctttgccggaaagcgcgcactgctggcggtatcagttggtggacctgcggacgactattcttcccgtggcatcaatgggccgttggagcagctgctctttcctatcacacacggcactttgttctttcccggcatgcaggtgctacccacattcgcggtatatgagactgctcgaatcgatggcaacggcattgctgaagcaactatggcctggcgcatccgagtgaagcgactgttcgaggacgtaccgattgctttccgtcaacagagcagtggcgactatccagaccagcacgtgttggccgactacatcgcaccaactcagactggtttggcggctcacatcgccgcgcccgaggaactcagcgcccctgtcccaaccgccttcggagggctaaagtaa

SEQ ID NO: 143731 - protein, 276 aa, Janthinobacterium lividum
MQSTNRKILIVHAHPEQTSVTCQLTEIAAEVLKAQGHEVMQSDLYAMGWKAAFDSQDFPKRVNQKRLSFIDESGYAFSNGCQTPDVEEEQRKILAADAVILLFPLWWFSMPAIMKGWIDRVWAFGLAYGYKGAGNAYRYGEGGFAGKRALLAVSVGGPADDYSSRGINGPLEQLLFPITHGTLFFPGMQVLPTFAVYETARIDGNGIAEATMAWRIRVKRLFEDVPIAFRQQSSGDYPDQHVLADYIAPTQTGLAAHIAAPEELSAPVPTAFGGLK

SEQ ID NO: 143732 - DNA, 786 bp, Streptomyces kanamyceticus
  CDS (1)..(786): transl_table=11
atgaagattctctggatatccgcccaccccgaacagcgctccctgaacggccgcctgatgaccgagggactgcgcgtgctgaccgagctcgggcacgagcgccgcgtcagcgatctgtacgccatggactggaagccgatcgtggacgccggtgacttcgggggcgcgtcgcgcgagcggctcttcatcgggcgcgagcaggaacgcgcgtacggcagcggggagttgagcgaggacatccgcgccgagcaggagaagctcgcctgggcggacgtggtcgtcttccagttcccgctctggtggctcggaccgcccgcgatcctcaagggctggttcgaccgcgtcctggtccagggcttcggattcggcatcaaggatcccgaagggcaggcgctgcggtacggcgacgggggcctggcagggaagcgcgccctggtcgtcacgtccatcggtgcccgggagtccagcttcggcccgcgcggcatccacggaccccttgaggaggtcctgttcccgctgctgcacggcacgttctggtacaccggcatggccgcgctcccgccgttcgcggtgtacggcgccgaccggctcacggcggcgggcttctcgcgcgccacggcggacctgcgcgaacgcctgcgcaccctggacaccacggagcccctgcccttccggcacgagaacggcggggagtacgacgaggatctgacactgcggccggacgtcgcggcggggctcacgggcgtcggagtgcaccgcgcgcaggacggccgcgcacaccgctga

SEQ ID NO: 143733 - protein, 261 aa, Streptomyces kanamyceticus
MKILWISAHPEQRSLNGRLMTEGLRVLTELGHERRVSDLYAMDWKPIVDAGDFGGASRERLFIGREQERAYGSGELSEDIRAEQEKLAWADVVVFQFPLWWLGPPAILKGWFDRVLVQGFGFGIKDPEGQALRYGDGGLAGKRALVVTSIGARESSFGPRGIHGPLEEVLFPLLHGTFWYTGMAALPPFAVYGADRLTAAGFSRATADLRERLRTLDTTEPLPFRHENGGEYDEDLTLRPDVAAGLTGVGVHRAQDGRAHR

SEQ ID NO: 143734 - DNA, 22 bp, Artificial sequence
  primer
atgaatgtccttcttgtctatg

SEQ ID NO: 143735 - DNA, 22 bp, Artificial sequence
  primer
ctaatcccgttcgacgtggatg

SEQ ID NO: 143736 - protein, 258 aa, Artificial sequence
  consensus sequence
  Variant (2)..(3): Xaa in position 2 to 3 is any amino acid
  Variant (5)..(5): Xaa in position 5 is any amino acid
  Variant (7)..(7): Xaa in position 7 is any amino acid
  Variant (12)..(13): Xaa in position 12 to 13 is any amino acid
  Variant (17)..(18): Xaa in position 17 to 18 is any amino acid
  Variant (20)..(26): Xaa in position 20 to 26 is any amino acid
  Variant (28)..(30): Xaa in position 28 to 30 is any amino acid
  Variant (33)..(33): Xaa in position 33 is any amino acid
  Variant (35)..(35): Xaa in position 35 is any amino acid
  Variant (43)..(43): Xaa in position 43 is any amino acid
  Variant (46)..(48): Xaa in position 46 to 48 is any amino acid
  Variant (50)..(51): Xaa in position 50 to 51 is any amino acid
  Variant (53)..(63): Xaa in position 53 to 63 is any amino acid
  Variant (64)..(67): Xaa in position 64 to 67 is any or no amino acid
  Variant (69)..(70): Xaa in position 69 to 70 is any amino acid
  Variant (73)..(79): Xaa in position 73 to 79 is any amino acid
  Variant (81)..(83): Xaa in position 81 to 83 is any amino acid
  Variant (85)..(86): Xaa in position 85 to 86 is any amino acid
  Variant (89)..(89): Xaa in position 89 is any amino acid
  Variant (93)..(94): Xaa in position 93 to 94 is any amino acid
  Variant (96)..(96): Xaa in position 96 is any amino acid
  Variant (104)..(104): Xaa in position 104 is any amino acid
  Variant (113)..(114): Xaa in position 113 to 114 is any amino acid
  Variant (117)..(119): Xaa in position 117 to 119 is any amino acid
  Variant (121)..(121): Xaa in position 121 is any amino acid
  Variant (125)..(125): Xaa in position 125 is any amino acid
  Variant (127)..(130): Xaa in position 127 to 130 is any amino acid
  Variant (131)..(133): Xaa in position 131 to 133 is any or no amino acid
  Variant (135)..(135): Xaa in position 135 is any amino acid
  Variant (141)..(143): Xaa in position 141 to 143 is any amino acid
  Variant (148)..(148): Xaa in position 148 is any amino acid
  Variant (150)..(150): Xaa in position 150 is any amino acid
  Variant (153)..(153): Xaa in position 153 is any amino acid
  Variant (156)..(159): Xaa in position 156 to 159 is any amino acid
  Variant (161)..(162): Xaa in position 161 to 162 is any amino acid
  Variant (169)..(170): Xaa in position 169 to 170 is any amino acid
  Variant (172)..(172): Xaa in position 172 is any amino acid
  Variant (177)..(177): Xaa in position 177 is any amino acid
  Variant (180)..(180): Xaa in position 180 is any amino acid
  Variant (182)..(182): Xaa in position 182 is any amino acid
  Variant (186)..(187): Xaa in position 186 to 187 is any amino acid
  Variant (191)..(191): Xaa in position 191 is any amino acid
  Variant (193)..(214): Xaa in position 193 to 214 is any amino acid
  Variant (215)..(215): Xaa in position 215 is any or no amino acid
  Variant (217)..(219): Xaa in position 217 to 219 is any amino acid
  Variant (221)..(224): Xaa in position 221 to 224 is any amino acid
  Variant (227)..(228): Xaa in position 227 to 228 is any amino acid
  Variant (230)..(230): Xaa in position 230 is any amino acid
  Variant (233)..(233): Xaa in position 233 is any amino acid
  Variant (237)..(241): Xaa in position 237 to 241 is any amino acid
  Variant (242)..(242): Xaa in position 242 is any or no amino acid
  Variant (244)..(252): Xaa in position 244 to 252 is any amino acid
  Variant (253)..(253): Xaa in position 253 is any or no amino acid
  Variant (255)..(257): Xaa in position 255 to 257 is any amino acid
MXXLXVXAHPEXXSLNXXLXXXXXXXLXXXGHXVXVSDLYAMXWKXXXDXXDXXXXXXXXXXXXXXXSXXAFXXXXXXXDXXXEXXKLXWADXXIXQFPLWWFXMPAILKGWXXRVXXXGXAYGXGXXXXXXXGXRYGEGXXXGKRAXLXVTXGGXXXXYXXRGINGPXXDXLFPIXHGXLXYPGXXVLPXFXXXXXXXXXXXXXXXXXXXXXXXRXXXLXXXXPIXXRXQNXGDYXXXXXXLXXXXXXXXXXGXXXH

SEQ ID NO: 143737 - protein, 48 aa, Artificial sequence
  protein pattern
  Variant (2)..(4): Xaa in position 2 to 4 is any amino acid
  Variant (5)..(6): Xaa in position 5 to 6 is any or no amino acid
  Variant (8)..(9): Xaa in position 8 to 9 is any or no amino acid
  Variant (12)..(12): Xaa in position 12 is any amino acid
  Variant (16)..(16): Xaa in position 16 is any amino acid
  Variant (17)..(17): Xaa in position 17 is Phe, Ile, Leu or Val
  Variant (18)..(18): Xaa in position 18 is Ile or Val
  Variant (19)..(19): Xaa in position 19 is Phe, Leu or Val
  Variant (20)..(20): Xaa in position 20 is any amino acid
  Variant (23)..(23): Xaa in position 23 is Ile, Leu, Met or Val
  Variant (24)..(24): Xaa in position 24 is Phe or Trp
  Variant (26)..(26): Xaa in position 26 is any amino acid
  Variant (27)..(27): Xaa in position 27 is Ala, Gly, Gln, Ser or Thr
  Variant (28)..(28): Xaa in position 28 is any amino acid
  Variant (31)..(31): Xaa in position 31 is Ile or Met
  Variant (32)..(32): Xaa in position 32 is Leu or Met
  Variant (36)..(36): Xaa in position 36 is Phe, Ile or Val
  Variant (37)..(37): Xaa in position 37 is Asp or Glu
  Variant (40)..(40): Xaa in position 40 is any amino acid
  Variant (41)..(41): Xaa in position 41 is Ala, Ser, Thr or Val
  Variant (42)..(44): Xaa in position 42 to 44 is any amino acid
  Variant (45)..(45): Xaa in position 45 is Ala, Cys, Gly or Thr
  Variant (46)..(46): Xaa in position 46 is any amino acid
  Variant (48)..(48): Xaa in position 48 is Gly, Ile, Leu or Val
DXXXXXEXXKLXWADXXXXXFPXXWXXXPAXXKGWXXRVXXXXXXXGX

SEQ ID NO: 143738 - protein, 61 aa, Artificial sequence
  protein pattern
  Variant (2)..(2): Xaa in position 2 is any amino acid
  Variant (6)..(6): Xaa in position 6 is any amino acid
  Variant (7)..(7): Xaa in position 7 is Phe, Leu or Met
  Variant (8)..(8): Xaa in position 8 is any amino acid
  Variant (10)..(10): Xaa in position 10 is any or no amino acid
  Variant (12)..(12): Xaa in position 12 is any or no amino acid
  Variant (14)..(14): Xaa in position 14 is Leu or Met
  Variant (15)..(15): Xaa in position 15 is Ile or Leu
  Variant (16)..(16): Xaa in position 16 is any amino acid
  Variant (17)..(17): Xaa in position 17 is Thr or Val
  Variant (18)..(18): Xaa in position 18 is Ala, Ser or Thr
  Variant (19)..(19): Xaa in position 19 is any amino acid
  Variant (22)..(24): Xaa in position 22 to 24 is any amino acid
  Variant (25)..(25): Xaa in position 25 is Asp or His
  Variant (27)..(28): Xaa in position 27 to 28 is any amino acid
  Variant (31)..(31): Xaa in position 31 is Ile or Val
  Variant (34)..(34): Xaa in position 34 is any amino acid
  Variant (35)..(35): Xaa in position 35 is Ile, Leu or Met
  Variant (36)..(36): Xaa in position 36 is Asp, Glu or Asn
  Variant (37)..(37): Xaa in position 37 is Asp or Gln
  Variant (38)..(38): Xaa in position 38 is Ile, Leu or Val
  Variant (40)..(40): Xaa in position 40 is Phe, Trp or Tyr
  Variant (43)..(43): Xaa in position 43 is any amino acid
  Variant (46)..(46): Xaa in position 46 is any amino acid
  Variant (47)..(47): Xaa in position 47 is Phe or Leu
  Variant (48)..(49): Xaa in position 48 to 49 is Phe, His or Tyr
  Variant (52)..(52): Xaa in position 52 is any amino acid
  Variant (53)..(53): Xaa in position 53 is Ala, Asp, Glu, Gln or Thr
  Variant (54)..(54): Xaa in position 54 is Ser or Val
  Variant (55)..(55): Xaa in position 55 is Leu or Val
  Variant (56)..(56): Xaa in position 56 is Ala or Pro
  Variant (57)..(57): Xaa in position 57 is Ala, Pro, Ser or Thr
  Variant (58)..(60): Xaa in position 58 to 60 is any amino acid
  Variant (61)..(61): Xaa in position 61 is Phe, His or Tyr
RXGEGXXXGXRXAXXXXXXGGXXXXYXXRGXNGXXXXXLXPIXHGXXXXPGXXXXXXXXXX

SEQ ID NO: 143739 - protein, 22 aa, Artificial sequence
  protein pattern
  Variant (2)..(2): Xaa in position 2 is any or no amino acid
  Variant (7)..(8): Xaa in position 7 to 8 is any amino acid
  Variant (10)..(10): Xaa in position 10 is Leu or Val
  Variant (11)..(11): Xaa in position 11 is Cys, Asn or Thr
  Variant (12)..(12): Xaa in position 12 is any amino acid
  Variant (13)..(13): Xaa in position 13 is Ala, Glu, Gln or Ser
  Variant (14)..(14): Xaa in position 14 is Ile or Leu
  Variant (15)..(17): Xaa in position 15 to 17 is any amino acid
  Variant (18)..(18): Xaa in position 18 is Ala, Gly, Ser or Thr
  Variant (19)..(21): Xaa in position 19 to 21 is any amino acid
VXAHPEXXSXXXXXXXXXXXXL

SEQ ID NO: 143740 - protein, 23 aa, Artificial sequence
  protein pattern
  Variant (3)..(3): Xaa in position 3 is Ala, Asp, Glu, Gln, Ser or Thr
  Variant (5)..(5): Xaa in position 5 is any or no amino acid
  Variant (7)..(7): Xaa in position 7 is any or no amino acid
  Variant (11)..(11): Xaa in position 11 is His or Tyr
  Variant (12)..(14): Xaa in position 12 to 14 is any amino acid
  Variant (15)..(15): Xaa in position 15 is Phe or Trp
  Variant (16)..(16): Xaa in position 16 is any amino acid
  Variant (17)..(17): Xaa in position 17 is Ala, Pro or Ser
  Variant (18)..(19): Xaa in position 18 to 19 is any amino acid
  Variant (20)..(20): Xaa in position 20 is Asp, Gly or Ser
  Variant (21)..(22): Xaa in position 21 to 22 is any amino acid
GHXVXVXSDLXXXXXXXXXXXXD

SEQ ID NO: 143741 - protein, 13 aa, Artificial sequence
  protein pattern
  Variant (2)..(2): Xaa in position 2 is any or no amino acid
  Variant (5)..(5): Xaa in position 5 is any amino acid
  Variant (7)..(7): Xaa in position 7 is Asp or Glu
  Variant (9)..(12): Xaa in position 9 to 12 is any amino acid
  Variant (13)..(13): Xaa in position 13 is Leu, Met or Val
RXQNXGXYXXXXX

SEQ ID NO: 143742 - DNA, 858 bp, Escherichia coli
  CDS (1)..(858): transl_table=11
atgacacaggcagaacgccgccatgaccggctggctgtcaggctgtcactgataatcagccgtctggtggcaggggaaacgctgagtgtgcgtaagcttgccgctgagtttggtgtgtcggtgcgcacgctgcggcgtgattttcgtgagcggctgatgtatctggacctggagtatcagtccggatattgccattatcgccattgttgtcatcgtcatcattctgaacaaaaccggggtgtccgacagtctcgcggccctgacccttgccactgttgccgcactgctgacgggaggtggcgcagccggtgctgccagtgtcgcgctgacaccgttcgtcggcgtgccggtgggtattttcgtgggcatttatgtctttgccaaagtggttcgtctgatttcaggaaaaaaataatgaaacgtaaaacactgcctctgctggcgctggttgccaccactctgtttctcatcgcatgcgatgacagaagtgatgacctgaaggccatcagtaaatttaaggacctcaccccaccgcgtttcagtgatgtggtcagccaccaggatgatgtcagcgaagaatggtcacaggttgactacttatccggtcccaccttgcaggttttacgtacccgccagtcgcccgatggctgcgaggatggcagttactactacctcgtggatatgcaggaaaaaaccgtccagccactgatgaatgcgctgtgtattgccgataacatcaaactggaataccaggaggtgacggacccgtataccaaagaaaaatactttgagtacgcccatgacggcaaactgatggggcagctactgataccctcgaaccctgacaatcaggaataa

SEQ ID NO: 143743 - protein, 285 aa, Escherichia coli
MTQAERRHDRLAVRLSLIISRLVAGETLSVRKLAAEFGVSVRTLRRDFRERLMYLDLEYQSGYCHYRHCCHRHHSEQNRGVRQSRGPDPCHCCRTADGRWRSRCCQCRADTVRRRAGGYFRGHLCLCQSGSSDFRKKIMKRKTLPLLALVATTLFLIACDDRSDDLKAISKFKDLTPPRFSDVVSHQDDVSEEWSQVDYLSGPTLQVLRTRQSPDGCEDGSYYYLVDMQEKTVQPLMNALCIADNIKLEYQEVTDPYTKEKYFEYAHDGKLMGQLLIPSNPDNQE

SEQ ID NO: 143744 - DNA, 873 bp, Campylobacter jejuni subsp. jejuni NCTC 11168
  CDS (1)..(873): transl_table=11
atgaaagaatacgacaaattaagcatacgcttggtgcagattttatcaaaatttaacaatggggaaagtctaagcgcccaagagcttgcacaagagtttaatgtcgatacaagaaccatacaaagggatcttaacgaaagacttacttttatgcctattaaaaaagaaaatggaagatatgttttagaaagctttgctttgggaaaattaagctttaaagatatacagaatttcgccaccttaagtggcattgctgagctttatccaaaactcgatcaaggctttatagttgatcttttaagccatagggtaaataaagttttgatggtaaaaaatgaaggttttcaaaaggtggattatgagctttttaaagatcttagtgtggctatactcaaacacaatgtattaaattttttctataaggaaaaagaacgccaaatcaaaccttacaaactcgtaaattacaagggaatttggtatcttttaggggatgaaaacgataaattaaaacattttaatttagataaaatttcaaaacttcgcactaaaaatgaaaattttattcccaatgaaaaacttgaggaacaaatccaaaatgatcctaatatctggcttggagaaagcaaagaagtgattttaaaacttgataaaaatgctaaggaatatttttttagaaaagaaatactaagcaattatcaaatcattgataaagatgaaacaagctatactttaagcactcaagtttcctatgaagatgaaattttacatttggttaaacagtggattccttatataaaaattctagctcctatagaactgaaaatacggctagaagatattttaaaaagttatttaaacaatctatctaaataa

SEQ ID NO: 143745 - protein, 290 aa, Campylobacter jejuni subsp. jejuni NCTC 11168
MKEYDKLSIRLVQILSKFNNGESLSAQELAQEFNVDTRTIQRDLNERLTFMPIKKENGRYVLESFALGKLSFKDIQNFATLSGIAELYPKLDQGFIVDLLSHRVNKVLMVKNEGFQKVDYELFKDLSVAILKHNVLNFFYKEKERQIKPYKLVNYKGIWYLLGDENDKLKHFNLDKISKLRTKNENFIPNEKLEEQIQNDPNIWLGESKEVILKLDKNAKEYFFRKEILSNYQIIDKDETSYTLSTQVSYEDEILHLVKQWIPYIKILAPIELKIRLEDILKSYLNNLSK

SEQ ID NO: 143746 - DNA, 873 bp, Campylobacter jejuni RM1221
  CDS (1)..(873): transl_table=11
atgaaagaatacgacaaattaagcatacgcttggtgcagattttatcaaaatttaacaatggggaaagtctaagcgcccaagagcttgcacaagagtttaatgtcgatacaagaaccatacaaagggatcttaacgaaagacttacttttatgcctattaaaaaagaaaatggaagatatgttttagaaagctttgctttgggaaaattaagctttaaagacatacagaattttgccaccttaagtggtattgctgagctttatccaaaactcgatcaaggctttatagtcgatcttttaagccatagggtaaataaagttttgatggtaaaaaatgaaggttttcaaaaggtggattatgagctttttaaagatcttagtgtagctatactcaaacacaatgtattgaattttttctacaagaaaaaagaacgccaaatcaaaccttacaaactcgtaaattacaaaggaatttggtatcttttaggggatgaaaatgataaattaaaacattttaatttagataaaatttcaaaacttcgcactaaaaatgaaaattttattcccaatgaaaaacttcaagaacaaatccaaaatgatcctaatatctggcttggagaaagcaaagaagtgattttaaaacttgataaaaatgctaaggaatatttttttagaaaagaaatactaagtaattatcaaatcattgataaagatgaaacaagctatactttaagcactcaagtttcctatgaagatgaaattttacatttggttaaacagtggattccttatataaaaattctagctcctatagaactgaaaatacggctagaagatattttaaaaagttatttaaacaatctatctaaataa

SEQ ID NO: 143747 - protein, 290 aa, Campylobacter jejuni RM1221
MKEYDKLSIRLVQILSKFNNGESLSAQELAQEFNVDTRTIQRDLNERLTFMPIKKENGRYVLESFALGKLSFKDIQNFATLSGIAELYPKLDQGFIVDLLSHRVNKVLMVKNEGFQKVDYELFKDLSVAILKHNVLNFFYKKKERQIKPYKLVNYKGIWYLLGDENDKLKHFNLDKISKLRTKNENFIPNEKLQEQIQNDPNIWLGESKEVILKLDKNAKEYFFRKEILSNYQIIDKDETSYTLSTQVSYEDEILHLVKQWIPYIKILAPIELKIRLEDILKSYLNNLSK

SEQ ID NO: 143748 - DNA, 453 bp, Escherichia coli B
  CDS (1)..(453): transl_table=11
atgaatatatttactacgcgtctgacgacctctctggtggtcatcggcactctgctgctctccggctgcgacagcaaggaagatgcaggcgtgaagacgattgcccgatttaaggacctgactccgccgcccttcagcgacgtggtggcgcataaatccgatatcgagcaggaatgggtaaaaaaggatgccttcggcacaccgctatacacggtaatgaaaactcgccagtcgccggaaggctgtgagtccggcagttattactacattgctgatatgcagcagaaaacggtgcagccgctgatagccgccctgtgtctcgcggacaatattactctgagcttccggatcgagaccgacagctacacgggtgagaaatcggtggtgtattcgcacgatggcaaggaaatggggaaactcttgctgccggataaccaggagaaccatccatga

SEQ ID NO: 143749 - protein, 150 aa, Escherichia coli B
MNIFTTRLTTSLVVIGTLLLSGCDSKEDAGVKTIARFKDLTPPPFSDVVAHKSDIEQEWVKKDAFGTPLYTVMKTRQSPEGCESGSYYYIADMQQKTVQPLIAALCLADNITLSFRIETDSYTGEKSVVYSHDGKEMGKLLLPDNQENHP

SEQ ID NO: 143750 - DNA, 714 bp, Escherichia coli B; identical to SEQ ID NO: 40732
  CDS (1)..(714): transl_table=11

SEQ ID NO: 143751 - protein, 237 aa, Escherichia coli B; identical to SEQ ID NO: 40733

SEQ ID NO: 143752 - DNA, 444 bp, Escherichia coli
  CDS (1)..(444): transl_table=11
atgaaacgtaaaacactgcctctgctggcgctggttgccaccactctgtttctcatcgcatgcgatgacagaagtgatgacctgaaggccatcagtaaatttaaggacctcaccccaccgcgtttcagtgatgtggtcagccaccaggatgatgtcagcgaagaatggtcacaggttgactacttatccggtcccaccttgcaggttttacgtacccgccagtcgcccgatggctgcgaggatggcagttactactacctcgtggatatgcaggaaaaaaccgtccagccactgatgaatgcgctgtgtattgccgataacatcaaactggaataccaggaggtgacggacccgtataccaaagaaaaatactttgagtacgcccatgacggcaaactgatggggcagctactgataccctcgaaccctgacaatcaggaataa

SEQ ID NO: 143753 - protein, 147 aa, Escherichia coli
MKRKTLPLLALVATTLFLIACDDRSDDLKAISKFKDLTPPRFSDVVSHQDDVSEEWSQVDYLSGPTLQVLRTRQSPDGCEDGSYYYLVDMQEKTVQPLMNALCIADNIKLEYQEVTDPYTKEKYFEYAHDGKLMGQLLIPSNPDNQE

SEQ ID NO: 143754 - DNA, 702 bp, Escherichia coli
  CDS (1)..(702): transl_table=11
atgacacaggcagaacgccgccatgaccggctggctgtcaggctgtcactgataatcagccgtctggttgcgggtgaaacgttgagcgtgcgcaaactggcggctgagtttggcgtgtcagtgcgcacgctgcggcgtgattttcgtgaacgactgatgtatctggacctggagtatcagtccggatactgccgcttacgcactgctggcagtgagatgcagatggtgcccgacgtgcttatctttgcccaccgcagcgggctggccgggctttttcccggccttgaccgccgtctggtgaatgcactgctgatgtgcgatgagtctccctgcgtgatagcaccagccaatccggttccttcgccttcaggagcattgtctttctggagactgattcaggccattaccgggcgcaggcgggtgacgctgattgcagaggggcgacgctgtgagcgcctagctccctgccggttactcatccaccagcagacctggtatctggtggctgaacacgaagggcatatcgccgtattcacacttgatgaaatccatctgattcagcctttgcaggagacttttcgccgcaatgacagtctgtgtcgcctggttgaagacccggtcttcattcaggccttaccccattttcgctttatccagcattcactgcttacgtttgttccggccgacagcccaccggaatag

SEQ ID NO: 143755 - protein, 233 aa, Escherichia coli; identical to SEQ ID NO: 40727

SEQ ID NO: 143756 - DNA, 444 bp, Escherichia coli
  CDS (1)..(444): transl_table=11
atgaaacgtaaaacactacctctgctggcgctggttgccacctctctgtttctgagcgcctgcgatgacaggagtgatgacctcaaagctatcagtaaatttaaggacctcacgcccccgcgcttcagcgatgtggtcagccgtcaggatgatgtcagcgaagaatggtcacaggttggcttctcatccggtctcaccctgcaggtcttacgtacccgtgagtcgcccgatggttgcgagggtggcagttactactatctggtagatatggaggagaaaaccgtccagccgctgatgaatgcgctttgtattgccgacaatatcaaactggaataccacgaagttacggacccgtatacgaaagaaaaatacttcgaatattcccatgacggcaaactgatgggacggctgctgataccgtcaaaccctgataaccgggaataa

SEQ ID NO: 143757 - protein, 147 aa, Escherichia coli
MKRKTLPLLALVATSLFLSACDDRSDDLKAISKFKDLTPPRFSDVVSRQDDVSEEWSQVGFSSGLTLQVLRTRESPDGCEGGSYYYLVDMEEKTVQPLMNALCIADNIKLEYHEVTDPYTKEKYFEYSHDGKLMGRLLIPSNPDNRE

SEQ ID NO: 143758 - DNA, 20 bp, Artificial sequence
  primer
atgacacaggcagaacgccg

SEQ ID NO: 143759 - DNA, 24 bp, Artificial sequence
  primer
ttattcctgattgtcagggttcga

SEQ ID NO: 143760 - protein, 72 aa, Artificial sequence
  consensus sequence
  Variant (2)..(6): Xaa in position 2 to 6 is any amino acid
  Variant (7)..(7): Xaa in position 7 is any or no amino acid
  Variant (9)..(61): Xaa in position 9 to 61 is any amino acid
  Variant (62)..(68): Xaa in position 62 to 68 is any or no amino acid
  Variant (70)..(71): Xaa in position 70 to 71 is any amino acid
DXXXXXXLXXXXXXXXXXXXXXXXXXXXXXXXXXXXXXXXXXXXXXXXXXXXXXXXXXXXXXXXXXXXGXXY

SEQ ID NO: 143761 - DNA, 387 bp, Escherichia coli
  CDS (1)..(387): transl_table=11
atgccatctggattatttatggacttattgccttttttactggacgcgaacctcagcgcgacaaacccacccgctattccgcactggtggaagcgtcaaccgcttattcccaaccttctgtcacaggaactgaaaaactatctgaagcttaatgttaaagagaaaaatattcagattgcagaccaggtaattattgatgaaactgcaggtgaagttgttatcggcgcgaatacccgtatttgtcatggtgccgttattcagggtccggtagtgattggcgcaaactgcctgataggtaattggatttgcccctatatttccagacatctgttatcacttaacccattacaagcccgctgccgcagatattcccgtggcgagcgataa

SEQ ID NO: 143762 - protein, 128 aa, Escherichia coli
MPSGLFMDLLPFLLDANLSATNPPAIPHWWKRQPLIPNLLSQELKNYLKLNVKEKNIQIADQVIIDETAGEVVIGANTRICHGAVIQGPVVIGANCLIGNWICPYISRHLLSLNPLQARCRRYSRGER

SEQ ID NO: 143763 - DNA, 450 bp, Escherichia coli O157
  CDS (1)..(450): transl_table=11
atgacgggcggaatagcccaaaaggtaaacgatccgcatggcagtccgtcggaaagctgctgcttcatacgaccgcttaaaccgtcagttagtgtcagtatcgctgaagatcagcttcttttgctgatttactctgtttttacctgccctgatgaaatactctttaatcataacattgattatatcgaaaatatattttttgctatcattaagaatatttatatgtggaaccggagtattttggacggtagtctttccactctggtgtatctaatattctttctgctggtatctctttgccatgcagataaaattttatgtttttcattatttggctgttgtctttattacgataaatccatctggatttgcccctatatttccagacatctgttatcacttaacccattacaagcccgctgccgcagatattcccgtggcgagcgataa

SEQ ID NO: 143764 - protein, 149 aa, Escherichia coli O157
MTGGIAQKVNDPHGSPSESCCFIRPLKPSVSVSIAEDQLLLLIYSVFTCPDEILFNHNIDYIENIFFAIIKNIYMWNRSILDGSLSTLVYLIFFLLVSLCHADKILCFSLFGCCLYYDKSIWICPYISRHLLSLNPLQARCRRYSRGER

SEQ ID NO: 143765 - DNA, 699 bp, Escherichia coli
  CDS (1)..(699): transl_table=11
atggaattattgccttttttactggaaaagaacctacacgagacaaaccaacacgatatagtgcactggtggattcgtccgccacttattccttcgcagttgccaacaatactgaagacttttctcagactcaccctacaaggaaatgaaaaagcgaaattagtcaaacacatctttattgatgaaaccgaaggagaagtcgttataggtgaaagaacgcgcatatgccatggtgcagtaatcaaggggccagtagtaataggttcagattgtatagttggtaattatgcatttattcgtcaacacacagtcatcggaaataacgtcaaaataggattttcaacagaaattaaaaattcggtaatagaatcaaacgttactataggtccccagtgttttgtggcagactcggtactatgtgagagagtatatttaggagcacaagtaagaaccagtaatcatcgattggataatgatgatatatatgtcagaacagaaaaaagaagtataaatacaggacgtaaaaaattggggtgttatattggaaaaagatcaaagcttggtgtacaggttattgttcttcccggacgcaaaataaaagaagatacaattattggtcccaagatcattgttgaacgtaatttagataaagggaagtatattctaaaacaggaagttctccatgataaaggtaaatga

SEQ ID NO: 143766 - protein, 232 aa, Escherichia coli
MELLPFLLEKNLHETNQHDIVHWWIRPPLIPSQLPTILKTFLRLTLQGNEKAKLVKHIFIDETEGEVVIGERTRICHGAVIKGPVVIGSDCIVGNYAFIRQHTVIGNNVKIGFSTEIKNSVIESNVTIGPQCFVADSVLCERVYLGAQVRTSNHRLDNDDIYVRTEKRSINTGRKKLGCYIGKRSKLGVQVIVLPGRKIKEDTIIGPKIIVERNLDKGKYILKQEVLHDKGK

SEQ ID NO: 143767 - DNA, 25 bp, Artificial sequence
  primer
atgccatctggattatttatggact

SEQ ID NO: 143768 - DNA, 21 bp, Artificial sequence
  primer
ttatcgctcgccacgggaata

SEQ ID NO: 143769 - protein, 184 aa, Artificial sequence
  consensus sequence
  Variant (2)..(29): Xaa in position 2 to 29 is any amino acid
  Variant (31)..(55): Xaa in position 31 to 55 is any amino acid
  Variant (56)..(57): Xaa in position 56 to 57 is any or no amino acid
  Variant (59)..(72): Xaa in position 59 to 72 is any amino acid
  Variant (73)..(75): Xaa in position 73 to 75 is any or no amino acid
  Variant (78)..(80): Xaa in position 78 to 80 is any amino acid
  Variant (82)..(87): Xaa in position 82 to 87 is any amino acid
  Variant (89)..(97): Xaa in position 89 to 97 is any amino acid
  Variant (98)..(139): Xaa in position 98 to 139 is any or no amino acid
  Variant (141)..(143): Xaa in position 141 to 143 is any amino acid
  Variant (144)..(151): Xaa in position 144 to 151 is any or no amino acid
  Variant (153)..(153): Xaa in position 153 is any amino acid
  Variant (155)..(155): Xaa in position 155 is any amino acid
  Variant (157)..(163): Xaa in position 157 to 163 is any amino acid
  Variant (165)..(168): Xaa in position 165 to 168 is any amino acid
  Variant (170)..(170): Xaa in position 170 is any amino acid
  Variant (171)..(181): Xaa in position 171 to 181 is any or no amino acid
  Variant (183)..(183): Xaa in position 183 is any amino acid
PXXXXXXXXXXXXXXXXXXXXXXXXXXXXLXXXXXXXXXXXXXXXXXXXXXXXXXXXDXXXXXXXXXXXXXXXXXCHXXXIXXXXXXGXXXXXXXXXXXXXXXXXXXXXXXXXXXXXXXXXXXXXXXXXXXXXXXXXXXCXXXXXXXXXXXSXHXLXXXXXXXRXXXXSXXXXXXXXXXXXGXR

SEQ ID NO: 143770 - protein, 24 aa, Artificial sequence
  protein pattern
  Variant (2)..(2): Xaa in position 2 is any amino acid
  Variant (3)..(8): Xaa in position 3 to 8 is any or no amino acid
  Variant (10)..(10): Xaa in position 10 is Asn or Arg
  Variant (12)..(12): Xaa in position 12 is any amino acid
  Variant (14)..(14): Xaa in position 14 is Asp or Ser
  Variant (15)..(15): Xaa in position 15 is any amino acid
  Variant (16)..(16): Xaa in position 16 is Asp or Asn
  Variant (17)..(17): Xaa in position 17 is Asp or Pro
  Variant (18)..(18): Xaa in position 18 is Ile or Leu
  Variant (19)..(19): Xaa in position 19 is any amino acid
  Variant (20)..(20): Xaa in position 20 is Ala or Val
  Variant (22)..(22): Xaa in position 22 is Cys or Thr
  Variant (23)..(23): Xaa in position 23 is Glu or Arg
  Variant (24)..(24): Xaa in position 24 is Lys or Arg
YXXXXXXXSXHXLXXXXXXXRXXX

SEQ ID NO: 143771 - DNA, 1158 bp, Escherichia coli
  CDS (1)..(1158): transl_table=11
atgaaacgtagtctgcttttttctgccgtgctgtgtgcggcgtcattgacctccgtccatgcggcgcagccgatcactgaaccggagtttgcctctgatattgtcgatcgttatgccgatcatattttttacggcagcggtgccacggggatggctctggttgttatcgacggtaaccagcgcgtctttcgcagttatggcgaaacgcgacctggtaataacgttcgcccgcagctggattcggtcgtgcgtattgcttccctcaccaagctaatgaccagtgagatgctggtgaaattgctcgaccaggggaccgtgaagttaaacgatccgctaagtaaatatgctccgccaggcgcacgcgtgccaacctacaatgggacgcccattacgctggtcaatctggcaacccataccagcgccctgccccgtgaacagcccggtggcgcggcacatcgtccggtgtttgtctggccaacgcgcgagcaacgctggaaatacctttctacggcgaagctgaaagccgcgccaggcagtcaggcggcgtactctaaccttgcgttcgacctgctggcagatgcactggcgaatgcgtccggcaagccttatacccagttgtttgaagagcagattacccgtccattggggatgaaagacaccacctacaccccctcaccggatcagtgccgccgtttaatggttgctgagcgcggtgccagtccgtgcaataacacgctggcggcaattggcagcggcggcgtctattccacgcctggcgatatgatgcgctggatgcagcagtatttgtcatctgatttttatcagcgcagtaaccaggcagatcgcatgcagacgttgatttatcagcgcgcgcagtttacgaaagtgattggcatggatgtccccggcaaagcggatgcgcttggtttaggttgggtatatatggccccgaaagagggtcgtccggggattattcagaagacaggcggtggtggcggtttcattacctatatggcgatgatcccgcagaagaatattggcgcgtttgtggtggtcactcgttcgccgttgacgcgctttaaaaatatgagcgatggcatcaatgacctggtgaccgagctaagcgggaataaaccgttggttatccccgcgtcctaa

SEQ ID NO: 143772 - protein, 385 aa, Escherichia coli
MKRSLLFSAVLCAASLTSVHAAQPITEPEFASDIVDRYADHIFYGSGATGMALVVIDGNQRVFRSYGETRPGNNVRPQLDSVVRIASLTKLMTSEMLVKLLDQGTVKLNDPLSKYAPPGARVPTYNGTPITLVNLATHTSALPREQPGGAAHRPVFVWPTREQRWKYLSTAKLKAAPGSQAAYSNLAFDLLADALANASGKPYTQLFEEQITRPLGMKDTTYTPSPDQCRRLMVAERGASPCNNTLAAIGSGGVYSTPGDMMRWMQQYLSSDFYQRSNQADRMQTLIYQRAQFTKVIGMDVPGKADALGLGWVYMAPKEGRPGIIQKTGGGGGFITYMAMIPQKNIGAFVVVTRSPLTRFKNMSDGINDLVTELSGNKPLVIPAS

SEQ ID NO: 143773 - DNA, 1728 bp, Caulobacter crescentus CB15
  CDS (1)..(1728): transl_table=11
atgcgccgtctttttgtcgctctagccgcaaccgccctcgttggcgtagcccccttgggcgccttcgcccagacggcggcggggccggcgaagcctgccacggtttcgaccgatcggttgtcggacgcggctatccgccagatcctggcccagcgggtcgacgtcgatcatcagagccggggtatggtggtcggggtgatcgacgcccgaggccggcgcgtgatcgcccacggcctcatgggcgccggtggcaagccggtcgacggtcagaccctgttcgagatcggctcggtcaccaaggcgctgaccagcctcttgctggccgacatggtccggcgcggtgaggtcaggctggaggatccggtggctgaccatctgccgccgggaacggtcgtgccgacccggaacggcaaggccatcaccctgatcgacctcgccacccacacctcgggcctgccgcgcctgccgaccaacatggcgatgaaggatccgctcaacccctacgccgactataccgaggctcagctggatgcgttcctgcgcgactatgtcctgacccgcgacatcggcgggatctacgaatactccaaccttggggtgggattgctgggtcgggccctggcctatcgcgcgggcggcgactacgagaccgtattgcgccagcgtgtgctgacgccgctgggcatgagcgacaccgccatcgtcctgtcaccggcccaggccgcgcgcttctccagcggccataacgccgcgctggaggccacgacgcattgggacctgcccagcctggccggcgcgggcgccctgcgctcgaccgccgacgatctgctgaagctgacggctgcggagcttggccttgtcgacacgccgctgaaggccgctatggccgaccagctggttccacgtcgccccgtcggcggcggcgtggaggtcgcgctaggctggcacgtctggtcaacacccgagggcggcatcgtcacccatagcggcggcaccatgggcttccaaagcttcgtcggtttcaatcgtaagaccggactgggtgtcgtggtgctgagcaacacggccggcgtcatgggcgtggacgatatcgggctgcacctgatgaccgggcagccactgaagaccccgcccaagacgcgcgtggcggttcccctcgcccccgccgccttcgacaagctggtcggccgctacgccatggcgccgggggcggtgatgacgatccgccgcgatggtgagcgcatgctgggccagctgaccgggcagccgacggtcgagttgttcgccgaaagcccgacaaccttctttctcaaggtggtcgacgcccaactgaccttcgccgtcgacgccgaggggcgcgggacggcggtgacgctgcaccagaacggccagaacacgacggccccgcgcttggccgaaggggctgaggtgcccgcgccgccgcgcccggccaaggtggcggcactgtccgtcgccgagctggacgccctgacgggccgatacgccctggctcccggattcgtcgtcaccgtgacccgcaagggccagagcctgttcgcccagctcaccggccagccggagttcgaggtgtttcccgaaagcgcgacccgcgtcttctggaccgtcgttcccgccgccgccagttttacgctgggtccggatgggaaggccgtgagcctgaccttgcatcagggcggccgcgacatgcccgcgccgcgacagccttag

SEQ ID NO: 143774 - protein, 575 aa, Caulobacter crescentus CB15
MRRLFVALAATALVGVAPLGAFAQTAAGPAKPATVSTDRLSDAAIRQILAQRVDVDHQSRGMVVGVIDARGRRVIAHGLMGAGGKPVDGQTLFEIGSVTKALTSLLLADMVRRGEVRLEDPVADHLPPGTVVPTRNGKAITLIDLATHTSGLPRLPTNMAMKDPLNPYADYTEAQLDAFLRDYVLTRDIGGIYEYSNLGVGLLGRALAYRAGGDYETVLRQRVLTPLGMSDTAIVLSPAQAARFSSGHNAALEATTHWDLPSLAGAGALRSTADDLLKLTAAELGLVDTPLKAAMADQLVPRRPVGGGVEVALGWHVWSTPEGGIVTHSGGTMGFQSFVGFNRKTGLGVVVLSNTAGVMGVDDIGLHLMTGQPLKTPPKTRVAVPLAPAAFDKLVGRYAMAPGAVMTIRRDGERMLGQLTGQPTVELFAESPTTFFLKVVDAQLTFAVDAEGRGTAVTLHQNGQNTTAPRLAEGAEVPAPPRPAKVAALSVAELDALTGRYALAPGFVVTVTRKGQSLFAQLTGQPEFEVFPESATRVFWTVVPAAASFTLGPDGKAVSLTLHQGGRDMPAPRQP

SEQ ID NO: 143775 - DNA, 1158 bp, Salmonella enterica subsp. enterica serovar Typhi str. CT18
  CDS (1)..(1158): transl_table=11
ttgaaacgtagtctgctttttactgccatgctgtttgcggcatcacttacttctgtccaggcggctcagccgattgccgatccggtttttgcctctgatatcgttgatcgttatgccgagcatatcttttatggtagcggcgccacgggcatggcgctggtggtgatcgacggcaatcaacgcgtgtttcgtagtttcggtgacaccagaccgggcaataatgttcgtccacagcttgactcggtcattcgtatcgcttctctcaccaagctcatgaccagtgaaatgttggtaaaattgctcgatcagggaacggtaaaattaaacgatccgctcagcaaatatgcgcctcccggcgcgcatgtcccgacgtatcaaggcacgccgattacgttggtcaacttagcgacccacaccagcgcgcttccgcgagaacagcccggcggcgcggcgcatcgtccggtatttgtctggccaacccgcgaacaacgctggaactggctctccacagcaacgttaaaagtcgcgcccggttcacaggcggcctattccaatctggcgttcgacctgttagccgacgcgctggcgaccgcctccggcaaaccttatacgcaactgtttgaagaaaagattacccgcccgctgggaatgaaagacaccacgtttaccccctctcccgatcagtgtaagcgtctgatggtggcagagaaaggcgcaagcccctgtaataatacgctggctgccattggcagcggcggagtctattctacgccaggagatatgatgcgctggatgcaacagtatctgtcgtcagatttctatcaccgtagccatcaggccgatcgtatgcaaacgttgatttatcagcgcgcacagttaaagaaaatcatcgggatggacgtaccgggtaaagccgacgcgctcggtctgggctgggtctatatggcgccaaaagacggacgtcctggcattatccagaaaacgggaggcggcggcggttttattacctatatggcgatgatcccacaatataatattggcgcttttgtggtcgtaacccgttcccccctcacccgttttaccaatatgagcgacgggattaacgatttggttactgagctaagcggcaataaaccgattgctattcctgcatcctga

SEQ ID NO: 143776 - protein, 385 aa, Salmonella enterica subsp. enterica serovar Typhi str. CT18
MKRSLLFTAMLFAASLTSVQAAQPIADPVFASDIVDRYAEHIFYGSGATGMALVVIDGNQRVFRSFGDTRPGNNVRPQLDSVIRIASLTKLMTSEMLVKLLDQGTVKLNDPLSKYAPPGAHVPTYQGTPITLVNLATHTSALPREQPGGAAHRPVFVWPTREQRWNWLSTATLKVAPGSQAAYSNLAFDLLADALATASGKPYTQLFEEKITRPLGMKDTTFTPSPDQCKRLMVAEKGASPCNNTLAAIGSGGVYSTPGDMMRWMQQYLSSDFYHRSHQADRMQTLIYQRAQLKKIIGMDVPGKADALGLGWVYMAPKDGRPGIIQKTGGGGGFITYMAMIPQYNIGAFVVVTRSPLTRFTNMSDGINDLVTELSGNKPIAIPAS

SEQ ID NO: 143777 - DNA, 1131 bp, Salmonella typhimurium LT2
  CDS (1)..(1131): transl_table=11
atgctgtttgcggcatcacttacttctgtccaggcggctcagccgattgccgatccggtttttgcctctgatatcgttgatcgttatgccgagcatatcttttatggtagcggcgccacgggcatggcgctggtggtgatcgacggcaatcaacgcgtgtttcgtagtttcggtgacaccagaccgggcaataatgttcgtccacagcttgattcggtcattcgtatcgcttctctcaccaagctcatgaccagtgaaatgttggtaaaattgctcgatcagggaacggtaaaattaaacgatcctctcagcaaatatgcgcctcccggcgcgcgtgtcccgacgtatcaaggcacgccgattacgttggtcaacttagcgacccacaccagcgcgcttccgcgagaacagcccggcggcgcggcgcatcgtccggtatttgtctggccaacccgcgaacaacgctggaactggctctccacagcaacgttaaaagtcgcgcccggttcacaggcggcctattccaatctggcgttcgacctgttagccgacgcgctggcgaccgcctccggcaaaccttatacgcaactgtttgaagaaaagattacccgcccgctgggaatgaaagacaccacgtttaccccttctcccgatcagtgtaagcgtctgatggtggcagaaaaaggcgcaagcccctgtaataatacgctggcagccattggcagcggtggggtctattctacgccaggagatatgatgcgctggatgcaacagtatctgtcgtcagatttctatcaccgtagccaacaggccgatcgtatgcaaacgttgatttatcagcgcatacagttaaagaaaatcatcgggatggacgtaccgggtaaagccgacgcgctcggtctgggttgggtctatatggcgccaaaagacggacgtcctggcattatccagaaaacaggaggcggcggcggttttattacctatatggcgatgatcccgcaatataatattggcgcttttgtggtggtaacccgttcccccctcactcgttttaccaatatgagcgacgggattaacgatttggttactgagctaagcggcaataaaccgattgctattcctgcatcctga

SEQ ID NO: 143778 - protein, 376 aa, Salmonella typhimurium LT2
MLFAASLTSVQAAQPIADPVFASDIVDRYAEHIFYGSGATGMALVVIDGNQRVFRSFGDTRPGNNVRPQLDSVIRIASLTKLMTSEMLVKLLDQGTVKLNDPLSKYAPPGARVPTYQGTPITLVNLATHTSALPREQPGGAAHRPVFVWPTREQRWNWLSTATLKVAPGSQAAYSNLAFDLLADALATASGKPYTQLFEEKITRPLGMKDTTFTPSPDQCKRLMVAEKGASPCNNTLAAIGSGGVYSTPGDMMRWMQQYLSSDFYHRSQQADRMQTLIYQRIQLKKIIGMDVPGKADALGLGWVYMAPKDGRPGIIQKTGGGGGFITYMAMIPQYNIGAFVVVTRSPLTRFTNMSDGINDLVTELSGNKPIAIPAS

SEQ ID NO: 143779 - DNA, 1167 bp, Yersinia pestis KIM
  CDS (1)..(1167): transl_table=11
atggataaaagattgttgaaacgtctctctgccccgctgctggctgctgctttgtggactattccgttgcacagccatgccgatactcagccgttgacctcgcaagatactaaactgttgacctcgcaaattgttgaccaatacgccgaacatatcttctataacagtggagctgtaggaatggctctggtggttatcgataacaatcaggtcgtcaaccgtagctttggtgaaacgcaacccggcaacaatattcgcccacggccagactcactgatccgcattgcatcaataaccaagctaatgaccagcgaaatcatggtaaaactggctgatgatggcatcgttaagttaactgacccgttaaaaaaatatgcaccgaaaggggtcaacgttccctcttacagtgctaagcaacctattaggctgttgcatctggccagccataccagcggcctcccccgtgagcaacccggcggcccgcaaaaaagaccggtgtttacctggccgaccaaagataatcgctggcaatggttgaaactggccaaagtgaccgttccaccaggcgtgaaagccgcttactctaatttagcttacgacttactggctgacgcactgtcacgagctgcggggaaaccgtatgcccacttattacgtgataaaatcaccgcaccactggggatgaaaaataccaccctgaccccgacggcggagcaatgtaaacgcctgatgataggtgttggcagcagtcgttgtgggaatacagttgcagcagcaggtagtggcggcatttactcgacccccgaagatatgcagcactggatgcaacaattcttagcttctgataacagcgcccccaagcgttccgccaaacgtgagcaagcgctttacttccagcgcggtgacttggtgtcattgaaaggtatggatgtcgccggtcaagctgatgctctgggcttaggctgggtttatatggcacctaaagctgacttaccgggcattatgcaaaaaaccggcggtggcggtggatttattacttatatggcgatggtcccagaaaaaaacattggcgtttttgtggtggtcacacgaagccaactgactaaattcagcaatatgagtgatggtgtgaatcaattggttgctgagttggtgaaaaatcattga

SEQ ID NO: 143780 - protein, 388 aa, Yersinia pestis KIM
MDKRLLKRLSAPLLAAALWTIPLHSHADTQPLTSQDTKLLTSQIVDQYAEHIFYNSGAVGMALVVIDNNQVVNRSFGETQPGNNIRPRPDSLIRIASITKLMTSEIMVKLADDGIVKLTDPLKKYAPKGVNVPSYSAKQPIRLLHLASHTSGLPREQPGGPQKRPVFTWPTKDNRWQWLKLAKVTVPPGVKAAYSNLAYDLLADALSRAAGKPYAHLLRDKITAPLGMKNTTLTPTAEQCKRLMIGVGSSRCGNTVAAAGSGGIYSTPEDMQHWMQQFLASDNSAPKRSAKREQALYFQRGDLVSLKGMDVAGQADALGLGWVYMAPKADLPGIMQKTGGGGGFITYMAMVPEKNIGVFVVVTRSQLTKFSNMSDGVNQLVAELVKNH

SEQ ID NO: 143781 - DNA, 1317 bp, Chromobacterium violaceum ATCC 12472
  CDS (1)..(1317): transl_table=11
atgagaattctccccctgctaagcctcggcctgcccctgtttactaccctggcgcaggccgccgagcaaccggccgagtccccgatagaccgctacggccagcagattttcaagagcagcagggcagtcggcatgaccatggtggtgatagacaagcggcaggtccagatgcgtttctacggcgagacccgttccggcaaccgccaggctccgaacgcggactcgctggtgcgcatcgccagcatcagcaaggccatgaccggcgaagtgctgaccgcgctgacgctggacaagaaagtgaagctggacgacccgctgcagaaatacgcgccagccggcgtcaccctgccgccggcgggacagtcgatcaccctgctcaacctcgccacccataccagcggcgtgccgcgcgagatgccgggcgaaaagcccaaggacacgcccgtcttcgtctggcccaatgtccagcaacgctggagctggctgtccggcaccaagaacaagctcgcccccggccagcgcgcccagtattccaacctgggcttcgacctgctggccgatgcgctgtcccgcgccgccggcaaaccctatcccgtgctgttccgggaaaagatcaccgccccgctgggcatgaaggacaccaccttcacccccactcccgcccagtgcgcgcggctgatggaaggctacggcgccagcccctgcgtggacaccaccgcggcgataggcagcggcggcatctactccacgccgcgcgacatgcagcgctggctgcaggagctgctctacccgcagaacgaggcgaggcgccagttgcgcgaccagaccctgcgcatgcacttccagcgcgccgacctgaacagcctgcgcggcatggacgtggccggacaggccgaccagctgggcctggcctgggtaaggatggagcctggtccgaacgcgccggaaatcatccagaaaacggccggcggcggcggcttcctcggttacgcggcgctggcgccgcgcaacgacgtggcggtatgggtgggcctcacccgcagcggcggcactcactaccagagcctgagcaacggcgtcaacaagctggtggccgaactcagcggctacaagccgattgccgcgccgatgcccaagcccacgctggccaaaaccaaggccgcccgcggcaaggcggcgctcgcccaggccaagccggccgcgccgcgcgcgaaaaaggccgcgcggaaagccgccggccccaagactgccgccgcgaaagccggcgccaagaagaaagcccgcctggtcaagacctcggcacaccgggcgcagtga

SEQ ID NO: 143782 - protein, 438 aa, Chromobacterium violaceum ATCC 12472
MRILPLLSLGLPLFTTLAQAAEQPAESPIDRYGQQIFKSSRAVGMTMVVIDKRQVQMRFYGETRSGNRQAPNADSLVRIASISKAMTGEVLTALTLDKKVKLDDPLQKYAPAGVTLPPAGQSITLLNLATHTSGVPREMPGEKPKDTPVFVWPNVQQRWSWLSGTKNKLAPGQRAQYSNLGFDLLADALSRAAGKPYPVLFREKITAPLGMKDTTFTPTPAQCARLMEGYGASPCVDTTAAIGSGGIYSTPRDMQRWLQELLYPQNEARRQLRDQTLRMHFQRADLNSLRGMDVAGQADQLGLAWVRMEPGPNAPEIIQKTAGGGGFLGYAALAPRNDVAVWVGLTRSGGTHYQSLSNGVNKLVAELSGYKPIAAPMPKPTLAKTKAARGKAALAQAKPAAPRAKKAARKAAGPKTAAAKAGAKKKARLVKTSAHRAQ

SEQ ID NO: 143783 - DNA, 1218 bp, Photorhabdus luminescens subsp. laumondii TTO1
  CDS (1)..(1218): transl_table=11
atgaataaacagttttttaagatcttctccatttctgccatgatgttggctctcgcagcctgctcttcttcaaacaaaatatattcggcaaagtttctgcaaccgaagaaacaaccattgaaatgggaagtgttcgaaggaaatgcgagaactaaaaagctagcttcacagttggttgatcagtatgcacaggatattttcaacagcagtaatgcacaaggcatggcgatggtggtgattgataataatcagacggtttaccgcagtttcggtgaaacccgtccgggaaacggcatccgtccaaagcccgattcaatcatccgtattgcctcgctaactaagttgatgaccagtgagattatgatcaagctcgaagaggatgaggttctgcgttccaccgatccgttgcaagactatagttattatggcgtgaaagtgccccaatacagccctcttcaacccatccggttattccacttggcaagccataccagtggcttacctcgtgagcagccgggaggtagatgggggcgtcctgtttttgtttggcctacacaagccaatcgctggacctggttaaaaacagctcaattagactccgcaccaggcactacagcatcttattccaatctggcttacgatttattggcagatgcgctctctaaggctacgggtaagccatatacccgtttgttatacgataagatcaccggcccttattgcatgaaagacacgacactgacaccaaaccgttctcagtgtgctcgtttgatggaaagttataagccaagtccgtgtcttaacactgttgctgcggcaggcagtggtggaatctattcaacgccaaaagatatgcagcactggatgcagcaatttttatcatcagacagtcagttacgtaaacaaaccgcgagtcgcgaacaaggtatttattttaagcgttccgctctggcttcaattaaagggatggatgttgccggtcaggcagatggcgttggccttggttgggtttacatgaacgcccgcggcgatgtaccgggtatttatcagaaaaccggcggtggtggagggttcaatacgtatatggcaatgatccccgaacaaaatatcggggtgtttgtggtgatcactcgtaaacaacacagcctgttcagtagcgtaacaacgggggttaatcaactagtaactgcattgtcgaaaaatcaccatcaagcttga

SEQ ID NO: 143784 - protein, 405 aa, Photorhabdus luminescens subsp. laumondii TTO1
MNKQFFKIFSISAMMLALAACSSSNKIYSAKFLQPKKQPLKWEVFEGNARTKKLASQLVDQYAQDIFNSSNAQGMAMVVIDNNQTVYRSFGETRPGNGIRPKPDSIIRIASLTKLMTSEIMIKLEEDEVLRSTDPLQDYSYYGVKVPQYSPLQPIRLFHLASHTSGLPREQPGGRWGRPVFVWPTQANRWTWLKTAQLDSAPGTTASYSNLAYDLLADALSKATGKPYTRLLYDKITGPYCMKDTTLTPNRSQCARLMESYKPSPCLNTVAAAGSGGIYSTPKDMQHWMQQFLSSDSQLRKQTASREQGIYFKRSALASIKGMDVAGQADGVGLGWVYMNARGDVPGIYQKTGGGGGFNTYMAMIPEQNIGVFVVITRKQHSLFSSVTTGVNQLVTALSKNHHQA

SEQ ID NO: 143785 - DNA, 1449 bp, Bacillus cereus ATCC 10987
  CDS (1)..(1449): transl_table=11
atgaaaaagactattgtttttgtattaacgatatttatattattctcaggattcgcaacacaaagttatgcgttgtcagattcgaaatctgtggcaatacaagcattgctagatgatgcctgtcgtacgtcaggtgtgcctggaatgtcactctcaatacttgctgatggtgaagtgttctacttttcttctgggtatgcagatcttgaaaagggactgtctgcaagtgaaaatacactctatgagttggcctcggtgagtaaagcttttactggtatggggattttgctattggaagagcaagggctgctatcaatgactgaccctatccaaaaatatttaccttggtttacgttaaagtatcaaggcaaacctgttgatatgcaaaaccttacactaaataactttcttcaccataccagcggcctaacaaatattagacatactcaaaatattccacaaggtaatacgcctgatatgttgcaaaagactgtggaaacgctggtagatgcagaattggcgttctctcccggtgaacaatataactatggaaccgttaattatgacgtattgggtttggttattgagattgtatcacgacaaagctatgaagactttatgaaggaacaggtatttctacccttaggtcttcaccagacgtatgtttataaagaagatgcacaagccactggacagttagcacagggctaccgttcttccttttttataacaactccatttaacgctccggattatgctgggaataaacctgccggctatatcatttctaatacaaaagatatggcgcgttggatgggcatacagatgggtatcgtgcaggacatacccgaaatatttcacagggccatcgaaaaatcacataggggtgatatgtctgtttcagctgtcaatgatatgtattatgcggcaggttggtcggtaaacgccgaacaaacgtttatagaacacactgggggtaatccaaattttagtaccaaagtagccatactgccaaatgaaagaacagccatctgcttactgagcaacggcgcaaataccaatataaacctggtactacaagttaaaaatatattaaacggcaatctaactcagtcatatgagataagtggcacacagcttttggacatcattttgtcgtccaccacaattattctttgcctattagccgttctgttatttttcttaggattaagaaaagggaaaacgaatgagcagcagccaatgacaaaaaagagaacaatcgtaacaattattttcctaatcgctacgattgcccagtgtataatgttttttgccttcgattggtcaacgatacttatttggcaaacatatagtgttcttacagctttaatttcgtcaacattattaacagcaagcattacttggtttgtatatactcaccgattagatgcctcggtccgaaaataa

SEQ ID NO: 143786 - protein, 482 aa, Bacillus cereus ATCC 10987
MKKTIVFVLTIFILFSGFATQSYALSDSKSVAIQALLDDACRTSGVPGMSLSILADGEVFYFSSGYADLEKGLSASENTLYELASVSKAFTGMGILLLEEQGLLSMTDPIQKYLPWFTLKYQGKPVDMQNLTLNNFLHHTSGLTNIRHTQNIPQGNTPDMLQKTVETLVDAELAFSPGEQYNYGTVNYDVLGLVIEIVSRQSYEDFMKEQVFLPLGLHQTYVYKEDAQATGQLAQGYRSSFFITTPFNAPDYAGNKPAGYIISNTKDMARWMGIQMGIVQDIPEIFHRAIEKSHRGDMSVSAVNDMYYAAGWSVNAEQTFIEHTGGNPNFSTKVAILPNERTAICLLSNGANTNINLVLQVKNILNGNLTQSYEISGTQLLDIILSSTTIILCLLAVLLFFLGLRKGKTNEQQPMTKKRTIVTIIFLIATIAQCIMFFAFDWSTILIWQTYSVLTALISSTLLTASITWFVYTHRLDASVRK

SEQ ID NO: 143787 - DNA, 1218 bp, Bradyrhizobium sp. ORS278
  CDS (1)..(1218): transl_table=11
atggatcggctgatctcgcggcggacgctgctcagcgcgttgctcgcggcgccggttctgcccgttctggctggcgcagacgcagcatcgcatcgcgctctcgatcggcaaagtctccgcgaggtctccgcctatttcgagaacgagatcgcggccggcaacattcccggcgctgtcgtcctggtccagcagcatggcagtccggtgctgctgcagagcttcggctgtcgcgatcccgcgagccgcgctgtgatgaccgaggattcgatctttcgcatctactcgatgtcgaagccgatcacgtcggtcgcggcgatgatgctggtcgatgagggcaggctgaggaccgacgatccgctgtcggcctatatcccggcttttgcggatgtcacggtcgacggtgcgccgctggcacgtccgatcaccatcctggatctgctgcgccacacctctggcctcacctacggcttctacggcgagacggcggtccgtcggctctatgcggccgcaccgctgttcgacggcgacatcgacaacgccaccttcgtcgatcggctcgcccggctgccgctggccgagcagcccggcatgctgtgggactacggccattcgactgacgtgcttggacgggtgatcgaggtcgcgtccggccgatcgctctttcagttcgagcgcgagcggttgctcggtccgctcgggatgcgcgagacggcgttcttcctcgccgaccagagccagcgcggccgtgtcgcggagccgtcgccgcgcgactggttcgatcgtccgatcgccgggctcgacgatcccatccgtccgcggcgctgggagtccggcggcgcggggatgatcagcaccatctctgactacgcgcggttcgcgcagatgctgctgaatggcggcgcgctggacggccgccgttatctcaacgccgagaccgtggcgctgatgacgcgggatcatgtcgtggaagcggggattgcgcgtgatgacctctattttccgggcgccgagcacggcttcggcctgggtttctccgtgcgcctcgtcgacaagccgccgctgccgcgaggcgaatatggctgggacggcgtcggcgggacgttcttcttcatcgaccccgccgacgatctgttcgtcatcgtcatgatgcaggcgccctcgcagcgcgggcgcatcgcgagcgacgtgcggcggctggtgtatgaggcgcttgcgtag

SEQ ID NO: 143788 - protein, 405 aa, Bradyrhizobium sp. ORS278
MDRLISRRTLLSALLAAPVLPVLAGADAASHRALDRQSLREVSAYFENEIAAGNIPGAVVLVQQHGSPVLLQSFGCRDPASRAVMTEDSIFRIYSMSKPITSVAAMMLVDEGRLRTDDPLSAYIPAFADVTVDGAPLARPITILDLLRHTSGLTYGFYGETAVRRLYAAAPLFDGDIDNATFVDRLARLPLAEQPGMLWDYGHSTDVLGRVIEVASGRSLFQFERERLLGPLGMRETAFFLADQSQRGRVAEPSPRDWFDRPIAGLDDPIRPRRWESGGAGMISTISDYARFAQMLLNGGALDGRRYLNAETVALMTRDHVVEAGIARDDLYFPGAEHGFGLGFSVRLVDKPPLPRGEYGWDGVGGTFFFIDPADDLFVIVMMQAPSQRGRIASDVRRLVYEALA

SEQ ID NO: 143789 - DNA, 1161 bp, Klebsiella pneumoniae subsp. pneumoniae MGH 78578
  CDS (1)..(1161): transl_table=11
ttgaaacgtagtttgctcatttttgctgcgctgtgcgcggcgtcgtggacctcggtgcaggccgcacagcctaccgttgacccggttttcgcctcggatgtggtcgatcgttacgccaatcatatctactatggcagcggcgccaccggcatggcgctggtggttatcgatggcaatcagcgtgtttttcgcagctttggcgaaacccgcccggggaataatcagcacccgcagctcgactcggtgatccgtatcgcctccctcagcaaactgatgaccagcgagatgctggtgaagctgctcgaccagggggtggtgaaactcaacgatccgctgagtaaatacgccccgccgggcgcccgggtgcctgactggcagggaaaaccaatcaccctggttaacctcgcgacccataccagcgccctgccgcgcgagcagcctggcggcgccgctcatcgtccggtttttgtctggccgacccgccagcagcgctggaactggctctctaccgcgaccctgaagaccgcgccgggctcgcaggccgcctactccaatctggccttcgatttactggcggacgcgctctccaccgccgccggcaaaccgtatccgcagctgtttgaagagcagatcacccggccgctggggatgaaggacaccacctttaccccgtcaccggatcagtgccagcggctgatgatcccggaaaaaggcgccagcccgtgcaacaacaccctggcggcgatcggcagcggcggagtctactcgacgccgggggatatgatgcgctggatgcagcagttcctgtcatccgatttctatacccgcagccagcaggccgaccggatgcagacgctgatttatcagcgtaaccagctgacccgggtgattggtatggacgtgccgggccgcgcagacgcgctgggcctcggctgggtgtatatgaagccgaagaacggccatccggggattattcagaaaaccggcggcggcggcgggtttatcacctatatggcgatgaatccgcaggctaacgttggcgcctttgtggtggtaacccgctcgccgttaacccgcttcaacaatatgagcgatggcatcaacgacctggtcagcgagttgagcggcgcacagcccaacatgcagacggccagccagtaa

SEQ ID NO: 143790 - protein, 386 aa, Klebsiella pneumoniae subsp. pneumoniae MGH 78578
MKRSLLIFAALCAASWTSVQAAQPTVDPVFASDVVDRYANHIYYGSGATGMALVVIDGNQRVFRSFGETRPGNNQHPQLDSVIRIASLSKLMTSEMLVKLLDQGVVKLNDPLSKYAPPGARVPDWQGKPITLVNLATHTSALPREQPGGAAHRPVFVWPTRQQRWNWLSTATLKTAPGSQAAYSNLAFDLLADALSTAAGKPYPQLFEEQITRPLGMKDTTFTPSPDQCQRLMIPEKGASPCNNTLAAIGSGGVYSTPGDMMRWMQQFLSSDFYTRSQQADRMQTLIYQRNQLTRVIGMDVPGRADALGLGWVYMKPKNGHPGIIQKTGGGGGFITYMAMNPQANVGAFVVVTRSPLTRFNNMSDGINDLVSELSGAQPNMQTASQ

SEQ ID NO: 143791 - DNA, 1449 bp, Bacillus thuringiensis serovar konkukian str. 97-27
  CDS (1)..(1449): transl_table=11
atgaaaaagactattgtttttgtattaacgatatttatattattctcaggattcgcaacacaaagttatgcgttgtcagattcgaaatctgtggcaatacaagcattgctagatgatgcctgtcgtacgtcaggtgtgcctggaatgtcactctcaatacttgctgatggtgaagtgttctacttttcttctgggtatgcagatcttgaaaagggactgtctgcaagtgaaaatacactctatgagttggcctcgttgagtaaagcttttactggtatggggattttgctattggaagagcaagggctgctatcaatgactgaccctatccaaaaatatttaccttggtttacgttaaagtatcaaggtaaacctgttgatatgcaaaaccttacactaaataactttcttcaccataccagcggcctaacaaatattagacatactcaaaatattccacaaggtaatacgcctgatatgttgcaaaagactgtggaaacgctggtagatgcagaattggcgttctctcccggtgaacaatataactatggaaccattaattatgacgtattgggtttggttattgagattgtatcacgacaaagctatgaagactttatgaaggaacaggtatttctacccttaggtcttcaccagacgtatgtttataaagaagatgctcaagccactggacagttagcacaaggctaccgttcttccttttttataacaactccatttaacgctccggattatgctgggaataaacctgccggctatatcatttctaatacaaaagatatggcgcgttggatgggcatacagatgggtatcgtgcaggacatacccgaaatatttcacagggccatcgaaaaatcacataggggtgatatgtctgtttcggctgtcaatgatatgtattatgcggcaggttggtcggtaaacgccgaacaaacgtttatagaacacactgggggtaatccaaattttagtaccaaagtagccatactgccaaatgaaagaacagccatctgcttactgagcaacggcgcaaataccaatataaacctggtactacaagttaaaaatatattaaacggcaatctaactcagtcatatgagataagtggcacacagcttttggacatcattttgtcgtctaccacaattattctttgcctattagccgttctgttatttttcttaggattaagaaaagggaaaacgaatgagcagcagccaatgacaaaaaagagaacaatcgtaacaattattttcctaatcgctacgattgcccagtgtataatgttttttgccttcgattggtcaacgatacttatttggcaaacatatagtgttcttacagctttaatttcgtcaacattattaacagcaagcattacttggtttgtatatactcaccgattagatgcctcggtccgaaaataa

SEQ ID NO: 143792 - protein, 482 aa, Bacillus thuringiensis serovar konkukian str. 97-27
MKKTIVFVLTIFILFSGFATQSYALSDSKSVAIQALLDDACRTSGVPGMSLSILADGEVFYFSSGYADLEKGLSASENTLYELASLSKAFTGMGILLLEEQGLLSMTDPIQKYLPWFTLKYQGKPVDMQNLTLNNFLHHTSGLTNIRHTQNIPQGNTPDMLQKTVETLVDAELAFSPGEQYNYGTINYDVLGLVIEIVSRQSYEDFMKEQVFLPLGLHQTYVYKEDAQATGQLAQGYRSSFFITTPFNAPDYAGNKPAGYIISNTKDMARWMGIQMGIVQDIPEIFHRAIEKSHRGDMSVSAVNDMYYAAGWSVNAEQTFIEHTGGNPNFSTKVAILPNERTAICLLSNGANTNINLVLQVKNILNGNLTQSYEISGTQLLDIILSSTTIILCLLAVLLFFLGLRKGKTNEQQPMTKKRTIVTIIFLIATIAQCIMFFAFDWSTILIWQTYSVLTALISSTLLTASITWFVYTHRLDASVRK

SEQ ID NO: 143793 - DNA, 1428 bp, Bacillus thuringiensis serovar konkukian str. 97-27
  CDS (1)..(1428): transl_table=11
atgaaaaagattattgtttttgtattaacgatatttatattattctcaggatttgcaacacaaagttatgcgttgtcagattcgcaatctgcggcaatacaagcgttgctagatgatgcctgtcgtatatcaggtgtgccgggaatgtcaatctcaatacttgctgatgatgaagtgttctacttttcttcagggtatgcagaccgtgaaaaggggttgtctgcaagtgaaaatacactctatgagttagcctcggtcagtaaagcttttaccggtatgggtattatgctattggaagagcaagggctgctttcaatgactgaccctgtccaaaaatatttaccttggtttacattaaagtatcaagggaaacctgttgatatgcacagtcttacattaaataactttcttcaccataccagtggtctaacaaatattaggcatcttcaaaatattccacaaggtaatacaccggatatgttgcaaaagactgtggaaatgctcgtggatgctgaattggcgttccctcccggtgaacagtataactatggaaccgttaattatgacgtattgggcttggttattgagattgtgtcgcgacaaagctatgaagactttatgaaggaacaggtatttcaaccgttaggtcttcaccagacgtatgtttataaagaagctgctcaagccactggacagttggcacagggctaccgttcttccttttttatgacaactccatttaaagctccggattatgctgggaataaacccgcaggctacatcatttctaatacaaaagatatggcgcgttggatgggcatacagatggggatcgtgcaggacatacccgaaatatttcacatggttatcgaaaaatcacataggggtgatatgtctgtttcggctgtcaacggtatgtattatgcggcaggctggtccgtaaacgccgaacaaacgattatagaacacactgggggcaatccaaatttcagaaccgaagtagtcatactgccaaatgaacgaacagccgtctccttgctgagcaacggcgtaaataccaatacaaacatggtactaaaagttaaagatatattagaaggcaatctaactcagtcatatgaaataagcggcacacagcttttggatatcattttgtcgtctatcacaattattctttgcctattggccgttttgctatttctcttaggattacgcagaaggagaacgaatgagcggcagccaatgacaaaaaagagaataaccgtaacagttattttcctgaccgctacgattgccctgggtatactgtgctgtgctttcgattggtcaacaatacttatgtggcaaacatatagtgttcttacagctttgatttcgtcagcattattaacagcaagcattacatggtttgtatacactcaccgataa

SEQ ID NO: 143794 - protein, 475 aa, Bacillus thuringiensis serovar konkukian str. 97-27
MKKIIVFVLTIFILFSGFATQSYALSDSQSAAIQALLDDACRISGVPGMSISILADDEVFYFSSGYADREKGLSASENTLYELASVSKAFTGMGIMLLEEQGLLSMTDPVQKYLPWFTLKYQGKPVDMHSLTLNNFLHHTSGLTNIRHLQNIPQGNTPDMLQKTVEMLVDAELAFPPGEQYNYGTVNYDVLGLVIEIVSRQSYEDFMKEQVFQPLGLHQTYVYKEAAQATGQLAQGYRSSFFMTTPFKAPDYAGNKPAGYIISNTKDMARWMGIQMGIVQDIPEIFHMVIEKSHRGDMSVSAVNGMYYAAGWSVNAEQTIIEHTGGNPNFRTEVVILPNERTAVSLLSNGVNTNTNMVLKVKDILEGNLTQSYEISGTQLLDIILSSITIILCLLAVLLFLLGLRRRRTNERQPMTKKRITVTVIFLTATIALGILCCAFDWSTILMWQTYSVLTALISSALLTASITWFVYTHR

SEQ ID NO: 143795 - DNA, 1170 bp, Burkholderia sp. 383
  CDS (1)..(1170): transl_table=11
atgcgattcaacgcgacacgcttcgccgcgaccctgttcgtcgccgcgtgcgccaccgccacggccggccgcgcggccgccgccacccaggacgacctccacgacaccgtcacccgctacatcgcgccgctgatgaagcagtacgcgattcccggcatggcgatcggcatcgtcgccgacggcaagccctacgtgttcgactacggcgtgatgtcgacgcaaaccggcaagcccgtcaacggcgacacgctgttcgaaatcggctccgtcagcaagacgctgaccgcgacactcgcggccgacgcgcaggagggcggcgaactgtcgctggccgacccggcgggcaagtacctgcccgcggtgcagggcaagccgttcggcgtcgtgacgctgctcaatctcggcacgcacacgccgggcggcatgccgctgcaggtgccggacagcattcgcgacgacgcgggcctgatccgctatctcgatgcgtggcggcccgcgtatgcgccgggcacgtatcgcacgtattcgaacgtcgcgatcgggatgctcgggtggctcaccgcgaaggcgatgcacaaggatttcgcggtgctgatggagcagcggctctttcccgcgctcgggatgacgcgcacgtacatcaacgtgccggaagcacgccaggccgactatgcacagggctatacgcaggacggcaagccgatccggatgacgggcggcatgctgtggcagccggcgtacggcgtgcggaccacggcggccgacctgctgcgcttcgtgcaggcgaacatgggactgatcgaaaccgcaccgcgcctgcagcgcgcgctcgagcgcacgcacaccggctatttccgcgcggggccgctgacgcaggacctgatctgggagcagtatccgtatccggtcgcgctgccgacgctgatcgaaggcaactcgatgaagatgctgcgtaacggggtagtggccaccgcgatcaagccgccgctcgcgccgagcgcggatacgtggatcaacaagaccggctcgaccaacggcttcagtacctatgtcgcgttcgtccccgcgaaacggatcgcgatcgtgatgctcgcgaaccgcagctatccgaacgaggatcgcgtgaaggccgcgtacgggatcctcggggcgctcgacggccgacggtaa

SEQ ID NO: 143796 - protein, 389 aa, Burkholderia sp. 383
MRFNATRFAATLFVAACATATAGRAAAATQDDLHDTVTRYIAPLMKQYAIPGMAIGIVADGKPYVFDYGVMSTQTGKPVNGDTLFEIGSVSKTLTATLAADAQEGGELSLADPAGKYLPAVQGKPFGVVTLLNLGTHTPGGMPLQVPDSIRDDAGLIRYLDAWRPAYAPGTYRTYSNVAIGMLGWLTAKAMHKDFAVLMEQRLFPALGMTRTYINVPEARQADYAQGYTQDGKPIRMTGGMLWQPAYGVRTTAADLLRFVQANMGLIETAPRLQRALERTHTGYFRAGPLTQDLIWEQYPYPVALPTLIEGNSMKMLRNGVVATAIKPPLAPSADTWINKTGSTNGFSTYVAFVPAKRIAIVMLANRSYPNEDRVKAAYGILGALDGRR

SEQ ID NO: 143797 - DNA, 1263 bp, Hyphomonas neptunium ATCC 15444
  CDS (1)..(1263)
atggctgcaggcgggacagccctcctggcgtcctgcgcgtctctcgaaaccgccggtctggggggagcggaaacacgccgccttacgccggcccgtatcgaagcgctggacgcggctgtcacgcagcaggttggcacaggcgagatcccgggcgcgctggtggtcatcgcggaaggcggagaggtgacctattcccgctcaatggggtttgccagcctggaagatcagcggcccgtcacagaagacacgcttttccgtttttattcgatgaccaagccaatcacctgcgccacggtcatgaccctgtatgacgacggcctgatcgatctcgatacgccgatcagcaagtatcttccggaattttcagaaatgtccgtgcggaccgaggcgggcattgtgccggcaacgcgcccgatcaccatccgtcatctgatgacccatacatccggcctgacttacgccatactgccagggccggttcaggccgattatgctgccgcagacgtttttgccattgaaaaccggacttcagaaacgctcgaagcgcacgtcaggcgccttgccaggctgccccttgtcgcagaacccggaaccgtctggaactatggggaatccatgggtgtcctcggccgcctggtggaagttgtgtcgggaaaatccttcggggcgtatatgcgggagcggatcctcgccccgctttccatggatgatacgggcttctatgtcccgcccgagaagcgcgaacgcctcgccgagctttaccatctgagccaggatcgcaccctcagcaatgcgcaggaccaggcggtgtatggtggcagctacctggagaaaccccttctcgaatatggcggcgccgggctcgtcgggacagcttccgattacatgaactttgcgcagatgctgctcgcggcaggccgctttggggatgcgcaggttctcagcagcgaggctgtcacgatgatgacctccaaccagctggatgcctcattcggggacgcgccgctcgcggcttcgggccggggagaaggtacgggatttggcctgtgcggttatgttaatacggcccggccgccgggcgcggcgccgggcgcgatcggcgagtatggctggagtgggtgggccagtacagcgttctggattgatccgcagaatgatcttgccggtctcgtctttacccaggtgatcccggatgacatcggatcggttgccctcagcagcagtgtgcgagaggcggtttataatcctgtcaaaggcgaatga

SEQ ID NO: 143798 - protein, 420 aa, Hyphomonas neptunium ATCC 15444
MAAGGTALLASCASLETAGLGGAETRRLTPARIEALDAAVTQQVGTGEIPGALVVIAEGGEVTYSRSMGFASLEDQRPVTEDTLFRFYSMTKPITCATVMTLYDDGLIDLDTPISKYLPEFSEMSVRTEAGIVPATRPITIRHLMTHTSGLTYAILPGPVQADYAAADVFAIENRTSETLEAHVRRLARLPLVAEPGTVWNYGESMGVLGRLVEVVSGKSFGAYMRERILAPLSMDDTGFYVPPEKRERLAELYHLSQDRTLSNAQDQAVYGGSYLEKPLLEYGGAGLVGTASDYMNFAQMLLAAGRFGDAQVLSSEAVTMMTSNQLDASFGDAPLAASGRGEGTGFGLCGYVNTARPPGAAPGAIGEYGWSGWASTAFWIDPQNDLAGLVFTQVIPDDIGSVALSSSVREAVYNPVKGE

SEQ ID NO: 143799 - DNA, 1371 bp, Solibacter usitatus Ellin6076
  CDS (1)..(1371): transl_table=11
ttgaatccgaatatattcaacccccttccagtttccgacgccgacgaaatccgcgagatcctcgtaagacgtatcgatcatcagaagcaggcggccggcattgtcgccggtatcatcgatccgagtggccgccgcgtcgtcgcttatggcaacctcgccaagggcgatcctcgcacggtcgatggagatacgatcttcgagatcggatcgctcaccaagatcttcacctcgctgctattggcggacgcggtgacccacaaagaggtcgccctcgatgattcagcggccaaataccttcccgagactgtcaagatgcctgagcgaagcggcaagtccatcacgctggcggacctttccacgcacagcagcgggcttccgtctctgcccggcaacttgaagctgaaggacgcgcgcaatccttacgccgactaccgcgtggacgatttatacgagttcctgtcggggtacgcgctgccgcgcgaccccggttcggaattcgaatattcaaacctcggcggggggttgctcggccacgttctcgcgtgccgcgccggaacggattatgagagcctgattcgaagccgcatcacgcaacccctcggcatgccggacacgggtattacgctctccggctccatgaaggggcgcatggcgactggtcacaacgcgatgctcgcgccggtgcccaactgggatcttgccagtcttgccggcgccggcgggctacgctcttcagccaatgacatgctgactttgctggaagcatttctcggctacaaggactcaagtctcgcacctgccatgaaagccatgcttgaagttcgccgtcctttgggcaaaatggggatcggtttagggtggtttatgctcggagcggctgcgtggcacgacggaggtacgggcggcttccgagcattcgccggctgcgatctgaaagcgcggatcggggtgattgtgttatccaatgccgccactccgaacggtgtcgatgatatcgggattcatctcctgaacccgaaggccccacttgccgatctcgaagccccaaagcagcgtgcggagattccgattgacccccggctgttcgatcgctacacggggcgctatgaggtgacgccaaacctcgtcttcgaaatcacacgcgagggcgaccgtctcttcgcacaggctttcgtgcggcttcctcacaatcggtccggcgaggcgaccgccgcgcctaagtttgaactgtttgccgaaggcgagaagaactttttcgccaaggtaactgacaaacagatcgtcttcgagatcggctccgaggaccgggccacaaggcttattctgcaccaaggcggccgcgaaccaatgcccgcgggccgagtatcgtga

SEQ ID NO: 143800 - protein, 456 aa, Solibacter usitatus Ellin6076
MNPNIFNPLPVSDADEIREILVRRIDHQKQAAGIVAGIIDPSGRRVVAYGNLAKGDPRTVDGDTIFEIGSLTKIFTSLLLADAVTHKEVALDDSAAKYLPETVKMPERSGKSITLADLSTHSSGLPSLPGNLKLKDARNPYADYRVDDLYEFLSGYALPRDPGSEFEYSNLGGGLLGHVLACRAGTDYESLIRSRITQPLGMPDTGITLSGSMKGRMATGHNAMLAPVPNWDLASLAGAGGLRSSANDMLTLLEAFLGYKDSSLAPAMKAMLEVRRPLGKMGIGLGWFMLGAAAWHDGGTGGFRAFAGCDLKARIGVIVLSNAATPNGVDDIGIHLLNPKAPLADLEAPKQRAEIPIDPRLFDRYTGRYEVTPNLVFEITREGDRLFAQAFVRLPHNRSGEATAAPKFELFAEGEKNFFAKVTDKQIVFEIGSEDRATRLILHQGGREPMPAGRVS

SEQ ID NO: 143801 - DNA, 1725 bp, Solibacter usitatus Ellin6076
  CDS (1)..(1725): transl_table=11
atgaaccgagcgctgattttgtcgatgttggcgtgtagtagcgcattggcgcaaatgcccccggacgtcgaaattcgaaagattctggcggaacgggtcgggcctgagaacctcggctcgacgatcgtagtcggggtgatcgacgcgcaggggcgcagggtagtggcctatgggagccttgcgaagaacgacgcgcgcaagccgggaggcgataccgtcttcgagatcggctcgatgagcaaggtgttcacgtccctcctgctgatggacatgtcgcggaagggcgagctggtcgtgagcgatccggtggcgaagttcctgccggagacggtaaaggtgccggagcgcggcggacgaaagattacgctggctgatctttcaacgcaaagctcggggctgccgcggatgcccacgaactttactcccaaagatgcggggaatccgtacgccgattattcggtacagcaaatgtacgacttcatttcggggtatcagctgacgcgcgacatcgggtcgcaatacgagtactcgaacctgggggtcgggctgctgggccatgcgctggcgcggcgcgcggggatgagttgggaggaactggtccgtaagcgcatctgcgatccgctggggatgtcgaatactcgggtgacgctgacgccggagatgaaggcgcggctggcagtagggcacagcgccgggctggcggcggtgcccaattgggacatccctacgctggccggcgcgggcgcgctgcggtcaaccgcgaacgacatgctgatctttctggcggcgaatctggggtatgccaagactccgctggcgcaggcgatggccgacgagatcgcgatccggcgtccggtaggcggagatatggagatcgcctacggctggcacgtgcagaacaaggacggcaactcgatcatctggcacaacggcgggacgggcgggtatcggacctacatgggcttcgatccgaaggcgcggacgggcgtggtggtgctctccaatgtctccacgccggcggggccggacgatatcgggcggcacctgttgaatgcgagctatccgctgacgaaggtggatgcgccggtggaacacaaggaaatcacgctggatgcgaaggctctggaccgctacgtggggacctatcagatggaccggtacgtcctgatgagcatgtcgcgcgatggtcagcggatgtatacggaactgacgggacaaccgaagttcgaggtcttcccggagagcgagcgtaagttcttcctgaaggtggtggatgcgcagctcatattcgatgaagatgcacagcgggtcactcttcaccagaatggcaacgatatcgctgccaggcgattgactgaggtcgaggcaaagagagcggcggacgctatagaggcgcacaaagccgacatcgccagccggtttaaggagcagaagcaatcgccgggtacggaggcggcggtgaggcggtcggtgacggagctacagacgggcgcggcgaaatacgaactgatgacggatgcgttcgcggcggcggcgcggaaatcgtggcctcccttgaaggctgtgatggcgcagttcggcgggctgcaatcggtcaagttcaccggtgtggggccgggcggcgcggatatttacgaagtgcagttcgaaaaggcgaagacggagtggagaatcatgttggatgaggacggaaagacagctctattgaatttccggccgctgtaa

SEQ ID NO: 143802 - protein, 574 aa, Solibacter usitatus Ellin6076
MNRALILSMLACSSALAQMPPDVEIRKILAERVGPENLGSTIVVGVIDAQGRRVVAYGSLAKNDARKPGGDTVFEIGSMSKVFTSLLLMDMSRKGELVVSDPVAKFLPETVKVPERGGRKITLADLSTQSSGLPRMPTNFTPKDAGNPYADYSVQQMYDFISGYQLTRDIGSQYEYSNLGVGLLGHALARRAGMSWEELVRKRICDPLGMSNTRVTLTPEMKARLAVGHSAGLAAVPNWDIPTLAGAGALRSTANDMLIFLAANLGYAKTPLAQAMADEIAIRRPVGGDMEIAYGWHVQNKDGNSIIWHNGGTGGYRTYMGFDPKARTGVVVLSNVSTPAGPDDIGRHLLNASYPLTKVDAPVEHKEITLDAKALDRYVGTYQMDRYVLMSMSRDGQRMYTELTGQPKFEVFPESERKFFLKVVDAQLIFDEDAQRVTLHQNGNDIAARRLTEVEAKRAADAIEAHKADIASRFKEQKQSPGTEAAVRRSVTELQTGAAKYELMTDAFAAAARKSWPPLKAVMAQFGGLQSVKFTGVGPGGADIYEVQFEKAKTEWRIMLDEDGKTALLNFRPL

SEQ ID NO: 143803 - DNA, 1428 bp, Bacillus cereus G9241
  CDS (1)..(1428): transl_table=11
atgaaaaagattattgtttttgtattaacgatatttatattattctcaggatttgcaacacaaagttatgcgttgtcagattcgcaatctgcggcaatacaagcgttgctagatgatgcctgtcgtatatcaggtgtgccgggaatgtcaatctcaatacttgctgatgatgaagtgttctacttttcttcagggtatgcagaccgtgaaaaggggttgtctgcaagtgaaaatacactctatgagttagcctcggtcagtaaagcttttaccggtatgggtattatgctattggaagagcaagggctgctctcaatgactgaccctgtccaaaaatatttaccttggtttacattaaagtatcaagggaaacctgttgatatgcaaagtcttacactaaataactttcttcaccataccagtggtctaacaaatattaggcatcttcaaaatattccacaaggcaatacaccggatatgttgcaaaagactgtggaaatgctcgtggatgctgaattggcgttccctcccggtgaacagtataactatggaaccgttaattatgacgtattgggtttggttattgagattgtgtcgcgacaaagctacgaagactttatgaaggaacagatatttcagccgttaggtcttcaccagacatatgtttataaagaagatgctcaagccactggacagttggcacagggctaccgttcttccttttttatgacaactccatttaaagctccagattatgctgggaataaacccgcaggctacatcatttctaatacaaaagatatggcgcgttggatgggcatacagatgggtatcgtgcaggacatacccgaaatatttcacacggttatcgaaaaatcacataggggtgatatgtctgtttcggctgtcaacggtatgtattatgcggcaggctggtccgtaaatgccgatcaaacgattatagaacacactgggggcaatccaaatttcagaaccgaagtagtcatactgccaaatgaacgaacagccgtctccttgctgagcaacggcacaaataccaatacaaacatggtactaaaagttaaagatatattagaaggcaatctaactcagtcatatgaaataagcggcacacagcttttggatatcattttgtcgtctatcacaattattttttgcctattgtccgttttgctatttctcttaggattacgcagaaggagaacgaatgagcgacagccaatgacaaaaaagagaataaccgtaacagttattttcctgatcgctacgattgctctgggtatactgtgctgtgctttcgattggtcaacaatacttatgtggcaaacatatagtgttcttacagctttgatttcatcagcattattaacagcaagcattacatggtttgtatacactcaccgataa

SEQ ID NO: 143804 - protein, 475 aa, Bacillus cereus G9241
MKKIIVFVLTIFILFSGFATQSYALSDSQSAAIQALLDDACRISGVPGMSISILADDEVFYFSSGYADREKGLSASENTLYELASVSKAFTGMGIMLLEEQGLLSMTDPVQKYLPWFTLKYQGKPVDMQSLTLNNFLHHTSGLTNIRHLQNIPQGNTPDMLQKTVEMLVDAELAFPPGEQYNYGTVNYDVLGLVIEIVSRQSYEDFMKEQIFQPLGLHQTYVYKEDAQATGQLAQGYRSSFFMTTPFKAPDYAGNKPAGYIISNTKDMARWMGIQMGIVQDIPEIFHTVIEKSHRGDMSVSAVNGMYYAAGWSVNADQTIIEHTGGNPNFRTEVVILPNERTAVSLLSNGTNTNTNMVLKVKDILEGNLTQSYEISGTQLLDIILSSITIIFCLLSVLLFLLGLRRRRTNERQPMTKKRITVTVIFLIATIALGILCCAFDWSTILMWQTYSVLTALISSALLTASITWFVYTHR

SEQ ID NO: 143805 - DNA, 1155 bp, Alteromonadales bacterium TW-7
  CDS (1)..(1155)
atgaagcgcttaccacttttaaagtattgcttaactgcagtgtgttttgtgtatgcaaccgttagttttgcagcgcagcaagacccaaattgggatagttttgtaaaaaagtatggccgttacgcagaaaaaaaactcacgagtaaaggcattccaggagctgcactttcgatagttaatttaggcaatagtgattacatccatgcggtcggacgaacaaaagcccgaaatggtcaaaaggttaatgttcacactcgttttagactggcgtcggtgtctaaaacatttgcaggctctctggctgcaaaattatctagtgatgggctcataaaattagataactccgtcagtaattacttacctgattttataggcacagaatacgaaaaaaacttaaaagtttatcacttacttagccattctagcggcttggtgccaaacgcatatgacaatttaattgagtcgcgaatggattatcccgatatagtacaaaagttagtgacggttaaacctatttgcgagcctggtaaatgctacggttatcaaaacgtcatgtttagtttaattgatgatgttattttaaaaagtacaaataaagattattcacaatggctaaatgaaggcatttttcagccacttgatatggttgatgctagcttgggttatgaagccatggtggttgatagtaattacgctttaccgcacgtacgtggaaaaaaacgttggtacactgcaaagcttaaaaaaaattactacaaagttggaccagcagctggtgttaatgccagtgcaagcgatatggctatctggttaaaggcgcaattaggccactatcctgaagtgttatcacttgatgctttgtctaaacaaactcggccctatacacgcactaaaaaagaaatgtaccgcagggtgtggaaaaagcagttaaacgaagcttattacggtttaggttggcgagtatacaattacgataatgaaaccttgtattaccacagtggttgggtgcaaggataccgaagtgatttggtggtattccctcatttaaatattggctttagcttagtgctaaacgctgaaacagggttaattaatgagttaacaaccgagtttattaatcgtttattgacgtacaaacgtgagcagacaatatga

SEQ ID NO: 143806 - protein, 384 aa, Alteromonadales bacterium TW-7
MKRLPLLKYCLTAVCFVYATVSFAAQQDPNWDSFVKKYGRYAEKKLTSKGIPGAALSIVNLGNSDYIHAVGRTKARNGQKVNVHTRFRLASVSKTFAGSLAAKLSSDGLIKLDNSVSNYLPDFIGTEYEKNLKVYHLLSHSSGLVPNAYDNLIESRMDYPDIVQKLVTVKPICEPGKCYGYQNVMFSLIDDVILKSTNKDYSQWLNEGIFQPLDMVDASLGYEAMVVDSNYALPHVRGKKRWYTAKLKKNYYKVGPAAGVNASASDMAIWLKAQLGHYPEVLSLDALSKQTRPYTRTKKEMYRRVWKKQLNEAYYGLGWRVYNYDNETLYYHSGWVQGYRSDLVVFPHLNIGFSLVLNAETGLINELTTEFINRLLTYKREQTI

SEQ ID NO: 143807 - DNA, 1137 bp, Serratia marcescens
  CDS (1)..(1137): transl_table=11
atgacgaaaatgaaccgcctggcggccgcgctgatcgccgcactgatcttgccgaccgcgcacgccgcgcagcagcaggatatcgacgccgttattcagccgctgatgaaaaaatatggcgtgccgggcatggcgatcgccgtgtcggtcgacggcaaacagcagatttacccgtatggcgtcgcctcgaagcagaccggcaaaccgatcaccgagcagacgctgttcgaagtgggctcgctgagcaaaaccttcaccgcgacgctggcggtctatgcgcagcagcagggcaagctgtcgttcaacgatccggccagccgctacctgcccgagctgcgcggcagcgccttcgacggcgtcagcctgctgaatctggcgacgcatacctccggcctgccgctgttcgtgccggacgacgtgaccgacaacgcccaactgatggcctactaccgggcctggcagccgaaacatccggcgggcagctaccgcgtctattccaacctcggcatcggcatgctgggcatgatcgccgccaagagcctcgaccagccgtttacccaggcgatggagcaggggatgctgccggcgttgggcatgcgccacacctacgttcaggtgccggcggcgcagatggccaactatgcgcagggctacaacaaggacgataagccggtgcgggtcaatcccggcccgctggacgccgagtcttacggcatcaagtccaacgctcgcgatctgattcgctatctggacgccaacctgcagcaggtgaaggtcgcgcacgcgtggcgcgaggcgctgaccgcgacgcacgtcggttattacaaggcgggcgcgttcacgcaggatctgatgtgggagaactacccgtacccggtgaaattgtctcgtttgatcgagggcaacaacgccgggatgatcatgaacggcacgccggctaccgccatcacgccgccgcagccggaattgcgcgccggctggtataacaaaaccggctctaccggcggtttctccacctacgcggtgtttatcccggcgaagaatatcgccgtggtgatgctggccaacaaatggttcccgaacgacgatcgggtcgaggcggcttaccgcatcgtgcaagcgttggataagcgctga

SEQ ID NO: 143808 - protein, 378 aa, Serratia marcescens
MTKMNRLAAALIAALILPTAHAAQQQDIDAVIQPLMKKYGVPGMAIAVSVDGKQQIYPYGVASKQTGKPITEQTLFEVGSLSKTFTATLAVYAQQQGKLSFNDPASRYLPELRGSAFDGVSLLNLATHTSGLPLFVPDDVTDNAQLMAYYRAWQPKHPAGSYRVYSNLGIGMLGMIAAKSLDQPFTQAMEQGMLPALGMRHTYVQVPAAQMANYAQGYNKDDKPVRVNPGPLDAESYGIKSNARDLIRYLDANLQQVKVAHAWREALTATHVGYYKAGAFTQDLMWENYPYPVKLSRLIEGNNAGMIMNGTPATAITPPQPELRAGWYNKTGSTGGFSTYAVFIPAKNIAVVMLANKWFPNDDRVEAAYRIVQALDKR

SEQ ID NO: 143809 - DNA, 1218 bp, Photorhabdus luminescens
  CDS (1)..(1218): transl_table=11
  misc_feature (678)..(678): n is a, g, c or t
atgaataaacagttttttaagatcttccctgtttctgccatggtgttggctctcgcagcctgttcttcttccgataaaacctattcgccaaagtttctgcaaccaaagaagcaaccattgaaatgggaggtgtttgaaggaaacgcgagaactaaaaagttagcttcgcaattggttgatcagtacgctcaggatattttcaatggcagcaatgcccaaggcatggcgatggtggtgattgataataatcaggtagtttaccgcagtttcggtgaaacccatccgggaaacggcatccgtcctaagcctgattccgttatccgcatcgcctcgctgactaagctgatgaccagtgagattatgatcaagctggaagaggataagattctgcgttccaccgatccattgcaggattacagctattatggcgtgaaagtgcctgaatacagccctcttcagcctatccggttgttccacctggcaagccataccagtggtttacctcgtgaacaacctgtaggtcaatgggcgcgccctgtttttgtctggcctacacaagccaatcgctggacttggttgaaaaccgctcaattagatgtatctccaggcacaactgtatcctattccaatctggcttacgatttattagcggatgcgctctctaaggccgcaggtaanccatatacccgcttgttgcacgataagatcaccggcccttattacatgaaagacaccacactgacaccaagccgctctcagtgcgcccgtctgatggaaagtgataaatccagcccatgccttaacactgttgcagcagcgggtagtggtggaatttattcaacgccaagagatatgcaacgctggatgcagcagtttttgtcatcagacagtcagttacgtaagcagaccgccagccgcgaacagggagtttattttaagcgttccgatctggcttcaattaaagggatggatgttgccggtcaggcagatggcgtcggccttggctgggtttacatgaacgcccgtggtgatgtaccgggaatttatcagaaaaccggtggtggcggtgggttcaatacgtatatggcaatgatccccgagcagaatatcggagtatttgtggtgattacccggaagcaacgcagtaagttcagcagtgtaacgaccggggttaatcaactggtaaccgcgttgtcaaagaattacaaacaagtttga

SEQ ID NO: 143810 - protein, 405 aa, Photorhabdus luminescens
  misc_feature (226)..(226): The Xaa at location 226 stands for Asn, or Lys.
MNKQFFKIFPVSAMVLALAACSSSDKTYSPKFLQPKKQPLKWEVFEGNARTKKLASQLVDQYAQDIFNGSNAQGMAMVVIDNNQVVYRSFGETHPGNGIRPKPDSVIRIASLTKLMTSEIMIKLEEDKILRSTDPLQDYSYYGVKVPEYSPLQPIRLFHLASHTSGLPREQPVGQWARPVFVWPTQANRWTWLKTAQLDVSPGTTVSYSNLAYDLLADALSKAAGXPYTRLLHDKITGPYYMKDTTLTPSRSQCARLMESDKSSPCLNTVAAAGSGGIYSTPRDMQRWMQQFLSSDSQLRKQTASREQGVYFKRSDLASIKGMDVAGQADGVGLGWVYMNARGDVPGIYQKTGGGGGFNTYMAMIPEQNIGVFVVITRKQRSKFSSVTTGVNQLVTALSKNYKQV

SEQ ID NO: 143811 - DNA, 1137 bp, Serratia marcescens
  CDS (1)..(1137): transl_table=11
atgacgaaaatgaaccgcctggcggccgcgctgatcgccgcactgatcctgccgaccgcgcacgccgcgcagcagcaggatatcgacgccgttattcagccgctgatgaaaaaatatggcgtgccgggcatggcgatcgccgtgtcggtcgacggcaaacagcagatttacccgtatggcgttgcctcgaagcagaccggcaaaccgatcaccgagcagacgctgttcgaagtgggctcgctgagcaaaaccttcaccgcgacgctggcggtctatgcgcagcagcagggcaaactgtcgtttaaagacccggccagccgctacctgcccgagctgcgcggcagcgccttcgacggcgtcagcctgctgaatctggcgacgcatacctccggtttgccgctgttcgtgccggacgacgtaaccgacaacgcacaactgatggcgtactaccgggcctggcagccgaaacacccggcgggcagctaccgcgtctattccaacctcggcatcggcatgctgggcatgatcgccgccaagagcctcgaccagccgtttatccaggcgatggaacaggggatgctgccggcgttgggcatgagccacacctacgttcaggtgccggcggcgcagatggccaactatgcgcagggctacagcaaggacgataaaccggtgcgggtcaatcccggcccgctggacgccgagtcttacggcatcaagtccaacgcccgcgatctgattcgctatctggacgccaacctgcagcaggtgaaggtggcgcaaccgtggcgcgaggcgctggccgccacgcacgtcggttattacaaggcgggtgcgttcacgcaggatctgatgtgggagaactacccgtatccggtgaagctgtcgcgtttggttgaaggcaacaacgccgggatgatcatgaacggcacgccggccaccgccatcacgccgccgcagccggaattgcgcgccggctggtataacaaaaccggctctaccggcggtttctccacctacgcggtgtttatcccggcgaagaatatcgccgtggtgatgttggccaacaagtggttcccgaatgacgatcgcgtcgaggcggcttaccacatcatccaggcgctggagaagcactga

SEQ ID NO: 143812 - protein, 378 aa, Serratia marcescens
MTKMNRLAAALIAALILPTAHAAQQQDIDAVIQPLMKKYGVPGMAIAVSVDGKQQIYPYGVASKQTGKPITEQTLFEVGSLSKTFTATLAVYAQQQGKLSFKDPASRYLPELRGSAFDGVSLLNLATHTSGLPLFVPDDVTDNAQLMAYYRAWQPKHPAGSYRVYSNLGIGMLGMIAAKSLDQPFIQAMEQGMLPALGMSHTYVQVPAAQMANYAQGYSKDDKPVRVNPGPLDAESYGIKSNARDLIRYLDANLQQVKVAQPWREALAATHVGYYKAGAFTQDLMWENYPYPVKLSRLVEGNNAGMIMNGTPATAITPPQPELRAGWYNKTGSTGGFSTYAVFIPAKNIAVVMLANKWFPNDDRVEAAYHIIQALEKH

SEQ ID NO: 143813 - DNA, 26 bp, Artificial sequence
  primer
atgaaacgtagtctgcttttttctgc

SEQ ID NO: 143814 - DNA, 23 bp, Artificial sequence
  primer
ttaggacgcggggataaccaacg

SEQ ID NO: 143815 - protein, 375 aa, Artificial sequence
  consensus sequence
  Variant (2)..(17): Xaa in position 2 to 17 is any amino acid
  Variant (18)..(18): Xaa in position 18 is any or no amino acid
  Variant (20)..(37): Xaa in position 20 to 37 is any amino acid
  Variant (38)..(38): Xaa in position 38 is any or no amino acid
  Variant (40)..(41): Xaa in position 40 to 41 is any amino acid
  Variant (43)..(44): Xaa in position 43 to 44 is any amino acid
  Variant (46)..(55): Xaa in position 46 to 55 is any amino acid
  Variant (57)..(61): Xaa in position 57 to 61 is any amino acid
  Variant (64)..(66): Xaa in position 64 to 66 is any amino acid
  Variant (68)..(68): Xaa in position 68 is any amino acid
  Variant (70)..(80): Xaa in position 70 to 80 is any amino acid
  Variant (81)..(90): Xaa in position 81 to 90 is any or no amino acid
  Variant (92)..(93): Xaa in position 92 to 93 is any amino acid
  Variant (95)..(96): Xaa in position 95 to 96 is any amino acid
  Variant (101)..(118): Xaa in position 101 to 118 is any amino acid
  Variant (119)..(136): Xaa in position 119 to 136 is any or no amino acid
  Variant (138)..(145): Xaa in position 138 to 145 is any amino acid
  Variant (148)..(151): Xaa in position 148 to 151 is any amino acid
  Variant (153)..(158): Xaa in position 153 to 158 is any amino acid
  Variant (159)..(159): Xaa in position 159 is any or no amino acid
  Variant (161)..(182): Xaa in position 161 to 182 is any amino acid
  Variant (187)..(188): Xaa in position 187 to 188 is any amino acid
  Variant (190)..(223): Xaa in position 190 to 223 is any amino acid
  Variant (224)..(240): Xaa in position 224 to 240 is any or no amino acid
  Variant (242)..(244): Xaa in position 242 to 244 is any amino acid
  Variant (246)..(339): Xaa in position 246 to 339 is any amino acid
  Variant (340)..(374): Xaa in position 340 to 374 is any or no amino acid
GXXXXXXXXXXXXXXXXXGXXXXXXXXXXXXXXXXXXXSXXKXXTXXXXXXXXXXGXXXXXDPXXXYXPXXXXXXXXXXXXXXXXXXXXXLXXLXXHTSGXXXXXXXXXXXXXXXXXXXXXXXXXXXXXXXXXXXXLXXXXXXXXPGXXXXYXXXXXXXLXXXXXXXXXXXXXXXXXXXXXXPLGMXXTXXXXXXXXXXXXXXXXXXXXXXXXXXXXXXXXXXXXXXXXXXXXXXXXXXXSXXXDXXXXXXXXXXXXXXXXXXXXXXXXXXXXXXXXXXXXXXXXXXXXXXXXXXXXXXXXXXXXXXXXXXXXXXXXXXXXXXXXXXXXXXXXXXXXXXXXXXXXXXXXXXXXXXXXXXXXXXXXXXXXXXXXXL

SEQ ID NO: 143816 - protein, 30 aa, Artificial sequence
  protein pattern
  Variant (2)..(2): Xaa in position 2 is Ala or Gly
  Variant (3)..(3): Xaa in position 3 is any amino acid
  Variant (4)..(4): Xaa in position 4 is Ala, Leu or Val
  Variant (5)..(5): Xaa in position 5 is Ile, Leu or Val
  Variant (6)..(6): Xaa in position 6 is Ala, Glu or Ser
  Variant (7)..(8): Xaa in position 7 to 8 is any amino acid
  Variant (9)..(9): Xaa in position 9 is Ala, Ser or Thr
  Variant (10)..(11): Xaa in position 10 to 11 is any amino acid
  Variant (12)..(12): Xaa in position 12 is Asp, Pro or Ser
  Variant (13)..(20): Xaa in position 13 to 20 is any amino acid
  Variant (21)..(21): Xaa in position 21 is Ile, Leu or Val
  Variant (22)..(23): Xaa in position 22 to 23 is any amino acid
  Variant (25)..(26): Xaa in position 25 to 26 is any amino acid
  Variant (27)..(27): Xaa in position 27 is Leu or Met
  Variant (28)..(28): Xaa in position 28 is any amino acid
  Variant (29)..(29): Xaa in position 29 is Asp, Glu, Asn or Gln
LXXXXXXXXXXXXXXXXXXXXXXPXXXXXT

SEQ ID NO: 143817 - DNA, 456 bp, Escherichia coli
  CDS (1)..(456): transl_table=11
atggagttaatggtcgttcatccacatattttctggctcagtctcggcggtttgctgctggcagccgagatgctgggcggaaatggttatttgttgtggagcggcgtggcagcggtgattaccggcctggtggtctggctggtgccgctgggttgggagtggcaaggggtaatgtttgccatcctgacgctgctcgccgcctggctgtggtggaaatggttgtcgcggcgggtgcgcgaacaaaagcacagcgatagtcatttaaaccagcgcgggcagcagctgattggccgacgttttgtgctggaatctccgctggtcaacgggcgcggtcatatgcgcgtcggtgacagttcatggcctgtcagcgccagcgaggatctcggtgcaggtacgcatgttgaagtcattgcgatagaagggataaccctacatatccgagccgtctcgtcttaa

SEQ ID NO: 143818 - protein, 151 aa, Escherichia coli
MELMVVHPHIFWLSLGGLLLAAEMLGGNGYLLWSGVAAVITGLVVWLVPLGWEWQGVMFAILTLLAAWLWWKWLSRRVREQKHSDSHLNQRGQQLIGRRFVLESPLVNGRGHMRVGDSSWPVSASEDLGAGTHVEVIAIEGITLHIRAVSS

SEQ ID NO: 143819 - DNA, 465 bp, Mesorhizobium loti MAFF303099
  CDS (1)..(465): transl_table=11
atgttcgatcgcatcatttccgaactcggaccctggaactggatggttctgggcttcgtgctgctggtcatggaaatcatcgcgcctggcatcttcatgctgtggatcggcatcgccgcgctcatcatcggcgcggtgtcgctgctgatctgggatgcggcgatctggacctggcaggtccaggtccttgccttcctggcgctgtcgctggtttcagcctacgtcggcaagaaactcatgggcggacgcgaccagccgaccgaccagccgctgctcaaccggcgcggcgcccagatggtcggccgcatggcgacgcttgccgagccgatcaaggacggccgcggccgcatcaagctcggcgacacgctgtggcgcgtctccggccccgacctgcccgccggcacgcaggtgcgtgtgacaagtgccgcggatacggacctggaactgacggtggagcgcgtctga

SEQ ID NO: 143820 - protein, 154 aa, Mesorhizobium loti MAFF303099
MFDRIISELGPWNWMVLGFVLLVMEIIAPGIFMLWIGIAALIIGAVSLLIWDAAIWTWQVQVLAFLALSLVSAYVGKKLMGGRDQPTDQPLLNRRGAQMVGRMATLAEPIKDGRGRIKLGDTLWRVSGPDLPAGTQVRVTSAADTDLELTVERV

SEQ ID NO: 143821 - DNA, 450 bp, Pasteurella multocida subsp. multocida str. Pm70
  CDS (1)..(450): transl_table=11
atggaatggttttccacttggagcctttggcattggcttattttaggttttgttttattaattgctgaattagtgatcccaggggtgtttttactttggtggggattagccgccattgtgattgctggtgtgatggcactgataccaagcttatcgttaaccgttttagctattagctatgcgattttagcgattattttgagtgtgtcatggtggaaatatcagcatggtcaagacaaaagtgatcagttacattcgtcattaaatcaacgtgatcacgcgatgctaggcacaagaggtactgtgcaagaaatcgcggctaatggcattggacgtgggcattttggcgatacgacgtggcgcattcaaggcacggatttacaggtcggtgatttagttgaagtgcaccaagtggatggtattacgttaaaagtgaaaaaagtgaattaa

SEQ ID NO: 143822 - protein, 149 aa, Pasteurella multocida subsp. multocida str. Pm70
MEWFSTWSLWHWLILGFVLLIAELVIPGVFLLWWGLAAIVIAGVMALIPSLSLTVLAISYAILAIILSVSWWKYQHGQDKSDQLHSSLNQRDHAMLGTRGTVQEIAANGIGRGHFGDTTWRIQGTDLQVGDLVEVHQVDGITLKVKKVN

SEQ ID NO: 143823 - DNA, 453 bp, Pseudomonas aeruginosa PAO1
  CDS (1)..(453): transl_table=11
atggaaatcctgctgctacgcctggacttctgggactggctggccttcggtaccgtcctcctgctcctggaaatcttcggtgccggcggctatctgctgcgggtcggcctcaccgccgcttgtgtcggtgcgctcggcgcgctcctgccgggactggcctggccttggcaggtagggctgttcgtcctgctctccgggctggtcgccgccttgcatcgacgccgtcgccgcaaggccggtagcgtcgaggaaacgccagggttgcagcgacgcggcgacgacctgttcggccgcacctttcccttgcaccgggcgatcgtcggcgggctcggcgagctgcgcgtcgaggacgcgtcgtggctggtcagcggtcccgacctgccgcgcggcgccctggtccgggtcaccggccaggacggcgccctgctgcacgtcgagcctgccgcgccctga

SEQ ID NO: 143824 - protein, 150 aa, Pseudomonas aeruginosa PAO1
MEILLLRLDFWDWLAFGTVLLLLEIFGAGGYLLRVGLTAACVGALGALLPGLAWPWQVGLFVLLSGLVAALHRRRRRKAGSVEETPGLQRRGDDLFGRTFPLHRAIVGGLGELRVEDASWLVSGPDLPRGALVRVTGQDGALLHVEPAAP

SEQ ID NO: 143825 - DNA, 459 bp, Escherichia coli O157:H7 EDL933
  CDS (1)..(459): transl_table=11
atgatggagttaatagtcgttcatccacatattttctggctcagtctcggcggtttgctgctggcagccgagatgctgggcggaaatggttatttgttgtggagtggcgtggcagcagtgattactggcctggtggtctggctggtgccgctgggttgggagtggcaaggggtgatgtttgccgtcctgacgctgctcgccgcctggctgtggtggaaatggttgtcgcggcgggtgcgcgaacaaaagcacagcgacagtcatttaaaccagcgcgggcagcagctgattggccgacgttttgtgctggaatctccgctggtcaacgggcgcggtcatatgcgcgtcggtgacagttcatggcctgtcagcgccagcgaggatctcggcgcaggtacgcatgttgaagtcattgcgatagaagggataacgctgatcatccgtgcggtcatcgcctga

SEQ ID NO: 143826 - protein, 152 aa, Escherichia coli O157:H7 EDL933
MMELIVVHPHIFWLSLGGLLLAAEMLGGNGYLLWSGVAAVITGLVVWLVPLGWEWQGVMFAVLTLLAAWLWWKWLSRRVREQKHSDSHLNQRGQQLIGRRFVLESPLVNGRGHMRVGDSSWPVSASEDLGAGTHVEVIAIEGITLIIRAVIA

SEQ ID NO: 143827 - DNA, 480 bp, Deinococcus radiodurans R1
  CDS (1)..(480): transl_table=11
atgcctgactggctccccacctggcaagcggtccacccctggcactggtgggtgttcggggcgctgctgctgattctggaaattctggcccccggcgtgtttttcgtgtggctcgcgctctcggctttcggcgtgggcctcctgaccttcgtgttgccctttctggacgtgccggggcagttgctgctctttgcgggcctgagcgtggccgccgtgtggctgggccgccgctacgtgtcgcgcctcgtcctcggcggcagtgagggcgagcagctcaacaccggcgctcagcgcctcatcgggcgcaccgtcaccgtcgtgacccccatcgaacacggtgtgggccgcgtccgggtgggcgacagcgactggcgggcgcgggggccggagctgcccgccggcaccccggtgcgaattgtcggcgtggaaggcgccactctggtcgtgcaggaagaaaagcggctggtggaggcgggttaa

SEQ ID NO: 143828 - protein, 159 aa, Deinococcus radiodurans R1
MPDWLPTWQAVHPWHWWVFGALLLILEILAPGVFFVWLALSAFGVGLLTFVLPFLDVPGQLLLFAGLSVAAVWLGRRYVSRLVLGGSEGEQLNTGAQRLIGRTVTVVTPIEHGVGRVRVGDSDWRARGPELPAGTPVRIVGVEGATLVVQEEKRLVEAG

SEQ ID NO: 143829 - DNA, 435 bp, Xylella fastidiosa 9a5c
  CDS (1)..(435): transl_table=11
atgatgcgctggaatgctatgggatgggcagccgccgcactgctattgctcgctgccgaaacactgatacctggagcgttcatgctgtggatggggattgcagcaacagctgtgttcgtcggcgtgctgctgctcccggatacttcactgctactgcaaatgttcgcttttgttgttcttagcttcgtttcaatctatctctaccggacttggttccgccgtgtcgatcatgacagtgaccatccgctgctaaatcgccgtgctgatcagctagtcggtcgtgtcatcatccttgatcacgctatcgttgacggcaacgctcgaatcaaaatagacgacacattttgggatatcactggtcctgatttacccatcggcactcaaatccggatcgttgctttagatggcgcaacactcaaggtacaccccacttaa

SEQ ID NO: 143830 - protein, 144 aa, Xylella fastidiosa 9a5c
MMRWNAMGWAAAALLLLAAETLIPGAFMLWMGIAATAVFVGVLLLPDTSLLLQMFAFVVLSFVSIYLYRTWFRRVDHDSDHPLLNRRADQLVGRVIILDHAIVDGNARIKIDDTFWDITGPDLPIGTQIRIVALDGATLKVHPT

SEQ ID NO: 143831 - DNA, 465 bp, Agrobacterium tumefaciens str. C58
  CDS (1)..(465): transl_table=11
atgttgcaacggcttgccactgagctgggaccctggagctggtggatcgtcggcttcgtgctgctggccgccgaactcatcgcgcccggcgtcttcctgatatggatcgggcttgccgcacttgtcatcggcgtggtttcgctgtttttctgggaagcggcattctgggcgtggcaattgcagctggtgctgtttgccgcactttccgtggtgttcgccctgctcggccggagatatttcggccgaaaccacgcgacaagcgacgagcccttcctgaaccagcgcgaagcaagccttgtcggccgcaccgcaactctgcaggaaccaatcgtcgagggtcgaggtcggataaggctggatgatacctggtggccggtgaatggcgaagacctgccggccggaacccgcgtcaggattgcctcggcacgcgggcgcacgctgacaatcgaaccgatagatcggtaa

SEQ ID NO: 143832 - protein, 154 aa, Agrobacterium tumefaciens str. C58
MLQRLATELGPWSWWIVGFVLLAAELIAPGVFLIWIGLAALVIGVVSLFFWEAAFWAWQLQLVLFAALSVVFALLGRRYFGRNHATSDEPFLNQREASLVGRTATLQEPIVEGRGRIRLDDTWWPVNGEDLPAGTRVRIASARGRTLTIEPIDR

SEQ ID NO: 143833 - DNA, 456 bp, Sinorhizobium meliloti 1021
  CDS (1)..(456): transl_table=11
atgatcacgcgcatcatcctcgaactcggcccctggagctggtgggtactcggcctcctgctgctggcggcggagctgatcctgcccggcgtattcctcgtgtggatcgcactcgccgcgctcgtcaccggggccctctcgcttttcttctgggaggcgccgttctggagctggcaggtgcagttcgtcgccttcgccttgctttcggtcgcctccgtccttatcgggcggcgcttcgtctcctcttccgccgagagcgacgagccgctgctcaacaggcgcggcgaaagcctggtcggacggacggcagtgctcgagcagccgatcgcggaaggccgcggacgcgtccggctcgacgacacgacctggtccgtcgaaggccccgaccttccggtcggcgcacgcgttcgcatcgtcgcgagcagcggccgccacctgacggtcgagcagatctga

SEQ ID NO: 143834 - protein, 151 aa, Sinorhizobium meliloti 1021
MITRIILELGPWSWWVLGLLLLAAELILPGVFLVWIALAALVTGALSLFFWEAPFWSWQVQFVAFALLSVASVLIGRRFVSSSAESDEPLLNRRGESLVGRTAVLEQPIAEGRGRVRLDDTTWSVEGPDLPVGARVRIVASSGRHLTVEQI

SEQ ID NO: 143835 - DNA, 453 bp, Salmonella typhimurium LT2
  CDS (1)..(453): transl_table=11
atgatagcgatgattctggtgcatccgcatatcttctggcttagcctcggcggcctgttgttggctgcggaaatgctcggcggtaacggctatttgctgtggagcggcgtggcggcagtgattaccggcttaaccgtctggctcttaccgctcggctgggaatggcagggcgtgctgtttgcggccttaacgttgctggcggcctggctttggtggcgctggctggcgcgtcgcgtgcgggaacagaagccgaccgacagccgccttaaccaacgcggacaacaactggtaggccgccggtttatgcttgatgccgcgttagtgaacggacggggtcatatgcgtgtcggcgacagctcgtggccggtatgcgctgacgaagacctgcgcgcaggtacgcatgtcgaagtgatcgccgtggaaggcatcaccttacgcattcgtgccgtttaa

SEQ ID NO: 143836 - protein, 150 aa, Salmonella typhimurium LT2
MIAMILVHPHIFWLSLGGLLLAAEMLGGNGYLLWSGVAAVITGLTVWLLPLGWEWQGVLFAALTLLAAWLWWRWLARRVREQKPTDSRLNQRGQQLVGRRFMLDAALVNGRGHMRVGDSSWPVCADEDLRAGTHVEVIAVEGITLRIRAV

SEQ ID NO: 143837 - DNA, 450 bp, Yersinia pestis KIM
  CDS (1)..(450): transl_table=11
atgctggaggaaattgcagtaaatccaaattggttttggctatcacttggcgggctattattggccgctgagatgctgggagcgagtggctatctgttgtggagcggtattgccgccgtccttgttggcgttctggtatggctgttcccctttagctgggaaatgcaaggcgtgctgttctccattctgactgtcgtgtctgctttcctatggtggtattggttgagtaaacgcactaaaccgcaacctgccatgcttaaccaacgtaatcatcaactgcttggcatacgggcaacattgaccgagccaacggttgatggctatggccggatgaaggtcggtgacagcagttggcgaatttactgcgctaccgagcttaacccaggaactgaagttgaagtgattttggtagaaggtaataccttgcatgtccgtgccgttaatcgctag

SEQ ID NO: 143838 - protein, 149 aa, Yersinia pestis KIM
MLEEIAVNPNWFWLSLGGLLLAAEMLGASGYLLWSGIAAVLVGVLVWLFPFSWEMQGVLFSILTVVSAFLWWYWLSKRTKPQPAMLNQRNHQLLGIRATLTEPTVDGYGRMKVGDSSWRIYCATELNPGTEVEVILVEGNTLHVRAVNR

SEQ ID NO: 143839 - DNA, 459 bp, Escherichia coli CFT073
  CDS (1)..(459): transl_table=11
atgatggagttaatggtcgttcatccacatattttctggctcagtctcggcgggttgctgctggcagccgagatgttgggcggcaatggttatctgttgtggagcggcgtggcagcggtgattaccggcctggtggtctggctggtgccgctgggttgggagtggcaaggggtgatgtttgccattctgacactgctcgccgcctggttgtggtggaaatggctgtcgcggcgggtgcgcgaacaaaagcacagcgacagtcatttaaaccagcgcgggcagcagctgattggccgacgttttgtgctggaatctccactggtcaacgggcgcggtcatatgcgcgtcggtgacagttcatggcctgtcagcgccagcgaggatctcggcgctggtacgcatgttgaagtcattgcgatagaagggataacgctgatcatccgtgcggtcatcgcctga

SEQ ID NO: 143840 - protein, 152 aa, Escherichia coli CFT073
MMELMVVHPHIFWLSLGGLLLAAEMLGGNGYLLWSGVAAVITGLVVWLVPLGWEWQGVMFAILTLLAAWLWWKWLSRRVREQKHSDSHLNQRGQQLIGRRFVLESPLVNGRGHMRVGDSSWPVSASEDLGAGTHVEVIAIEGITLIIRAVIA

SEQ ID NO: 143841 - DNA, 453 bp, Vibrio vulnificus CMCP6
  CDS (1)..(453): transl_table=11
atgattgagttattagatggcatcaatcactggcattggctagctctcgggctagccttattggcagtggaattgttgggcaccgcaggttactttctttggcttggtttgtcggctttactggttggtctgttgctgtctcttatccctatgagttggcaactgcagtggagcgcgttcgcagtgttctcactcgtgacgacttggctttggtggcgcaaacagcttgcaaaagatcagcaagatgattcatcacgcgatcttaatcagaagcaaaaacaactggttggccaagaaattattctaaaagaggatatccatgctggcatgaatcgaattcaagtggcagacaccacttggtcagcacattccgatattgatattccagcaggcagtaaaattaaaattatcgccttagatggaattgtgttgaaggttgaagtgagcgcttag

SEQ ID NO: 143842 - protein, 150 aa, Vibrio vulnificus CMCP6
MIELLDGINHWHWLALGLALLAVELLGTAGYFLWLGLSALLVGLLLSLIPMSWQLQWSAFAVFSLVTTWLWWRKQLAKDQQDDSSRDLNQKQKQLVGQEIILKEDIHAGMNRIQVADTTWSAHSDIDIPAGSKIKIIALDGIVLKVEVSA

SEQ ID NO: 143843 - DNA, 444 bp, Bradyrhizobium japonicum USDA 110
  CDS (1)..(444): transl_table=11
atgaccgacacgttcgtatcgctcggcacctggaactggctgatctttgccttcatcctgatggcgctggagacgatcgcaccgggcgtattcctgttctggctcgggctcgccgctttgctggtgggcctgatctcgttcgccgttcatctgtcctggcagactcagctcgtgatgttcgcgatcttcgctgccgccgccgtgccggtgtggcggcggctcgcccggccgaggcccgatgcaagcgcaagccccttcctcaacaagcgcaccgaggcgctgctcggccgtgagttcacgctggagaagccgatcgtcgacggcaacggcaccatgcgcatcggcgacacggtctggcgcgtcgcaggtcccgatacgccggccgggacgcgcgtgaaggtggtgcaggtggacggcgtgaatctgacggtagcggtggcgtag

SEQ ID NO: 143844 - protein, 147 aa, Bradyrhizobium japonicum USDA 110
MTDTFVSLGTWNWLIFAFILMALETIAPGVFLFWLGLAALLVGLISFAVHLSWQTQLVMFAIFAAAAVPVWRRLARPRPDASASPFLNKRTEALLGREFTLEKPIVDGNGTMRIGDTVWRVAGPDTPAGTRVKVVQVDGVNLTVAVA

SEQ ID NO: 143845 - DNA, 462 bp, Vibrio parahaemolyticus RIMD 2210633
  CDS (1)..(462): transl_table=11
atggacttgttcaacctgcttgatggcataacattttggcactggcttgcattcggctttgtgctgcttgccgttgagctacttggtacagcgggttactttctgtggttggggttatcggcgttattagtgggagcgttattggcagtgctccctttcggctggcaacttcaatggttatctttcgcgactttcagtttgctgacaacttggttatggtggcgacgccagtggtcaagagacaaacaagatgatcaaacaagagatctcaaccaaaagtacaagcagttgattggccgcagcgtgatacttgaggaagatttttcaattgggttaaacagaattcgcatcgccgataccacctggtctgcacagtgtgagcaaaatatccgagctggtactcgtgtaaaaatcgtcgcgatcgatggaataatcctcattgtggagcctatttctgagtaa

SEQ ID NO: 143846 - protein, 153 aa, Vibrio parahaemolyticus RIMD 2210633
MDLFNLLDGITFWHWLAFGFVLLAVELLGTAGYFLWLGLSALLVGALLAVLPFGWQLQWLSFATFSLLTTWLWWRRQWSRDKQDDQTRDLNQKYKQLIGRSVILEEDFSIGLNRIRIADTTWSAQCEQNIRAGTRVKIVAIDGIILIVEPISE

SEQ ID NO: 143847 - DNA, 456 bp, Photorhabdus luminescens subsp. laumondii TTO1
  CDS (1)..(456): transl_table=11
atgattgcacagattgcggcgcaaactccttggctctggttctctttcggcggcttactgttaattgcagagcttctgggaactggcggctatctgttatggacgggcatagccgctatcgttgttgcgtttgtcacctggctgctaccaggaatagattgggaatggcaaggcattttgtttgccactctgacgctgctttctgcaatgctatggcgctactggttacgtcgccgcccatcaaaaggcggcgataccctgaaccagaaagagcaccagctcatcggtatccgagccaaactgactaccgatactgaaaatggttacagccgggtcaagctagctgatggaagctggcgagttcactgtaatagtgaactaccagcccacaccgaagtagaagtgatcgctgttgatggcattaccctgaaagtaaaaccggtcagttctcagtga

SEQ ID NO: 143848 - protein, 151 aa, Photorhabdus luminescens subsp. laumondii TTO1
MIAQIAAQTPWLWFSFGGLLLIAELLGTGGYLLWTGIAAIVVAFVTWLLPGIDWEWQGILFATLTLLSAMLWRYWLRRRPSKGGDTLNQKEHQLIGIRAKLTTDTENGYSRVKLADGSWRVHCNSELPAHTEVEVIAVDGITLKVKPVSSQ

SEQ ID NO: 143849 - DNA, 459 bp, Vibrio vulnificus YJ016
  CDS (1)..(459): transl_table=11
atgattgagttactagatggcatcaatcactggcattggctagctctcgggctagccttattggcagtggaactgttgggcaccgcaggttactttctttggcttggtttgtcggctttactggttggtctgttattgtctcttatccctatgagttggcaactgcagtggagcgcatttgcagtgttctcactcgtgacgacttggctttggtggcgcagacagcttgcaaaagatcagcaagatgattcatcacgcgatcttaatcagaagcaaaaacaactggttggccaagaaattattctaaaagaggatatccatgccggcatgaatcgaattcaagtggcagacacgacttggtcagcacattccgatagtgatattccggcaggcagtaaaattaaaattatcgccttagatggaattgtgttgaaggtagaagtacaggctacgccataa

SEQ ID NO: 143850 - protein, 152 aa, Vibrio vulnificus YJ016
MIELLDGINHWHWLALGLALLAVELLGTAGYFLWLGLSALLVGLLLSLIPMSWQLQWSAFAVFSLVTTWLWWRRQLAKDQQDDSSRDLNQKQKQLVGQEIILKEDIHAGMNRIQVADTTWSAHSDSDIPAGSKIKIIALDGIVLKVEVQATP

SEQ ID NO: 143851 - DNA, 450 bp, Rhodopseudomonas palustris CGA009
  CDS (1)..(450): transl_table=11
atgaccgcgatactcaccgcgctcggcgcctggaactggctgatcctcggtctggtgctgatggcgctggagctgctggcgcctggcgtgtttctgttctggctcggcctcgcggcgctgctggtcggcgtgctggcgctgctgctggagccgggatggcagttgcaaatcctgctgttcggcctgttcgcggccgccgccgtgccgctgtggcggcggatggcgcgcggcggcgacgtcgaggtgcatgccaccaacccgttcctcaaccgccgcaccgatgctctggtggggcgggagttcaccctggagaagccgatcgagggcggcgtcggaacggtgcggatcgacgatacggtctggcgtgtgtccggccccgacacccccgccggcagccgcattcgtatcgttgcggcggatggcgtgacgctgacggtggcggcgctgtag

SEQ ID NO: 143852 - protein, 149 aa, Rhodopseudomonas palustris CGA009
MTAILTALGAWNWLILGLVLMALELLAPGVFLFWLGLAALLVGVLALLLEPGWQLQILLFGLFAAAAVPLWRRMARGGDVEVHATNPFLNRRTDALVGREFTLEKPIEGGVGTVRIDDTVWRVSGPDTPAGSRIRIVAADGVTLTVAAL

SEQ ID NO: 143853 - DNA, 447 bp, Bradyrhizobium sp. ORS278
  CDS (1)..(447): transl_table=11
atgagcgacatgttcgtgacgctcggtacctggaactggctgatcttcggtgtcatcctgatggcgatggagctgctcgcgccgggcgtgtttctgttctggctcggcctcgccgcgctgctggtcggcctgctgtcatttgccgtcgcgccgggatggcagctgcagatcctgctgttcgcattgttctcgatcgccgcggtgccgctgtggcggcgcctggcgcgcgccaatgcggcggcgtcagaggacaatccgttcctcaaccgccgctcggccgcgctcgtcggccgcgagttcacgttggagaagccgatcgtcaacggcaacggcacggtgcgcatcgacgacacggtttggcgcgtggcgggcccggatatccctgccggcagccgcgtgcggatcgtgcaggcggatggcgcgcagctgacggtgacggcggcgtag

SEQ ID NO: 143854 - protein, 148 aa, Bradyrhizobium sp. ORS278
MSDMFVTLGTWNWLIFGVILMAMELLAPGVFLFWLGLAALLVGLLSFAVAPGWQLQILLFALFSIAAVPLWRRLARANAAASEDNPFLNRRSAALVGREFTLEKPIVNGNGTVRIDDTVWRVAGPDIPAGSRVRIVQADGAQLTVTAA

SEQ ID NO: 143855 - DNA, 459 bp, Klebsiella pneumoniae subsp. pneumoniae MGH 78578
  CDS (1)..(459): transl_table=11
atgatcggcatgatcctcacacacccccatctgttctggctaagcctcggcgggctgctgctggcggccgagatgctgggcggcagcggatacctgctgtggagcggcgtcgccggcgtggtgaccggcgccctgacctggctcctgccgctgagctgggaatggcaaggcacgctgtttgccgttctcaccctgctggcggcgtggctgtggtcgaaatggctgcgcaagcgcgtcaaaacgcagcgcccggccgatgcccagctcaaccagcgcgggcagcaactggtgggccgccgcctgacgctggatgccccgctggtgaacggccgcggccacgtccgcgtgggcgacagctcctggccggtgattgccgatgaagacttcgcggcgggcagcaaggttgaagtgattgccgtagaagggattacgctacgaatcagacccgccgtccgttaa

SEQ ID NO: 143856 - protein, 152 aa, Klebsiella pneumoniae subsp. pneumoniae MGH 78578
MIGMILTHPHLFWLSLGGLLLAAEMLGGSGYLLWSGVAGVVTGALTWLLPLSWEWQGTLFAVLTLLAAWLWSKWLRKRVKTQRPADAQLNQRGQQLVGRRLTLDAPLVNGRGHVRVGDSSWPVIADEDFAAGSKVEVIAVEGITLRIRPAVR

SEQ ID NO: 143857 - DNA, 453 bp, Xanthobacter autotrophicus Py2
  CDS (1)..(453): transl_table=11
atgctcgccgatctcggacctcttctgggaccctgggcctggttcatcctgggcggggtgctgctggtggcggagatcgccgcgccgggcgccttcctgctctggctgggcctcgcggcgctcgtcaccggcgccctgtcctatgtggtgggcctcacctggcagagcgaagtgctggcgttcgcggcgctggcggtgatcgcggtgcttatcggccgcaggatcagcccggcgccggggcgcgcctcggacaggccgttcctcaaccggcggtcggaaggcttcgtcgggcgggtgttcacgctggacgagcccatcctcggcggcgtcggccgggtgcggatcgacgacacggtctggcgcatcgaaggaccggaccttgccgccggccgggacgtgaaggtgatcgcggccgatggcgccaccctgaaggtggaagcggtggagggctga

SEQ ID NO: 143858 - protein, 150 aa, Xanthobacter autotrophicus Py2
MLADLGPLLGPWAWFILGGVLLVAEIAAPGAFLLWLGLAALVTGALSYVVGLTWQSEVLAFAALAVIAVLIGRRISPAPGRASDRPFLNRRSEGFVGRVFTLDEPILGGVGRVRIDDTVWRIEGPDLAAGRDVKVIAADGATLKVEAVEG

SEQ ID NO: 143859 - DNA, 456 bp, Erwinia carotovora subsp. atroseptica SCRI1043
  CDS (1)..(456): transl_table=11
atgggcattgaactggtgatggaaaatgcacactggttctggctatcgctcggcggtctgctgttggccgccgaaatgctgggtggcagtggctatttgctgtggagcggcctatcggcggtattggttgggctgttaacgtggatcatgccgctgggttggccatggcagggaacgattttcgccatcctgacgatcgtcacggcgctgctctggtggtattggctgcgtaaacgaacgctgtcgcgtccaccgtcgacgctcaaccaacgcggacaacagctggttggcctgcgtgccaccgtgtcagaatcggtgactaacggttttggtcgggtaaacatcggtgacagcagttggcgcgtgaaatcagaacaggatctgcctgctggcacgcatgttgaagtgattgccgttgacggcatcacgctgcatgtgcgctcaattgagcgctaa

SEQ ID NO: 143860 - protein, 151 aa, Erwinia carotovora subsp. atroseptica SCRI1043
MGIELVMENAHWFWLSLGGLLLAAEMLGGSGYLLWSGLSAVLVGLLTWIMPLGWPWQGTIFAILTIVTALLWWYWLRKRTLSRPPSTLNQRGQQLVGLRATVSESVTNGFGRVNIGDSSWRVKSEQDLPAGTHVEVIAVDGITLHVRSIER

SEQ ID NO: 143861 - DNA, 453 bp, Mannheimia succiniciproducens MBEL55E
  CDS (1)..(453): transl_table=11
atggattggttattcgcttggtctgtgtggcactggctcattttaggttttttattgcttatcggggagattctgatccccggtatttttctgctctggtggggaatatccgctatcattatggcggcgattatggcattattcaccactttaactcttaccgtattgggcatttcttatgcggtattagccttgctgttaagtttggtttggtggaaatatcaacataataaagataaaagtgacgaagcccgttcggtgctgaatcaacgaaaccacgccatgatcggcgcaatcggcgccgtacaggaaattgctttaaacggcgtcggacggggttattttggtgataccacttggcgcattcaaggaaaagaattgaaagtgggcgatcgtattgaagttttaaaggtacggggtataacccttattgtacgtaaattaggaaattaa

SEQ ID NO: 143862 - protein, 150 aa, Mannheimia succiniciproducens MBEL55E
MDWLFAWSVWHWLILGFLLLIGEILIPGIFLLWWGISAIIMAAIMALFTTLTLTVLGISYAVLALLLSLVWWKYQHNKDKSDEARSVLNQRNHAMIGAIGAVQEIALNGVGRGYFGDTTWRIQGKELKVGDRIEVLKVRGITLIVRKLGN

SEQ ID NO: 143863 - DNA, 444 bp, Methylococcus capsulatus str. Bath
  CDS (1)..(444): transl_table=11
atgaccgggttcagcctggttttctggcactggtggacgctgggtgccctgttgctgatcctcgagctcctcctcccggggatgtatttcctctggatggcggaagcagcgctgctgacgggtgcggtactctggctgctccccgggctggggtgggaaatccagctgctggtgttttccgtcctttctctggccagcatcttcgtcttcgaaaaattcatcggccgcaaacccatcgtttccgatcggcctttgctcaaccgccgggcggcgcaatacatcgggcgaaccctgatgttggagcagcccatcgtcaatggtatggggaaaatccgtatcgacgactcgatttggcgggtgcatggggatgattgccccgccggtaccaaaatcagggtgtgtgacgtggacggcgtcattctgaaggtcgagcgggtcgcttga

SEQ ID NO: 143864 - protein, 147 aa, Methylococcus capsulatus str. Bath
MTGFSLVFWHWWTLGALLLILELLLPGMYFLWMAEAALLTGAVLWLLPGLGWEIQLLVFSVLSLASIFVFEKFIGRKPIVSDRPLLNRRAAQYIGRTLMLEQPIVNGMGKIRIDDSIWRVHGDDCPAGTKIRVCDVDGVILKVERVA

SEQ ID NO: 143865 - DNA, 450 bp, Pseudomonas fluorescens Pf-5
  CDS (1)..(450): transl_table=11
atgttggcatttgtgcaagctctatcgttctgggactggctggcccttggcaccatcctgctgatcttcgaagtattcggggccggcggctacctgctgtggatcggcctcgcagccgccatagtcggggtcctgacctttctcattcccggcctctcatgggaggtgcagttcctcctgttcggcctgctgtcggtgctcaccgcactgtattggtggcgccgccagcgcagcgtggtacgccccagcgatcagccgaacctcaacctgcgcggccaggagctgatcggcaagacctttgtggtgcaccaggcgattgtcgacggccgcgggcggatcaaggtggccgacggcgtgtggatcgccaagggggccgacgcccccgtgggcgcccgggttcgggtggtgggccaggaaggcgcaatcctgttggtcgaaaaccttgactga

SEQ ID NO: 143866 - protein, 149 aa, Pseudomonas fluorescens Pf-5
MLAFVQALSFWDWLALGTILLIFEVFGAGGYLLWIGLAAAIVGVLTFLIPGLSWEVQFLLFGLLSVLTALYWWRRQRSVVRPSDQPNLNLRGQELIGKTFVVHQAIVDGRGRIKVADGVWIAKGADAPVGARVRVVGQEGAILLVENLD

SEQ ID NO: 143867 - DNA, 453 bp, Methylobacillus flagellatus KT
  CDS (1)..(453): transl_table=11
atgcttgaaccgttctggatatggggcatactcggattggtactcatcgcgctggaaatgctcagcagcacactatacatcctctggttcggcattgccgccttatgtcttgccttgctgacctacttgctgcccgcattgggcattgcctggcagttgctgatctttgccgcgctatcgttgggttcgctcgcggtatggaagcagttctaccgccgtgaaaagaacaatttcaatatcggccaatcgcgcagtgatgaaatcggccgtaccggcatcatcatcgagccggtaagccccaggcagaacggtatgatcgaattcgcacagggcgtgctgggcagccgtcgatgggaagccgtggccagcgaggaaatcgaggcaggcgccgaggccgtcatcgtggcagtcgaaggcaaccgcctgcgagtcagcaggaaaaccgcgcactaa

SEQ ID NO: 143868 - protein, 150 aa, Methylobacillus flagellatus KT
MLEPFWIWGILGLVLIALEMLSSTLYILWFGIAALCLALLTYLLPALGIAWQLLIFAALSLGSLAVWKQFYRREKNNFNIGQSRSDEIGRTGIIIEPVSPRQNGMIEFAQGVLGSRRWEAVASEEIEAGAEAVIVAVEGNRLRVSRKTAH

SEQ ID NO: 143869 - DNA, 462 bp, Mesorhizobium sp. BNC1
  CDS (1)..(462): transl_table=11
atgctgatgagttttctcaccgatctcgggccgtggaactggatgctcctcggctttatccttcttgtgcttgagatcatcctcccaggggtcttcctgctctggataggcatcgcagcggtcctcaccggagcgctatcgctgcagctatgggacgtaagcttctggacctggcaggtgcaggtgctggttttcctcgccctatcgcttgtttccgcctttatcggcaagcgcgtgaccgatgcgcgccgcgaagaggacacggacgagcctctgctcaaccgccgggcggaacagctcgtcggccgcacagccgcccttgaagagccgatcagcggcggttacggccgcattcgcctgggcgacaccacgtggcgcgtgaccgggcccgacctgccggctggcacccgtgttcgcgtcgtctcggcgagaggcggcgatttacacgtggaaaaggaatag

SEQ ID NO: 143870 - protein, 153 aa, Mesorhizobium sp. BNC1
MLMSFLTDLGPWNWMLLGFILLVLEIILPGVFLLWIGIAAVLTGALSLQLWDVSFWTWQVQVLVFLALSLVSAFIGKRVTDARREEDTDEPLLNRRAEQLVGRTAALEEPISGGYGRIRLGDTTWRVTGPDLPAGTRVRVVSARGGDLHVEKE

SEQ ID NO: 143871 - DNA, 444 bp, Haemophilus somnus 129PT
  CDS (1)..(444): transl_table=11
atggaatggtttgacgcttggacattttggcattggctgattttaggttttttattattgattgcagagataattgttccgggcgtttttttattatggtggggtttagccgctattattgtttcaatgatcaccatcattattgatttatctctgactatacagtgcgttatttatggcatcttagcaatagtgttgagtgtcgcatggtggaaatatcaacatactaaagatgaaaaagatcaggcaaattcttctttaaaccggcgagatcacgccatgttgggatgtcgaggtaaggttgaagtgatagccgaaaatggcattggtcgaggtgtttttggcgataccacttggcgtattcaaggtaaagggttgcaacaaggggatattattgaagttcaagctgtgaatggaattacgttgattgttcaaaaaaaataa

SEQ ID NO: 143872 - protein, 147 aa, Haemophilus somnus 129PT
MEWFDAWTFWHWLILGFLLLIAEIIVPGVFLLWWGLAAIIVSMITIIIDLSLTIQCVIYGILAIVLSVAWWKYQHTKDEKDQANSSLNRRDHAMLGCRGKVEVIAENGIGRGVFGDTTWRIQGKGLQQGDIIEVQAVNGITLIVQKK

SEQ ID NO: 143873 - DNA, 456 bp, Rhizobium leguminosarum bv. viciae 3841
  CDS (1)..(456): transl_table=11
atgctggcgaagatcgtagccgaactcggtccgtggagctggtgggtcgcgggcctcgtgctgctcgccgcggaaatgatcgttcccggcttcttcctggtctggatcggccttgccgccttgatcgtcggtgcgctatcgctgctcttctgggacagcgccttctgggtctgggagttgcaggcaatcctttttgcgcttctcgccgttgccacgaccttcgccggccgccggctgacgctgcgcaatgcgaccaccgacgagccctttctcaatcagcgtggcgcgagcctcgtcggccgcacggcgacgctgcacgaaccgatccgcgaaggccgcggccgcatccgcctcgacgatacgctatggcaggtgatgggaccggacctgcccgtcggaacacaggtgaaggtggtgtcgagcaatggccgcgacctgacggtcgagcccgtctga

SEQ ID NO: 143874 - protein, 151 aa, Rhizobium leguminosarum bv. viciae 3841
MLAKIVAELGPWSWWVAGLVLLAAEMIVPGFFLVWIGLAALIVGALSLLFWDSAFWVWELQAILFALLAVATTFAGRRLTLRNATTDEPFLNQRGASLVGRTATLHEPIREGRGRIRLDDTLWQVMGPDLPVGTQVKVVSSNGRDLTVEPV

SEQ ID NO: 143875 - DNA, 453 bp, Pseudomonas aeruginosa UCBPP-PA14
  CDS (1)..(453): transl_table=11
atggaaatcctgctgctacgcctggacttctgggactggctggccttcggtaccgtcctcctgctcctggaaatcttcggtgccggcggctatctgctgcgggtcggcctcaccgccgcttgtgtcggtgcgctcggcgcgctcctgccgggactggcctggccctggcaggtagggctgttcgtcctgctctccgggctggtcgccgccttgcatcgacgccgtcgccgcaaggccggtagcgtcgaggaaacgccagggttgcagcgacgcggcgacgacctgttcggccgcacctttcccttgcaccgggcgatcgtcggcgggctcggcgagctgcgcgtcgaggacgcgttatggctggtcagcggtcccgacctgccgcgcggcgccctggtccgggtcaccggccaggacggcgccctgctgcacgtcgagcctgccgctccctga

SEQ ID NO: 143876 - protein, 150 aa, Pseudomonas aeruginosa UCBPP-PA14
MEILLLRLDFWDWLAFGTVLLLLEIFGAGGYLLRVGLTAACVGALGALLPGLAWPWQVGLFVLLSGLVAALHRRRRRKAGSVEETPGLQRRGDDLFGRTFPLHRAIVGGLGELRVEDALWLVSGPDLPRGALVRVTGQDGALLHVEPAAP

SEQ ID NO: 143877 - DNA, 447 bp, Magnetococcus sp. MC-1
  CDS (1)..(447): transl_table=11
atgacactgtttgctgatattgccccccattgggcgtgggcgattgtggggttggtgctgattgggctggagatgtttgtctggagcacttttttgctgtggatgggtctttcggcttttgtagtgggggccattttttacgttgctccagattttccttgggcgtggtcggtggtgctctatggggttttatccctggtcgccatctatttggggcgcaaactgtttaagcctgcccaagcggatgacccagacgccttaaatgagcgtggtcagcgcatggtggggcagagctatgtggtggctgaagcgattgtgcatggccgtggcaaggtgcgggtgggggattccctctggctggcccagggggcggattgtccagcgggtacggtggtcacggtgacgtcggttaaaagcaccacccttatggtaacgttagcggagtag

SEQ ID NO: 143878 - protein, 148 aa, Magnetococcus sp. MC-1
MTLFADIAPHWAWAIVGLVLIGLEMFVWSTFLLWMGLSAFVVGAIFYVAPDFPWAWSVVLYGVLSLVAIYLGRKLFKPAQADDPDALNERGQRMVGQSYVVAEAIVHGRGKVRVGDSLWLAQGADCPAGTVVTVTSVKSTTLMVTLAE

SEQ ID NO: 143879 - DNA, 444 bp, Haemophilus somnus 2336
  CDS (1)..(444): transl_table=11
atggaatggtttgacgcttggacattttggcattggctgattttaggttttttattattgattgcagagataattgttccaggcgtttttttattatggtggggtttagccgctattattgtttcaatgatcaccatcattattgatttatctctgactatacagtgcgttatttatggcatcttagcaatagtgttgagtgtcgcatggtggaaatatcaacatactaaagatgaaaaagatcaggcaaattcttctttaaaccggcgagatcacgccatgttgggatgtctaggtaaggttgaagtgatagccgaaaatggcattggtcgaggtgtttttggcgataccacttggcgtattcaaggtaaagggttgcaacaaggggatattattgaagttcaagctgtgaatggaattacgttgatcgttcaaaaaaaataa

SEQ ID NO: 143880 - protein, 147 aa, Haemophilus somnus 2336
MEWFDAWTFWHWLILGFLLLIAEIIVPGVFLLWWGLAAIIVSMITIIIDLSLTIQCVIYGILAIVLSVAWWKYQHTKDEKDQANSSLNRRDHAMLGCLGKVEVIAENGIGRGVFGDTTWRIQGKGLQQGDIIEVQAVNGITLIVQKK

SEQ ID NO: 143881 - DNA, 450 bp, Pseudoalteromonas tunicata D2
  CDS (1)..(450): transl_table=11
atgcttgaactttttactcaaattgaagcgtggcactggttaatattagggctattgttactcggtgctgaagcattaggcaccgcaggctttttactcggtgccgccatcgctgcattttgtattatgcttgttaagtttgccttacctgagctgagctggcagtggcaaatgagtttatttgctgttctttcagtcatattatcgattttgtactggaagttctttaagcgctttaatcaacaaagtgaccataaagagcttaatcaacgcagccatcatttaatcggcaaagagtgggtattgagcgaaacaattacaataggtgaaaaccacgtgcagatcggtgatacttattggaaagtatttagtgatcaagatattaaagctggcagcagagtaaaagtaatcagtgctgacccaatgtctttaaccatcggcactgtttaa

SEQ ID NO: 143882 - protein, 149 aa, Pseudoalteromonas tunicata D2
MLELFTQIEAWHWLILGLLLLGAEALGTAGFLLGAAIAAFCIMLVKFALPELSWQWQMSLFAVLSVILSILYWKFFKRFNQQSDHKELNQRSHHLIGKEWVLSETITIGENHVQIGDTYWKVFSDQDIKAGSRVKVISADPMSLTIGTV

SEQ ID NO: 143883 - DNA, 450 bp, Photobacterium sp. SKA34
  CDS (1)..(450): transl_table=11
atgatcgacttactagaacaaatgaatttctggcattggatagcactaggtttagtgctattgctacttgaattacttggcactgctgggtatttattatggcttggtatttcagctgttctagtcggtgtcttattgataatgttacctgtatcatggcccttacagtgggtttcttttgcagtgtttgcgctatttaccacttggttatggtggagataccagcataaaaaagataagacggatgcctctgtttcaaaattaaatcaacgtggcgctcaaatgattgggcaaattatcactgtagaaaaagcaatgattgctggaaatggtcgattacaacttggtgataccacatggagtgttaaaacagacgttgacttagttaaaggacagaaggttgtggtcgttgatgtggaaggaataaccttaattataaaacctgcataa

SEQ ID NO: 143884 - protein, 149 aa, Photobacterium sp. SKA34
MIDLLEQMNFWHWIALGLVLLLLELLGTAGYLLWLGISAVLVGVLLIMLPVSWPLQWVSFAVFALFTTWLWWRYQHKKDKTDASVSKLNQRGAQMIGQIITVEKAMIAGNGRLQLGDTTWSVKTDVDLVKGQKVVVVDVEGITLIIKPA

SEQ ID NO: 143885 - DNA, 450 bp, Oceanospirillum sp. MED92
  CDS (1)..(450): transl_table=11
atgctggaattttttcaatctatctcattttggcactggatcattctggcactgattctgctcggaggtgaagcgctgggcgccgcgggttttatgatcggcgtatcgatctctgcattcatcgttgcagggtcgatggcgcttggggtcttaaatgactggcagcatcagttccttcttttcgcactgttttcagtcatcgcttctgtcattgtttggcgcttctttaaacatcggggcgagcatgatggtgcagagatgatcaatgatcgtgcagcgcagttgatcggtcgtaaacttaccttgtctgaaaatatggaaaatgggcggggtagagttcagataggtgatactttctggaaagtcgcggcggacgaagattatgaaagtgggacccgggttgaagtggtttcaaccgaagggatgcttttgcaaatccaaaaaatataa

SEQ ID NO: 143886 - protein, 149 aa, Oceanospirillum sp. MED92
MLEFFQSISFWHWIILALILLGGEALGAAGFMIGVSISAFIVAGSMALGVLNDWQHQFLLFALFSVIASVIVWRFFKHRGEHDGAEMINDRAAQLIGRKLTLSENMENGRGRVQIGDTFWKVAADEDYESGTRVEVVSTEGMLLQIQKI

SEQ ID NO: 143887 - DNA, 462 bp, Vibrio sp. Ex25
  CDS (1)..(462): transl_table=11
atggactttttcagtttgctggaaggcgtctctttctggcattggctagccttcggttttgcacttctagcggtagagctacttgggactgcgggatattttctctggctcggagtttctgcacttatcgttggggcactaatgaccgttttgccaatgagctggcaattacaatggctttgctttgcaagtttcagcttaatcaccacttggttatggtggcgacgacaatggtctaaagacaagaaagaagaccaagaaagagatctgaaccaaaagtataagcagttaatcggacgcacacttaccattgaagaggacttttctgttgggctcaatcgtatcaaggttgccgataccacatggtcggcacagtcggatcaagcacttccagcaggaacgcgcgttaaaataaaagatatcgatggtattattttaatcattgagcctgattctaagtaa

SEQ ID NO: 143888 - protein, 153 aa, Vibrio sp. Ex25
MDFFSLLEGVSFWHWLAFGFALLAVELLGTAGYFLWLGVSALIVGALMTVLPMSWQLQWLCFASFSLITTWLWWRRQWSKDKKEDQERDLNQKYKQLIGRTLTIEEDFSVGLNRIKVADTTWSAQSDQALPAGTRVKIKDIDGIILIIEPDSK

SEQ ID NO: 143889 - DNA, 444 bp, Erythrobacter sp. SD-21
  CDS (1)..(444): transl_table=11
atggagtggtggaactcgctcgaccctttctgggtgtggctggcactcggcctgttcctggcgggtgccgaaatcctcgtgcccgggttcttcctgatgtggctggctggcgcagcgctgctgaccggcatcgtcgccttccttatgcccggggccatccccctgcaggtgacggtgttcgcgatcctctcgatcgtcgcggtcttcatcggtcgcaactacttccgcagcaaccccatcctcgaagccgacccgaagatgaaccggcgcggcatgcggctggctggcgagatcgccaccgtcgtctcgcccatcaacggcggaacgggccgggtgaagcatggcgacagcgaatggctcgccaagggctgcgaagcggcggtgggcgaccgcgtgcggatcagcggcagcgacggggccgtactgatcgtcgaaccactctag

SEQ ID NO: 143890 - protein, 147 aa, Erythrobacter sp. SD-21
MEWWNSLDPFWVWLALGLFLAGAEILVPGFFLMWLAGAALLTGIVAFLMPGAIPLQVTVFAILSIVAVFIGRNYFRSNPILEADPKMNRRGMRLAGEIATVVSPINGGTGRVKHGDSEWLAKGCEAAVGDRVRISGSDGAVLIVEPL

SEQ ID NO: 143891 - DNA, 438 bp, Magnetospirillum gryphiswaldense
  CDS (1)..(438): transl_table=11
atgcagcccgtgttctggcattggctgatcgccggcatcctgctgatcggggccgaggccatgctgcccggcacctatctgttgtggccgggcatcgctgcctttctcaccggcatagtcgcctatatggcgccgtccctgggctgggaaatccacgctggcatcttcgccgccctcaccgtgctggcggcggtgggcgggcgcaaattgtacgcacgcctgaaaaccccggccagcgacgcccccttgctcaacaagcgcgccgcccagttggtgggaacaatccacaccctggacacccccatcctcgacggctatggccgcatgcgcctaggcgacgccacctggaaggtgtccggccccgatctgcccaccggctcccgcgtcagggtgatcggcgccgagggcattatcctgcgggtggagccggcgccgtga

SEQ ID NO: 143892 - protein, 145 aa, Magnetospirillum gryphiswaldense
MQPVFWHWLIAGILLIGAEAMLPGTYLLWPGIAAFLTGIVAYMAPSLGWEIHAGIFAALTVLAAVGGRKLYARLKTPASDAPLLNKRAAQLVGTIHTLDTPILDGYGRMRLGDATWKVSGPDLPTGSRVRVIGAEGIILRVEPAP

SEQ ID NO: 143893 - DNA, 459 bp, Escherichia coli
  CDS (1)..(459): transl_table=11
atgatggagttaatggtcgttcatccacatattttctggctcagtctcggcggtttgctgctggcagccgagatgctgggcggaaatggttatttgttgtggagcggcgtggcagcggtgattaccggcctggtggtctggctggtgccgctgggttgggagtggcaaggggtaatgtttgccatcctgacgctgctcgccgcctggctgtggtggaaatggttgtcgcggcgggtgcgcgaacaaaagcacagcgatagtcatttaaaccagcgcgggcagcagctgattggccgacgttttgtgctggaatctccgctggtcaacgggcgcggtcatatgcgcgtcggtgacagttcatggcctgtcagcgccagcgaggatctcggtgcaggtacgcatgttgaagtcattgcgatagaagggataaccctacatatccgagccgtctcgtcttaa

SEQ ID NO: 143894 - protein, 152 aa, Escherichia coli
MMELMVVHPHIFWLSLGGLLLAAEMLGGNGYLLWSGVAAVITGLVVWLVPLGWEWQGVMFAILTLLAAWLWWKWLSRRVREQKHSDSHLNQRGQQLIGRRFVLESPLVNGRGHMRVGDSSWPVSASEDLGAGTHVEVIAIEGITLHIRAVSS

SEQ ID NO: 143895 - DNA, 24 bp, Artificial sequence
  primer
atggagttaatggtcgttcatcca

SEQ ID NO: 143896 - DNA, 23 bp, Artificial sequence
  primer
ttaagacgagacggctcggatat

SEQ ID NO: 143897 - protein, 145 aa, Artificial sequence
  consensus sequence
  Variant (2)..(2): Xaa in position 2 is any amino acid
  Variant (4)..(6): Xaa in position 4 to 6 is any amino acid
  Variant (8)..(9): Xaa in position 8 to 9 is any amino acid
  Variant (12)..(13): Xaa in position 12 to 13 is any amino acid
  Variant (15)..(23): Xaa in position 15 to 23 is any amino acid
  Variant (25)..(25): Xaa in position 25 is any amino acid
  Variant (27)..(28): Xaa in position 27 to 28 is any amino acid
  Variant (30)..(45): Xaa in position 30 to 45 is any amino acid
  Variant (46)..(49): Xaa in position 46 to 49 is any or no amino acid
  Variant (51)..(53): Xaa in position 51 to 53 is any amino acid
  Variant (55)..(77): Xaa in position 55 to 77 is any amino acid
  Variant (78)..(82): Xaa in position 78 to 82 is any or no amino acid
  Variant (85)..(85): Xaa in position 85 is any amino acid
  Variant (87)..(91): Xaa in position 87 to 91 is any amino acid
  Variant (93)..(103): Xaa in position 93 to 103 is any amino acid
  Variant (105)..(111): Xaa in position 105 to 111 is any amino acid
  Variant (112)..(117): Xaa in position 112 to 117 is any or no amino acid
  Variant (119)..(120): Xaa in position 119 to 120 is any amino acid
  Variant (122)..(130): Xaa in position 122 to 130 is any amino acid
  Variant (131)..(131): Xaa in position 131 is any or no amino acid
  Variant (133)..(141): Xaa in position 133 to 141 is any amino acid
  Variant (143)..(144): Xaa in position 143 to 144 is any amino acid
WXWXXXGXXLLXXEXXXXXXXXXWXGXXAXXXXXXXXXXXXXXXXXXXXQXXXFXXXXXXXXXXXXXXXXXXXXXXXXXXXXLNXRXXXXXGXXXXXXXXXXXGXXXXXXXXXXXXXDXXWXXXXXXXXXXGXXXXXXXXXGXXL

SEQ ID NO: 143898 - protein, 29 aa, Artificial sequence
  protein pattern
  Variant (2)..(2): Xaa in position 2 is any amino acid
  Variant (3)..(3): Xaa in position 3 is Lys or Arg
  Variant (4)..(4): Xaa in position 4 is Ala, Asp, Glu, Gly, Asn, Gln, Ser or Thr
  Variant (5)..(6): Xaa in position 5 to 6 is any amino acid
  Variant (7)..(7): Xaa in position 7 is Phe, Leu or Met
  Variant (8)..(8): Xaa in position 8 is Ala, Ile, Leu or Val
  Variant (10)..(13): Xaa in position 10 to 13 is any amino acid
  Variant (14)..(14): Xaa in position 14 is Leu or Val
  Variant (15)..(20): Xaa in position 15 to 20 is any amino acid
  Variant (22)..(22): Xaa in position 22 is any amino acid
  Variant (23)..(23): Xaa in position 23 is Ala, Gly, Asn or Ser
  Variant (24)..(27): Xaa in position 24 to 27 is any amino acid
  Variant (28)..(28): Xaa in position 28 is Ala, Asp or Gly
NXXXXXXXGXXXXXXXXXXXGXXXXXXXD

SEQ ID NO: 143899 - protein, 27 aa, Artificial sequence
  protein pattern
  Variant (2)..(7): Xaa in position 2 to 7 is any amino acid
  Variant (9)..(12): Xaa in position 9 to 12 is any amino acid
  Variant (13)..(13): Xaa in position 13 is Ala, Gly, Asn, Ser or Thr
  Variant (14)..(14): Xaa in position 14 is any amino acid
  Variant (15)..(15): Xaa in position 15 is Phe or Tyr
  Variant (16)..(16): Xaa in position 16 is Phe, Ile, Leu or Met
  Variant (17)..(17): Xaa in position 17 is Phe, Ile, Leu, Met or Val
  Variant (19)..(19): Xaa in position 19 is any amino acid
  Variant (20)..(20): Xaa in position 20 is Ala or Gly
  Variant (21)..(21): Xaa in position 21 is any amino acid
  Variant (22)..(22): Xaa in position 22 is Ala or Ser
  Variant (24)..(26): Xaa in position 24 to 26 is any amino acid
  Variant (27)..(27): Xaa in position 27 is Ala, Gly or Ser
GXXXXXXEXXXXXXXXXWXXXXAXXXX

SEQ ID NO: 143900 - protein, 16 aa, Artificial sequence
  protein pattern
  Variant (2)..(2): Xaa in position 2 is Ala, Asp, Ser or Thr
  Variant (3)..(3): Xaa in position 3 is any amino acid
  Variant (4)..(4): Xaa in position 4 is Ile or Val
  Variant (5)..(5): Xaa in position 5 is Glu, Lys or Arg
  Variant (6)..(6): Xaa in position 6 is Ile or Val
  Variant (7)..(9): Xaa in position 7 to 9 is any amino acid
  Variant (10)..(10): Xaa in position 10 is Asp, Glu, Asn, Arg or Ser
  Variant (12)..(13): Xaa in position 12 to 13 is any amino acid
  Variant (15)..(15): Xaa in position 15 is any amino acid
  Variant (16)..(16): Xaa in position 16 is Ile or Val
GXXXXXXXXXGXXLXX

SEQ ID NO: 143901 - DNA, 984 bp, ESCHERICHIA COLI
  CDS (1)..(984): transl_table=11
atgataatgattttcacgtcaagttgctgcgataatttatcaatagatgagattatcgaacgtgctgaaaaaggcgattgcgaggctcaatatattgttgggttttattataatcgcgatagcgcaattgattctccggacgacgaaaaagccttttactggctgaagctggccgctgagcaaggtcattgtgaagcacagtattccttagggcaaaagtataccgaggataaaagccgtcataaagataatgagcaagccatcttctggctgaaaaaagctgccctacaaggccatactttcgcttccaacgcccttggctggacactggatcgtggagaagcccccaattataaagaagcggttgtctggtatcagatagccgcggagagcggaatgtcttatgcgcaaaataatcttgggtggatgtacagaaatggcaacggagtcgcaaaagactatgcgctggcatttttctggtacaaacaagctgcattacaaggccatagtgacgcgcaaaacaatctggccgatctttatgaagacggaaaaggcgttgctcaaaacaagacactcgccgcattctggtatttgaaaagcgcacagcagggtaatcggcacgcccagtttcaaattgcatgggattataacgctggcgaaggggtggaccaggactataagcaagcgatgtactggtatctgaaggctgccgctcaggggagcgtcggcgcttacgtcaacatcggttatatgtataaacacggacaaggcgttgagaaagattatcaggctgcctttgaatggtttacgaaagccgctgaatgcaatgacgccactgcctggtataacctggccattatgtatcactacggagaaggaagacctgtcgatctccgacaggctctcgacctgtatcgtaaagttcagtcatccggaaccagagatgtcagtcaggaaattcgtgagactgaagatttactgtaa

SEQ ID NO: 143902 - protein, 327 aa, ESCHERICHIA COLI
MIMIFTSSCCDNLSIDEIIERAEKGDCEAQYIVGFYYNRDSAIDSPDDEKAFYWLKLAAEQGHCEAQYSLGQKYTEDKSRHKDNEQAIFWLKKAALQGHTFASNALGWTLDRGEAPNYKEAVVWYQIAAESGMSYAQNNLGWMYRNGNGVAKDYALAFFWYKQAALQGHSDAQNNLADLYEDGKGVAQNKTLAAFWYLKSAQQGNRHAQFQIAWDYNAGEGVDQDYKQAMYWYLKAAAQGSVGAYVNIGYMYKHGQGVEKDYQAAFEWFTKAAECNDATAWYNLAIMYHYGEGRPVDLRQALDLYRKVQSSGTRDVSQEIRETEDLL

SEQ ID NO: 143903 - DNA, 978 bp, Escherichia coli str. K-12 substr. W3110
  CDS (1)..(978): transl_table=11
atgattttcacgtcaagttgctgcgataatttatcaatagatgagattatcgaacgtgctgaaaaaggcgattgcgaggctcaatatattgttgggttttattataatcgcgatagcgcaattgattctccggacgacgaaaaagccttttactggctgaagctggccgctgagcaaggtcattgtgaagcacagtattccttagggcaaaagtataccgaggataaaagccgtcataaagataatgagcaagccatcttctggctgaaaaaagctgccctacaaggccatactttcgcttccaacgcccttggctggacactggatcgtggagaagcccccaattataaagaagcggttgtctggtatcagatagccgcggagagcggaatgtcttatgcgcaaaataatcttgggtggatgtacagaaatggcaacggagtcgcaaaagactatgcgctggcatttttctggtacaaacaagctgcattacaaggccatagtgacgcgcaaaacaatctggccgatctttatgaagacggaaaaggcgttgctcaaaacaagacactcgccgcattctggtatttgaaaagcgcacagcagggtaatcggcacgcccagtttcaaattgcatgggattataacgctggcgaaggggtggaccaggactataagcaagcgatgtactggtatctgaaggctgccgctcaggggagcgtcggcgcttacgtcaacatcggttatatgtataaacacggacaaggcgttgagaaagattatcaggctgcctttgaatggtttacgaaagccgctgaatgcaatgacgccactgcctggtataacctggccattatgtatcactacggagaaggaagacctgtcgatctccgacaggctctcgacctgtatcgtaaagttcagtcatccggaaccagagatgtcagtcaggaaattcgtgagactgaagatttactgtag

SEQ ID NO: 143904 - protein, 325 aa, Escherichia coli str. K-12 substr. W3110
MIFTSSCCDNLSIDEIIERAEKGDCEAQYIVGFYYNRDSAIDSPDDEKAFYWLKLAAEQGHCEAQYSLGQKYTEDKSRHKDNEQAIFWLKKAALQGHTFASNALGWTLDRGEAPNYKEAVVWYQIAAESGMSYAQNNLGWMYRNGNGVAKDYALAFFWYKQAALQGHSDAQNNLADLYEDGKGVAQNKTLAAFWYLKSAQQGNRHAQFQIAWDYNAGEGVDQDYKQAMYWYLKAAAQGSVGAYVNIGYMYKHGQGVEKDYQAAFEWFTKAAECNDATAWYNLAIMYHYGEGRPVDLRQALDLYRKVQSSGTRDVSQEIRETEDLL

SEQ ID NO: 143905 - DNA, 996 bp, Salmonella enterica subsp. enterica serovar Typhimurium str. LT2
  CDS (1)..(996): transl_table=11
atgaatcattccataaccagtcatccctgcgacaacgtatctttagcacaattaaccgaactggcgcagtcaggaaatagtgaagctcaatatatattaggccgtttatataatgacgaacgtatagatggcagcgaagaggataagctctctttttattggttgcagcaggcagctgaacaaggacactgcgaggcacaatattggctcggcttacgatacaaagacacgcctaccgacatgaaagataatacgctggctttattctggtcagaaaaagccgcacagcaaggacaccgccacgctttcaacacattaggctgggttcaggaaggagaaaccgggatggcgccagattatgcccaggccgttgcctggtatcgcaaaggagcagaacagagccacaaccttgcgcaatataatctcgggagaatgtatcattcaggaactggcgtagagcaaaatgatacacaggcactctactggtttaaacaggcagcattacaaggccattgcgccagccaggaaagactggcgtatatgtatggcaatgggaaaggatgtcggaaaaatttatcccttgccgccctttggtacaagaagagcgcgctacaagagagcagctactcgcaatatcagatgggctattgttattacatcggaaaaggtatcaaacaagattaccagcaggcaatatactggtttcgaaaagcggcagaccagggtgacgatgatgcctataacagtatcggctggatgtacaaatgcggtcatggcgtcgagcaaaattattcgctagcactggaatggttccacaaatcagcagaatgtaacaattcatcgggctggtacaacctcggatgcatgtacagagatggacacggtaccgcacaagacctacaacaagcgctctactggttcaaaaaagcacagcccacgggcaaatggaacgtcgatgaagagatccgcaaactggaagcccaactgcacgcttaa

SEQ ID NO: 143906 - protein, 331 aa, Salmonella enterica subsp. enterica serovar Typhimurium str. LT2
MNHSITSHPCDNVSLAQLTELAQSGNSEAQYILGRLYNDERIDGSEEDKLSFYWLQQAAEQGHCEAQYWLGLRYKDTPTDMKDNTLALFWSEKAAQQGHRHAFNTLGWVQEGETGMAPDYAQAVAWYRKGAEQSHNLAQYNLGRMYHSGTGVEQNDTQALYWFKQAALQGHCASQERLAYMYGNGKGCRKNLSLAALWYKKSALQESSYSQYQMGYCYYIGKGIKQDYQQAIYWFRKAADQGDDDAYNSIGWMYKCGHGVEQNYSLALEWFHKSAECNNSSGWYNLGCMYRDGHGTAQDLQQALYWFKKAQPTGKWNVDEEIRKLEAQLHA

SEQ ID NO: 143907 - DNA, 984 bp, Shigella flexneri 2a str. 301
  CDS (1)..(984): transl_table=11
atgataatgatttttacgtcaagttgctgcgataatttatcaatagatgagattatcgaacgtgctgaaaaaggcgattgcgaggctcaatatattgttgggttttattataatcgcgatagcgcaattgactctccggacgacgaaaaggccttttactggctgaagctggccgctgagcaaggtcattgtgaagcacagtattccttagggcaaaagtataccgaggataaaagccgtcataaagataatgagcaagccatcttctggctgaaaaaagctgccctacaaggccatactttcgcttccaacgcccttggctggatactggatcgtggagaagaccccaactataaagaagcggttacctggtatcagatagccgcggagagcggaatgtcttatgcgcaaaataatcttggatggatgtacagaaatggcaacggagtcgcacaagactatacgctggcatttttctggtacaaacaagctgcattacaaggccatagttacgcacaagacaatctggccgatctttataaagacggagaaggcgttgctcaaaacaagacactcgccgcattctggtatttgaaaagcgcacagcagggtaatcggcacgcccagtttcaaattgcatgggattataacgctggcgaaggggtggaccaggactataagcaagcgatgtactggtatctgaaggctgccgctcaggaaagcgtcggcgcttacgtcaacatcggttatatgtataaacacggacaaggcgttgagaaagattatcaggctgcctttgaatggtttacgaaagccgctgaatgcaatgacgccactgcctggtataacctggccattatgtatcactacggagaaggaagacctgtcgatctccgacaggctctcgacctgtatcgtaaagttcagtcatccggaaccagagatgtcagtcaggaaattcgtgagactgaagctttactgtag

SEQ ID NO: 143908 - protein, 327 aa, Shigella flexneri 2a str. 301
MIMIFTSSCCDNLSIDEIIERAEKGDCEAQYIVGFYYNRDSAIDSPDDEKAFYWLKLAAEQGHCEAQYSLGQKYTEDKSRHKDNEQAIFWLKKAALQGHTFASNALGWILDRGEDPNYKEAVTWYQIAAESGMSYAQNNLGWMYRNGNGVAQDYTLAFFWYKQAALQGHSYAQDNLADLYKDGEGVAQNKTLAAFWYLKSAQQGNRHAQFQIAWDYNAGEGVDQDYKQAMYWYLKAAAQESVGAYVNIGYMYKHGQGVEKDYQAAFEWFTKAAECNDATAWYNLAIMYHYGEGRPVDLRQALDLYRKVQSSGTRDVSQEIRETEALL

SEQ ID NO: 143909 - DNA, 978 bp, Escherichia coli SMS-3-5
  CDS (1)..(978): transl_table=11
atgatttttacgtcaagttgctgcgataatttatcaatagaaaagattgttaaacgtgctgaaaaaggcgatagcgaggctcaatatattgttgggttttattataatcgcgatagcgcaattgactctccggacgacgaaaaagccttctactggctgaagcttgccgctgaacaaggccattgtgaagcacaatattccttagggcggaaatactccgaggataaaagccgtcataaagataatgagcaagccatcttttggctgaaaaaagctgccctacaaggccatactttcgcttccaacgcccttggctggatactggatcgtggagaagaccccaactataaagaagcggttgcctggtatcagatagccgcggagagcggaatgccttatgcgcaaaataatcttggatggatgtacagaaatggtaacggagtcgcacaagactatgcgctggcatttttctggtacaaacaagctgcattacaaggccatagttacgcgcaagacaacctggccgatctctataaagacggagaaggcgttgctcaaaacaagacactcgccgcattctggtatttgaaaagcgcacagcagggtaatcggcatgcccagtttcaaattgcatgggattataacgctggcgaaggggtggaccaggactataagcaagcgatgtactggtatctgaaggctgccgctcaggaaagcgtcggcgcttacgtcaacatcggttatatgtataaacatggacaaggcgttgagaaagattatcaggccgcctttgaatggtttatgaaagccgctgaatgcaatgacgccactgcctggtataacctggccattatgtatcactacggagaaggaagacctgtcgatctccgacaggctctcgacctgtatcgtaaagttcaggcatccggtaccagggatgtcagtcaagaaatccgtgagattgaagatttactgtaa

SEQ ID NO: 143910 - protein, 325 aa, Escherichia coli SMS-3-5
MIFTSSCCDNLSIEKIVKRAEKGDSEAQYIVGFYYNRDSAIDSPDDEKAFYWLKLAAEQGHCEAQYSLGRKYSEDKSRHKDNEQAIFWLKKAALQGHTFASNALGWILDRGEDPNYKEAVAWYQIAAESGMPYAQNNLGWMYRNGNGVAQDYALAFFWYKQAALQGHSYAQDNLADLYKDGEGVAQNKTLAAFWYLKSAQQGNRHAQFQIAWDYNAGEGVDQDYKQAMYWYLKAAAQESVGAYVNIGYMYKHGQGVEKDYQAAFEWFMKAAECNDATAWYNLAIMYHYGEGRPVDLRQALDLYRKVQASGTRDVSQEIREIEDLL

SEQ ID NO: 143911 - DNA, 984 bp, Shigella boydii CDC 3083-94
  CDS (1)..(984): transl_table=11
atgataatgatttttacgtcaagttgctgcgataatttatcaatagatgagattatcgaacgtgctgaaaaaggcgattgcgaggctcaatatattgttgggttttattataatcgcgatagcgcaattgactctccggacgacgaaaaggccttttactggctgaagctggccgccgagcaaggtcattgtgaagcacaatattccttaggacaaaagtatactgaggataaaagccgtcataaagataatgagcatgccatcttttggctgaaaaaaactgccctacaaggccatactttcgcttccaacgcccttggctggatactggatcgtggagaagaccccaattataaagaagcggttgtctggtatcagatagccgcggagagcggaatgtcttatgcgcaaaataatcttgggtggatgtacagaaatggcaacggagtcgcaaaagactatgcgctggcatttttctggtacaaacaagctgcattacaaggccatagtgacgcgcaaaacaatctggccgatctttatgaagacggaaaaggcgttgctcaaaacaagacactcgccgcattctggtatttgaaaagcgcacagcagagtaatcggcacgcccagtttcaaattgcatgggattataacgctggcgaaggggtggaccaggactataagcaagcgatgtactggtatctgaaggctgccgctcaggaaagcgtcggcgcttacgtcaacatcggttatatgtataaacacggacaaggcgttgagaaagattatcaggctgcctttgaatggtttacgaaagccgctgaatgcaatgacgccactgcctggtataacctggccattatgtatcactacggagaaggaagacctgtcgatctccgacaggctctcgacctgtatcgtaaagttcagtcatccggaaccagagatgtcagtcaggaaattcgtgagactgaagatttactgtag

SEQ ID NO: 143912 - protein, 327 aa, Shigella boydii CDC 3083-94
MIMIFTSSCCDNLSIDEIIERAEKGDCEAQYIVGFYYNRDSAIDSPDDEKAFYWLKLAAEQGHCEAQYSLGQKYTEDKSRHKDNEHAIFWLKKTALQGHTFASNALGWILDRGEDPNYKEAVVWYQIAAESGMSYAQNNLGWMYRNGNGVAKDYALAFFWYKQAALQGHSDAQNNLADLYEDGKGVAQNKTLAAFWYLKSAQQSNRHAQFQIAWDYNAGEGVDQDYKQAMYWYLKAAAQESVGAYVNIGYMYKHGQGVEKDYQAAFEWFTKAAECNDATAWYNLAIMYHYGEGRPVDLRQALDLYRKVQSSGTRDVSQEIRETEDLL

SEQ ID NO: 143913 - DNA, 996 bp, Salmonella enterica subsp. enterica serovar Agona str. SL483
  CDS (1)..(996): transl_table=11
atgaatcattccataaccagtcatccctgcgacaacgtatctttagcacaattaaccgaactggcgcagtcaggaaatagtgaagctcaatatatattaggccgtttatataatgacgaacgtatagatggcagcgaagaggataagctctctttttattggctacagcaggcggccgagcaagggcattgcgaggcgcaatattggctcggcttacgatattcagacacgcctaccagcatgaaagataatgccaaagcctcatactggttggaaaaagcagcaaagcaagggcataagcttgcgcctaacgacctggggtgggtcctggaaggagaaacaggaagtgaaccagattacgctcaggcagtattctggtatcgcgtcggtacggaacgcgggcacagctatgcgcaaaataatctcggcaaaatgtatgaaggaggtgacggtgttgagaagaatcatcaactggccttttattggtacaaacaggcggccttacaaggtgacgctaccgcccaggagaatctggcagatatgtattgggacggtcgcggcacgacaaaaaacctacgcctggctaccttatggtatttgagaagtgcgctacaggatgaagtccattcccaattccagcttggctgcgcgtatagcgaaggggaaggcgttaagcaggattatcagcaggcaatgcactggtatcaacaagctgcggcgcagggagatagcaatgcttacgttaatatcggctggatgtacaaacaaggacacggtgtcgagcgtgacgatgaagaagcacttagctggtttcatcgggcggcggaagctggcaacgttaccgcatggtataacctgggttttatgtaccgcgacgggcgcggtaccgcagtggatgtgaagcaggcgctctactggttcaaaaaagcacagcccacgggcaaatggaacgtcgacgaagagatccgcaaactggaagcccaactgcacgcttaa

SEQ ID NO: 143914 - protein, 331 aa, Salmonella enterica subsp. enterica serovar Agona str. SL483
MNHSITSHPCDNVSLAQLTELAQSGNSEAQYILGRLYNDERIDGSEEDKLSFYWLQQAAEQGHCEAQYWLGLRYSDTPTSMKDNAKASYWLEKAAKQGHKLAPNDLGWVLEGETGSEPDYAQAVFWYRVGTERGHSYAQNNLGKMYEGGDGVEKNHQLAFYWYKQAALQGDATAQENLADMYWDGRGTTKNLRLATLWYLRSALQDEVHSQFQLGCAYSEGEGVKQDYQQAMHWYQQAAAQGDSNAYVNIGWMYKQGHGVERDDEEALSWFHRAAEAGNVTAWYNLGFMYRDGRGTAVDVKQALYWFKKAQPTGKWNVDEEIRKLEAQLHA

SEQ ID NO: 143915 - DNA, 834 bp, Salmonella enterica subsp. enterica serovar Gallinarum str. 287/91
  CDS (1)..(834): transl_table=11
ttgcagcaggcagctgaacaaggacactgcgaggcacaatattggctcggcttacgatacaaagacacgcctaccgacatgaaagataatacgctggctttattctggtcagaaaaagccgcacagcaaggacaccgccacgctttcaacacattaggctgggttcaggaaggagaaaccgggatggcgccagattatgcccaggccgttgcctggtatcgcaaaggagcagaacagagccacaaccttgcgcaatataatctcgggagaatgtatcattcaggaactggcgtagagcaaaatgatacacaggcactctactggtttaaacaggcagcattacaaggccattgcgccagccaggaaagactggcgtatatgtatggcaatgggaaaggatgtcggaaaaatttatcccttgccgccctttggtacaagaagagcgcgctacaagagagcagctactcgcaatatcagatgggctattgttattacatcggaaaaggtatcaaacaagattaccagcaggcaatatactggtttcgaaaagcggcagaccagggtgacaatgatgcctataacagtatcggctggatgtacaaatgcggtcatggcgtcgagcaaaattattcgctagcactggaatggttccacaaatcagcagaatgtaacaattcatcgggctggtacaacctcggatgcatgtacagagatggacacgataccgcacaagacctacaacaagcgctctactggttcaaaaaagcacagcccacgggcaaatggaacgtcgatgaagagatccgcaaactggaagcccaactgcacgcttaa

SEQ ID NO: 143916 - protein, 277 aa, Salmonella enterica subsp. enterica serovar Gallinarum str. 287/91
MQQAAEQGHCEAQYWLGLRYKDTPTDMKDNTLALFWSEKAAQQGHRHAFNTLGWVQEGETGMAPDYAQAVAWYRKGAEQSHNLAQYNLGRMYHSGTGVEQNDTQALYWFKQAALQGHCASQERLAYMYGNGKGCRKNLSLAALWYKKSALQESSYSQYQMGYCYYIGKGIKQDYQQAIYWFRKAADQGDNDAYNSIGWMYKCGHGVEQNYSLALEWFHKSAECNNSSGWYNLGCMYRDGHDTAQDLQQALYWFKKAQPTGKWNVDEEIRKLEAQLHA

SEQ ID NO: 143917 - DNA, 984 bp, Escherichia coli SE11
  CDS (1)..(984): transl_table=11
atgataatgattttcacgtcaagttgctgcgataatttatcaatagatgagattatcgaacgtgctgaaaaaggcgattgcgaggctcaatatattgttgggttttattataatcgcgatagcgcaattgattctccggacgacgaaaaagccttttactggctgaagctgtccgctgagcaaggtcattgtgaagcacagtattccttagggcaaaagtataccgaggataaaagccgtcataaagataatgagcaagccatcttctggctgaaaaaagctgccctacaaggccatactttcgcttccaacgcccttggctggacactggatcgtggagaagcccccaattataaagaagcggttgtctggtatcagatagccgcggagagcggaatgtcttatgcgcaaaataatcttgggtggatgtacagaaatggcaacggagtcgcaaaagactatgcgctggcatttttctggtacaaacaagctgcattacaaggccatagtgacgcgcaaaacaatctggccgatctttatgaagacggaaaaggcgttgctcaaaacaagacactcgccgcattctggtatttgaaaagcgcacagcagggtaatcggcacgcccagtttcaaattgcatgggattataacgctggcgaaggggtggaccaggactataagcaagcgatgtactggtatctgaaggctgccgctcaggaaagcgtcggcgcttacgtcaacatcggttatatgtataaacacggacaaggcgttgagaaagattatcaggctgcctttgaatggtttacgaaagccgctgaatgcaatgacgccactgcctggtataacctggccattatgtatcactacggagaaggaagacctgtcgatctccgacaggctctcgacctgtatcgtaaagttcagtcatccggaaccagagatgtcagtcaggaaattcgtgagactgaagatttactgtag

SEQ ID NO: 143918 - protein, 327 aa, Escherichia coli SE11
MIMIFTSSCCDNLSIDEIIERAEKGDCEAQYIVGFYYNRDSAIDSPDDEKAFYWLKLSAEQGHCEAQYSLGQKYTEDKSRHKDNEQAIFWLKKAALQGHTFASNALGWTLDRGEAPNYKEAVVWYQIAAESGMSYAQNNLGWMYRNGNGVAKDYALAFFWYKQAALQGHSDAQNNLADLYEDGKGVAQNKTLAAFWYLKSAQQGNRHAQFQIAWDYNAGEGVDQDYKQAMYWYLKAAAQESVGAYVNIGYMYKHGQGVEKDYQAAFEWFTKAAECNDATAWYNLAIMYHYGEGRPVDLRQALDLYRKVQSSGTRDVSQEIRETEDLL

SEQ ID NO: 143919 - DNA, 978 bp, Escherichia fergusonii ATCC 35469
  CDS (1)..(978): transl_table=11
atgatttttacatcaagttgctgcgataatttatcaatagatgagattatcgaacgtgctgaaaaaggagatagtgaagcacaatatattgttgggttttattataatcgcgatagcgcagttgactctccggacgacgaaaaggccttttactggctgaagctggccgctgagcaaggccattgtgaagcacaatattccttagggcggaaatactccgaggataaaagctgtcataaagataatgaacaagccatcttttggctgaaaaaagcagcccgacaaggacatactttcgcttccaacgcccttggctggatactggatcgtggagaagaccccaactataaagaagcggttgtctggtatcagatagccgcggagagcggaatgtcttatgcgcaaaataatcttgggtggatttacagaaatggcaacggagtcacacaagattatgcgcaggcattgttctggtacaaacaagctgcattacaaggccatagttacgcacaagacaatctggccgatctttatgaagacggtaaaggtgttgcccaaaacaaagctcttgccgcattctggtatttaaaaagcgcacagcaaggtaatcggcacgctcaatttcaaattgcgtgggattataacgttggcgaaggggttgaccaggactataagcaagcaatgtactggtatctgaaggctgccgctcaggaaagcgtcgacgcttacgttaacatcggctatatgtataaacacggtcaaagcgttgagaagaattatcaggccgcctttgaatggtttacgaaagccgctgaatgcgataacgccactgcctggtataaccttgccattatgtatcattacggagaaggaagacctgtcgatctccgacaggctctcgacctgtatcgtaaagttcagtcatccggtaccagggatgtcagtcaaaaaatccgtgagattgaagatttactgtag

SEQ ID NO: 143920 - protein, 325 aa, Escherichia fergusonii ATCC 35469
MIFTSSCCDNLSIDEIIERAEKGDSEAQYIVGFYYNRDSAVDSPDDEKAFYWLKLAAEQGHCEAQYSLGRKYSEDKSCHKDNEQAIFWLKKAARQGHTFASNALGWILDRGEDPNYKEAVVWYQIAAESGMSYAQNNLGWIYRNGNGVTQDYAQALFWYKQAALQGHSYAQDNLADLYEDGKGVAQNKALAAFWYLKSAQQGNRHAQFQIAWDYNVGEGVDQDYKQAMYWYLKAAAQESVDAYVNIGYMYKHGQSVEKNYQAAFEWFTKAAECDNATAWYNLAIMYHYGEGRPVDLRQALDLYRKVQSSGTRDVSQKIREIEDLL

SEQ ID NO: 143921 - DNA, 978 bp, Escherichia coli IAI1
  CDS (1)..(978): transl_table=11
atgattttcacgtcaagttgctgcgataatttatcaatagatgagattatcgaacgtgctgaaaaaggcgattgcgaggctcaatatattgttgggttttattataatcgcgatagcgcaattgattctccggacgacgaaaaagccttttactggctgaagctggccgccgagcaaggtcattgtgaagcacaatattccttaggacaaaagtatactgaggataaaagccgtcataaagataatgagcatgccatcttttggctgaaaaaagctgccctacaaggccatactttcgcttccaacgcccttggctggatactggatcgtggagaagaccccaattataaagaagcggttgtctggtatcagatagccgcggagagcggaatgtcttatgcgcaaaataatcttgggtggatgtacagaaatggcaacggagtcgcaaaagactatgcgctggcatttttctggtacaaacaagctgcattacaaggccatagtgacgcgcaaaacaatctggccgatctttatgaagacggaaaaggcgttgctcaaaacgagacactcgccgcattctggtatttgaaaagcgcacagcagggtaatcggcatgctcagtttcaaattgcatgggattataacgctggcgaaggggtggaccaggactataagcaagcgatgtactggtatctgaaggctgccgctcaggggagcgtcggcgcttacgtcaacatcggttatatgtataaacacggacaaggcgttgagaaagattatcaggctgcctttgaatggtttacgaaagccgctgaatgcaatgacgccactgcctggtataacctggccattatgtatcactacggagaaggaagacctgtcgatctccgacaggctctcgacctgtatcgtaaagttcagtcatccggaaccagagatgtcagtcaggaaattcgtgagactgaagatttactgtag

SEQ ID NO: 143922 - protein, 325 aa, Escherichia coli IAI1
MIFTSSCCDNLSIDEIIERAEKGDCEAQYIVGFYYNRDSAIDSPDDEKAFYWLKLAAEQGHCEAQYSLGQKYTEDKSRHKDNEHAIFWLKKAALQGHTFASNALGWILDRGEDPNYKEAVVWYQIAAESGMSYAQNNLGWMYRNGNGVAKDYALAFFWYKQAALQGHSDAQNNLADLYEDGKGVAQNETLAAFWYLKSAQQGNRHAQFQIAWDYNAGEGVDQDYKQAMYWYLKAAAQGSVGAYVNIGYMYKHGQGVEKDYQAAFEWFTKAAECNDATAWYNLAIMYHYGEGRPVDLRQALDLYRKVQSSGTRDVSQEIRETEDLL

SEQ ID NO: 143923 - DNA, 978 bp, Escherichia coli UMN026
  CDS (1)..(978): transl_table=11
atgatttttacgtcaagttgctgcgataatttatcaatagatgagattatcgaacgtgctgaaaaaggcgattgcgatgctcaatatattattgggttttattataatcgcgatagcgcaattgactctccggacgacgaaaaggccttttactggctgaggctggccgctgagcaaggtcattgtgaagcacaatattccttagggcaaaagtataccgaggataaaagccgtcataaagataatgggcaagccatcttttggctgaaaaaagctgccctacaaggccatactttcgcttccaacgcccttggctggacactggatcgtggagaagaccccaactataaagaagcggttgcctggtatcagatagccgcggagagcggaatgtcttatgcgcaaaataatcttgggtggatgtacagaaatggcaacggagtcgcacaagactatacgctggcatttttctggtacaaacaagctgcattacaaggccatagtgacgcgcaaaacaatctggccgatctttatgaagacggaaaaggcgttgctcaaaacgagacactcgccgcattctggtatttgaaaagcgcacagcagggtaatcggcatgcccagtttcaaattgcatgggattataacgctggcgaaggggtggaccaggactataagcaagccatgtactggtatctgaaggctgccgctcaggggagcgtcggcgcttacgtcaacatcggttatatgtataaacacggacaaggcgttgagaaagattatcaggccgcctttgaatggtttacgaaagccgctgaatgcaatgacgccactgcctggtataacctggccattatgtatcactacggagaaggaagacctgtcgatctccgacaggctctcgacctgtatcgtaaagttcaggcatccggtaccagggatgtcagtcaagaaatccgtgagattgaagatttactgtaa

SEQ ID NO: 143924 - protein, 325 aa, Escherichia coli UMN026
MIFTSSCCDNLSIDEIIERAEKGDCDAQYIIGFYYNRDSAIDSPDDEKAFYWLRLAAEQGHCEAQYSLGQKYTEDKSRHKDNGQAIFWLKKAALQGHTFASNALGWTLDRGEDPNYKEAVAWYQIAAESGMSYAQNNLGWMYRNGNGVAQDYTLAFFWYKQAALQGHSDAQNNLADLYEDGKGVAQNETLAAFWYLKSAQQGNRHAQFQIAWDYNAGEGVDQDYKQAMYWYLKAAAQGSVGAYVNIGYMYKHGQGVEKDYQAAFEWFTKAAECNDATAWYNLAIMYHYGEGRPVDLRQALDLYRKVQASGTRDVSQEIREIEDLL

SEQ ID NO: 143925 - DNA, 996 bp, Salmonella enterica
  subsp. enterica serovar Choleraesuis str. SC-B67
  CDS (1)..(996): transl_table=11
atgaatcattccataaccagtcatccctgcgacaacgtatctttagcacaattaaccgaactggcgcagtcaggaaatagtgaagctcaatatatattaggccgtttatataatgacgaacgtatagatggcagcgaagaggataagctctctttttattggttgcagcaggcagctgaacaaggacactgcgaggcacaatattggctcggcttacgatacaaagacacgcctaccgacatgaaagataatacgctggctttattctggtcagaaaaagccgcacagcaaggacaccgccacgctttcaacacattaggctgggttcaggaaggagaaaccgggatggcgccagattatgcccaggccgttgcctggtatcgcaaaggagcagaacagagccacaaccttgcgcaatataatctcgggagaatgtatcgttcaggaactggcgtagagcaaaatgatacacaggcactctactggtttaaacaggcagcattacaaggccattgcgccagccaggaaagactggcgtatatgtatggcaatgggaaaggatgtcggaaaaatttatcccttgccgctctttggtacaagaagagcgcgctacaagagagcagctactcgcaatatcagatgggctattgttattacatcggagaaggtatcaaacaagattaccagcaggcaatatactggtttcgaaaagcggcagaccagggtgacgatggtgcctataacagtatcggctggatgtacaaatgcggtcatggcgtcgagcaaaattattcgctagcactggaatggttccacaaatcagcagaatgtaacaattcatcgggctggtacaacctcggatgcatgtacagagatggacacggtaccgcacaagacctacaacaagcgctctactggttcaaaaaagcacagcccacgggcaaatggaacgtcgatgaagagatccgcaaactggaagcccaactgcacgcttaa

SEQ ID NO: 143926 - protein, 331 aa, Salmonella enterica
  subsp. enterica serovar Choleraesuis str. SC-B67
MNHSITSHPCDNVSLAQLTELAQSGNSEAQYILGRLYNDERIDGSEEDKLSFYWLQQAAEQGHCEAQYWLGLRYKDTPTDMKDNTLALFWSEKAAQQGHRHAFNTLGWVQEGETGMAPDYAQAVAWYRKGAEQSHNLAQYNLGRMYRSGTGVEQNDTQALYWFKQAALQGHCASQERLAYMYGNGKGCRKNLSLAALWYKKSALQESSYSQYQMGYCYYIGEGIKQDYQQAIYWFRKAADQGDDGAYNSIGWMYKCGHGVEQNYSLALEWFHKSAECNNSSGWYNLGCMYRDGHGTAQDLQQALYWFKKAQPTGKWNVDEEIRKLEAQLHA

SEQ ID NO: 143927 - DNA, 984 bp, Shigella sonnei Ss046
  CDS (1)..(984): transl_table=11
atgataatggtttttacgtcaagttgctgcgataatttatcaatagatgagattatcgaacgtgctgaaaaaggcgattgcgaggctcaatatattgttgggttttattataatcgcgatagcgcaattgactctccggacgacgaaaaggccttttactggctgaagctggccgctgagcaaggtcattgtgaagcacagtattccttagggcaaaagtataccgaggataaaagccgtcataaagataatgagcaagccatcttctggctgaaaaaagctgccctacaaggccatactttcgcttccaacgcccttggctggacactggatcgtggagaagcccccaattataaagaagcggttgtctggtatcagatagccgcggagagcggaatgtcttatgcgcaaaataatcttgggtggatgtacagaaatggcaacggagtcgcaaaagactatgcgctggcatttttctggtacaaacaagctgcattacaaggccatagtgacgcgcaaaacaatctggccgatctttatgaagacggaaaaggcgttgctcaaaacaagacactcgccgcattctggtatttgaaaagcgcacagcagggtaatcggcacgcccagtttcaaattgcatgggattataacgctggcgaaggggtggaccaggactataagcaagcgatgtactggtatctgaaggctgccgctcaggaaagcgtcggcgcttacgtcaacatcggttatatgtataaacacggacaaggcgttgagaaagattatcaggctgcctttgaatggtttacgaaagccgctgaatgcaatgacgccactgcctggtataacctggccattatgtatcactacggagaaggaagacctgtcgatctccgacaggctctcgacctgtatcgtaaagttcagtcatccggaaccagagatgtcagtcaggaaattcgtgagactgaagatttactgtag

SEQ ID NO: 143928 - protein, 327 aa, Shigella sonnei Ss046
MIMVFTSSCCDNLSIDEIIERAEKGDCEAQYIVGFYYNRDSAIDSPDDEKAFYWLKLAAEQGHCEAQYSLGQKYTEDKSRHKDNEQAIFWLKKAALQGHTFASNALGWTLDRGEAPNYKEAVVWYQIAAESGMSYAQNNLGWMYRNGNGVAKDYALAFFWYKQAALQGHSDAQNNLADLYEDGKGVAQNKTLAAFWYLKSAQQGNRHAQFQIAWDYNAGEGVDQDYKQAMYWYLKAAAQESVGAYVNIGYMYKHGQGVEKDYQAAFEWFTKAAECNDATAWYNLAIMYHYGEGRPVDLRQALDLYRKVQSSGTRDVSQEIRETEDLL

SEQ ID NO: 143929 - DNA, 984 bp, Shigella dysenteriae Sd197
  CDS (1)..(984): transl_table=11
atgataatgatttttacgtcaagttgctgcgataatttgtcaatagatgagattatcgaacgtgctgaacaaggcgatagtgaggctcaatatattgttgggttttattataatcgcgatagcgcaattgactctccggacgacgaaaaggccttttactggctgaagctggccgctgagcaaggtcattgtgaagcacagtattccttagggcaaaagtataccgaggataaaagccgtcataaagataatgagcaagccatcttctggctgaaaaaagctgccctacaaggccatactttcgcttccaacgcccttggctggatactggatcgtggagaagaccccaactataaagaagcggttgcctggtatcagatagccgcggagagcggaatgtcttatgcgcaaaataatcttgggtggatgtacagaaatggcaacggagtcgcacaagactatacgctggcatttttctggtacaaacaagctgcattacaaggccatagtgacgcgcaaaacaatctggccgatctttatgaagacggaaaagacgttgctcaaaacgagacactcgccgcattctggtatttgaaaagcgcacagcagggtaatcggcatgctcagtttcaaattgcatgggattataacgctggcgaaggggtggaccaggactataagcaagcgatgtactggtatctgaaggctgccgctcaggggagcgtcggcgcttacgtcaacatcggttatatgtataaacacggacaaggcgttgagaaagattatcaggctgcctttgaatggtttacgaaagccactgaatgcaatgacgccactgcctggtataacttggccattatgtatcactacggagaaggaagacctgtcgatctccgacaggctctcgacctgtatcgtaaagttcagtcatccggaaccagagatgtcagtcaggaaattcgtgagactgaagatttactgtag

SEQ ID NO: 143930 - protein, 327 aa, Shigella dysenteriae Sd197
MIMIFTSSCCDNLSIDEIIERAEQGDSEAQYIVGFYYNRDSAIDSPDDEKAFYWLKLAAEQGHCEAQYSLGQKYTEDKSRHKDNEQAIFWLKKAALQGHTFASNALGWILDRGEDPNYKEAVAWYQIAAESGMSYAQNNLGWMYRNGNGVAQDYTLAFFWYKQAALQGHSDAQNNLADLYEDGKDVAQNETLAAFWYLKSAQQGNRHAQFQIAWDYNAGEGVDQDYKQAMYWYLKAAAQGSVGAYVNIGYMYKHGQGVEKDYQAAFEWFTKATECNDATAWYNLAIMYHYGEGRPVDLRQALDLYRKVQSSGTRDVSQEIRETEDLL

SEQ ID NO: 143931 - DNA, 984 bp, Shigella boydii Sb227
  CDS (1)..(984): transl_table=11
atgataatgatttttacgtcaagttgctgcgataatttatcaatagatgagattatcgaacgtgctgaaaaaggcgattgcgaggctcaatatattgttgggttttattataatcgcgatagcgcaattgactctccggacgacgaaaaggccttttactggctgaagctggccgccgagcaaggtcattgtgaagcacaatattccttaggacaaaagtatactgaggataaaagccgtcataaagataatgagcatgccatcttttggctgaaaaaaactgccctacaaggccatactttcgcttccaacgcccttggctggatactggatcgtggagaagaccccaattataaagaagcggttgtctggtatcagatagccgcggagagcggaatgtcttatgcgcaaaataatcttgggtggatgtacagaaatggcaacggagtcgcaaaagactatgcgctggcatttttctggtacaaacaagctgcattacaaggccatagtgacgcgcaaaacaatctggccgatctttatgaagacggaaaaggcgttgctcaaaacaagacactcgccgcattctggtatttgaaaagcgcacagcagggtaatcggcacgcccagtttcaaattgcatgggattataacgctggcgaaggggtggaccaggactataagcaagcgatgtactggtatctgaaggctgccgctcaggaaagcgtcggcgcttacgtcaacatcggttatatgtataaacacggacaaggcgttgagaaagattatcaggctgcctttgaatggtttacgaaagccgctgaatgcaatgacgccactgcctggtataacctggccattatgtatcactacggagaaggaagacctgtcgatctccgacaggctctcgacctgtatcgtaaagttcagtcatccggaaccagagatgtcagtcaggaaattcgtgagactgaagatttactgtag

SEQ ID NO: 143932 - protein, 327 aa, Shigella boydii Sb227
MIMIFTSSCCDNLSIDEIIERAEKGDCEAQYIVGFYYNRDSAIDSPDDEKAFYWLKLAAEQGHCEAQYSLGQKYTEDKSRHKDNEHAIFWLKKTALQGHTFASNALGWILDRGEDPNYKEAVVWYQIAAESGMSYAQNNLGWMYRNGNGVAKDYALAFFWYKQAALQGHSDAQNNLADLYEDGKGVAQNKTLAAFWYLKSAQQGNRHAQFQIAWDYNAGEGVDQDYKQAMYWYLKAAAQESVGAYVNIGYMYKHGQGVEKDYQAAFEWFTKAAECNDATAWYNLAIMYHYGEGRPVDLRQALDLYRKVQSSGTRDVSQEIRETEDLL

SEQ ID NO: 143933 - DNA, 978 bp, Shigella flexneri 5 str. 8401
  CDS (1)..(978): transl_table=11
atgatttttacgtcaagttgctgcgataatttatcaatagatgagattatcgaacgtgctgaaaaaggcgattgcgaggctcaatatattgttgggttttattataatcgcgatagcgcaattgactctccggacgacgaaaaggccttttactggctgaagctggccgctgagcaaggtcattgtgaagcacagtattccttagggcaaaagtataccgaggataaaagccgtcataaagataatgagcaagccatcttctggctgaaaaaagctgccctacaaggccatactttcgcttccaacgcccttggctggatactggatcgtggagaagaccccaactataaagaagcggttacctggtatcagatagccgcggagagcggaatgtcttatgcgcaaaataatcttggatggatgtacagaaatggcaacggagtcgcacaagactatacgctggcatttttctggtacaaacaagctgcattacaaggccatagttacgcacaagacaatctggccgatctttataaagacggagaaggcgttgctcaaaacaagacactcgccgcattctggtatttgaaaagcgcacagcagggtaatcggcacgcccagtttcaaattgcatgggattataacgctggcgaaggggtggaccaggactataagcaagcgatgtactggtatctgaaggctgccgctcaggaaagcgtcggcgcttacgtcaacatcggttatatgtataaacacggacaaggcgttgagaaagattatcaggctgcctttgaatggtttacgaaagccgctgaatgcaatgacgccactgcctggtataacctggccattatgtatcactacggagaaggaagacctgtcgatctccgacaggctctcgacctgtatcgtaaagttcagtcatccggaaccagagatgtcagtcaggaaattcgtgagactgaagctttactgtag

SEQ ID NO: 143934 - protein, 325 aa, Shigella flexneri 5 str. 8401
MIFTSSCCDNLSIDEIIERAEKGDCEAQYIVGFYYNRDSAIDSPDDEKAFYWLKLAAEQGHCEAQYSLGQKYTEDKSRHKDNEQAIFWLKKAALQGHTFASNALGWILDRGEDPNYKEAVTWYQIAAESGMSYAQNNLGWMYRNGNGVAQDYTLAFFWYKQAALQGHSYAQDNLADLYKDGEGVAQNKTLAAFWYLKSAQQGNRHAQFQIAWDYNAGEGVDQDYKQAMYWYLKAAAQESVGAYVNIGYMYKHGQGVEKDYQAAFEWFTKAAECNDATAWYNLAIMYHYGEGRPVDLRQALDLYRKVQSSGTRDVSQEIRETEALL

SEQ ID NO: 143935 - DNA, 978 bp, Escherichia coli B7A
  CDS (1)..(978): transl_table=11
atgattttcacgtcaagttgctgcgataatttatcaatagatgagattatcgaacgtgctgaaaaaggcgattgcgaggctcaatatattgttgggttttattataatcgcgatagcgcaattgattctccggacgacgaaaaagccttttactggctgaagctggccgccgagcaaggtcattgtgaagcacaatattccttaggacaaaagtatactgaggataaaagccgtcataaagataatgagcatgccatcttttggctgaaaaaagctgccctacaaggccatactttcgcttccaacgcccttggctggatactggatcgtggagaagaccccaattataaagaagcggttgtctggtatcagatagccgcggagagcggaatgtcttatgcgcaaaataatcttgggtggatgtacagaaatggcaacggagtcgcaaaagactatgcgctggcatttttctggtacaaacaagctgcattacaaggccatagtgacgcgcaaaacaatctggccgatctttatgaagacggaaaaggcgttgctcaaaacgagacactcgccgcattctggtatttgaaaagcgcacagcagggtaatcggcatgctcagtttcaaattgcatgggattataacgctggcgaaggggtggaccaggactataagcaagcgatgtactggtatctgaaggctgccgctcaggggagcgtcggcgcttacgtcaacatcggttatatgtataaacacggacaaggcgttgagaaagattatcaggctgcctttgaatggtttacgaaagccgctgaatgcaatgacgccactgcctggtataacctggccattatgtatcactacggagaaggaaaacctgtcgatctccgacaggctctcgacctgtatcgtaaagttcagtcatccggaaccagagatgtcagtcaagaaattcgtgagattgaagatttactgtag

SEQ ID NO: 143936 - protein, 325 aa, Escherichia coli B7A
MIFTSSCCDNLSIDEIIERAEKGDCEAQYIVGFYYNRDSAIDSPDDEKAFYWLKLAAEQGHCEAQYSLGQKYTEDKSRHKDNEHAIFWLKKAALQGHTFASNALGWILDRGEDPNYKEAVVWYQIAAESGMSYAQNNLGWMYRNGNGVAKDYALAFFWYKQAALQGHSDAQNNLADLYEDGKGVAQNETLAAFWYLKSAQQGNRHAQFQIAWDYNAGEGVDQDYKQAMYWYLKAAAQGSVGAYVNIGYMYKHGQGVEKDYQAAFEWFTKAAECNDATAWYNLAIMYHYGEGKPVDLRQALDLYRKVQSSGTRDVSQEIREIEDLL

SEQ ID NO: 143937 - DNA, 978 bp, Escherichia coli E22
  CDS (1)..(978): transl_table=11
atgattttcacgtcaagttgctgcgataatttatcaatagatgagattatcgaacgtgctgaaaaaggcgattgcgaggctcaatatattgttgggttttattataatcgcgatagcgcaattgattctccggacgacgaaaaagccttttactggctgaagctggccgctgagcaaggtcattgtgaagcacagtattccttagggcaaaagtataccgaggataaaagccgtcataaagataatgagcaagccatcttctggctgaaaaaagctgccctacaaggccatactttcgcttccaacgcccttggctggacactggatcgtggagaagcccccaattataaagaagcggttgtctggtatcagatagccgcggagagcggaatgtcttatgcgcaaaataatcttgggtggatgtacagaaatggcaacggagtcgcaaaagactatgcgctggcatttttctggtacaaacaagctgcattacaaggccatagtgacgcgcaaaacaatctggccgatctttatgaagacggaaaaggcgttgctcaaaacaagacactcgccgcattctggtatttgaaaagcgcacagcagggtaatcggcacgcccagtttcaaattgcatgggattataacgctggcgaaggggtggaccaggactataagcaagcgatgtactggtatctgaaggctgccgctcaggaaagcgtcggcgcttacgtcaacatcggttatatgtataaacacggacaaggcgttgagaaagattatcaggctgcctttgaatggtttacgaaagccgctgaatgcaatgacgccactgcctggtataacctggccattatgtatcactacggagaaggaagacctgtcgatctccgacaggctctcgacctgtatcgtaaagttcagtcatccggaaccagagatgtcagtcaggaaattcgtgagactgaagatttactgtag

SEQ ID NO: 143938 - protein, 325 aa, Escherichia coli E22
MIFTSSCCDNLSIDEIIERAEKGDCEAQYIVGFYYNRDSAIDSPDDEKAFYWLKLAAEQGHCEAQYSLGQKYTEDKSRHKDNEQAIFWLKKAALQGHTFASNALGWTLDRGEAPNYKEAVVWYQIAAESGMSYAQNNLGWMYRNGNGVAKDYALAFFWYKQAALQGHSDAQNNLADLYEDGKGVAQNKTLAAFWYLKSAQQGNRHAQFQIAWDYNAGEGVDQDYKQAMYWYLKAAAQESVGAYVNIGYMYKHGQGVEKDYQAAFEWFTKAAECNDATAWYNLAIMYHYGEGRPVDLRQALDLYRKVQSSGTRDVSQEIRETEDLL

SEQ ID NO: 143939 - DNA, 978 bp, Escherichia coli E110019
  CDS (1)..(978): transl_table=11
atgattttcacgtcaacttgctgcgataatttatcaatagatgaaattatcgaacgtgctgaaaaaggcgattgcgaggctcaatatattgttgggttttattataatcgcgatagcgcaattgattctccggacgacgaaaaagccttttactggctgaagctggccgccgagcaaggtcattgtgaagcacaatattccttaggacaaaagtatactgaggataaaagccgtcataaagataatgagcatgcaatcttttggctgaaaaaagctgccctacaaggccatactttcgcttccaacgcccttggctggatactggatcgtggagaagaccccaattataaagaagcggttgtctggtatcagatagccgcggagagcggaatgtcttatgcgcaaaataatcttgggtggatgtacagaaatggcaacggagtcgcaaaagactatgcgctggcatttttctggtacaaacaagctgcattacaaggccatagtgacgcgcaaaacaatctggccgatctttatgaagacggaaaaggcgttgctcaaaacgagacactcgccgcattctggtatttgaaaagcgcacagcagggtaatcggcatgctcagtttcaaattgcatgggattataacgctggcgaaggggtggaccaggactataagcaagcgatgtactggtatctgaaggctgccgctcaggggagcgtcggcgcttacgtcaacatcggttatatgtataaacacggacaaggcgttgagaaagattatcaggctgcctttgaatggtttacgaaagccgctgaatgcaatgacgccactgcctggtataacctggccattatgtatcactacggagaaggaagacctgtcgatctccgacaggctctcgacctgtatcgtaaagttcagtcatccggaaccagagatgtcagtcaagaaattcgtgagattgaagatttactgtag

SEQ ID NO: 143940 - protein, 325 aa, Escherichia coli E110019
MIFTSTCCDNLSIDEIIERAEKGDCEAQYIVGFYYNRDSAIDSPDDEKAFYWLKLAAEQGHCEAQYSLGQKYTEDKSRHKDNEHAIFWLKKAALQGHTFASNALGWILDRGEDPNYKEAVVWYQIAAESGMSYAQNNLGWMYRNGNGVAKDYALAFFWYKQAALQGHSDAQNNLADLYEDGKGVAQNETLAAFWYLKSAQQGNRHAQFQIAWDYNAGEGVDQDYKQAMYWYLKAAAQGSVGAYVNIGYMYKHGQGVEKDYQAAFEWFTKAAECNDATAWYNLAIMYHYGEGRPVDLRQALDLYRKVQSSGTRDVSQEIREIEDLL

SEQ ID NO: 143941 - DNA, 26 bp, Artificial sequence
  primer
atgataatgattttcacgtcaagttg

SEQ ID NO: 143942 - DNA, 26 bp, Artificial sequence
  primer
ttacagtaaatcttcagtctcacgaa

SEQ ID NO: 143943 - protein, 327 aa, Artificial sequence
  consensus sequence
  Variant (2)..(2): Xaa in position 2 is any amino acid
  Variant (6)..(6): Xaa in position 6 is any amino acid
  Variant (14)..(15): Xaa in position 14 to 15 is any amino acid
  Variant (17)..(17): Xaa in position 17 is any amino acid
  Variant (22)..(22): Xaa in position 22 is any amino acid
  Variant (25)..(25): Xaa in position 25 is any amino acid
  Variant (31)..(31): Xaa in position 31 is any amino acid
  Variant (41)..(41): Xaa in position 41 is any amino acid
  Variant (54)..(54): Xaa in position 54 is any amino acid
  Variant (70)..(70): Xaa in position 70 is any amino acid
  Variant (73)..(73): Xaa in position 73 is any amino acid
  Variant (78)..(78): Xaa in position 78 is any amino acid
  Variant (83)..(84): Xaa in position 83 to 84 is any amino acid
  Variant (94)..(94): Xaa in position 94 is any amino acid
  Variant (107)..(107): Xaa in position 107 is any amino acid
  Variant (110)..(111): Xaa in position 110 to 111 is any amino acid
  Variant (115)..(115): Xaa in position 115 is any amino acid
  Variant (123)..(123): Xaa in position 123 is any amino acid
  Variant (151)..(152): Xaa in position 151 to 152 is any amino acid
  Variant (155)..(155): Xaa in position 155 is any amino acid
  Variant (171)..(171): Xaa in position 171 is any amino acid
  Variant (174)..(174): Xaa in position 174 is any amino acid
  Variant (181)..(181): Xaa in position 181 is any amino acid
  Variant (190)..(191): Xaa in position 190 to 191 is any amino acid
  Variant (204)..(204): Xaa in position 204 is any amino acid
  Variant (218)..(218): Xaa in position 218 is any amino acid
  Variant (240)..(240): Xaa in position 240 is any amino acid
  Variant (270)..(270): Xaa in position 270 is any amino acid
  Variant (277)..(277): Xaa in position 277 is any amino acid
  Variant (294)..(294): Xaa in position 294 is any amino acid
  Variant (310)..(310): Xaa in position 310 is any amino acid
  Variant (323)..(323): Xaa in position 323 is any amino acid
  Variant (325)..(325): Xaa in position 325 is any amino acid
MXFTSXCCDNLSIXXIXERAEXGDXEAQYIXGFYYNRDSAXDSPDDEKAFYWLXLAAEQGHCEAQYSLGXKYXEDKSXHKDNXXAIFWLKKAAXQGHTFASNALGWXLDXXRGEXPNYKEAVXWYQIAAESGMSYAQNNLGWMYRNGNGVXXDYXLAFFWYKQAALQGHSXAQXNLADLYXDGKGVAQNXXLAAFWYLKSAQQXNRHAQFQIAWDYNXGEGVDQDYKQAMYWYLKAAAQXSVGAYVNIGYMYKHGQGVEKDYQAAFEWFXKAAECNXATAWYNLAIMYHYGEGXPVDLRQALDLYRKVQXSGTRDVSQEIREXEXLL

SEQ ID NO: 143944 - protein, 60 aa, Artificial sequence
  protein pattern
  Variant (6)..(6): Xaa in position 6 is any amino acid
  Variant (9)..(9): Xaa in position 9 is Ala or Thr
  Variant (12)..(13): Xaa in position 12 to 13 is Asp or Asn
  Variant (30)..(30): Xaa in position 30 is Lys or Arg
  Variant (46)..(46): Xaa in position 46 is Ala or Ser
  Variant (55)..(55): Xaa in position 55 is Glu or Lys
  Variant (59)..(59): Xaa in position 59 is any amino acid
AFEWFXKAXECXXATAWYNLAIMYHYGEGXPVDLRQALDLYRKVQXSGTRDVSQXIREXE

SEQ ID NO: 143945 - protein, 58 aa, Artificial sequence
  protein pattern
  Variant (13)..(13): Xaa in position 13 is Gln or Arg
  Variant (16)..(16): Xaa in position 16 is Ser or Thr
  Variant (21)..(21): Xaa in position 21 is any amino acid
  Variant (26)..(26): Xaa in position 26 is Glu or Gly
  Variant (27)..(27): Xaa in position 27 is any amino acid
  Variant (35)..(35): Xaa in position 35 is any or no amino acid
  Variant (37)..(37): Xaa in position 37 is any amino acid
  Variant (38)..(38): Xaa in position 38 is any or no amino acid
  Variant (51)..(51): Xaa in position 51 is any amino acid
  Variant (57)..(57): Xaa in position 57 is Ala or Asp
EQGHCEAQYSLGXKYXEDKSXHKDNXXAIFWLKKXAXXQGHTFASNALGWXLDRGEXP

SEQ ID NO: 143946 - protein, 58 aa, Artificial sequence
  protein pattern
  Variant (8)..(8): Xaa in position 8 is Gly or Ser
  Variant (22)..(22): Xaa in position 22 is Ala or Val
  Variant (44)..(44): Xaa in position 44 is Glu or Gly
  Variant (47)..(47): Xaa in position 47 is Asp or Gly
YLKSAQQXNRHAQFQIAWDYNXGEGVDQDYKQAMYWYLKAAAQXSVXAYVNIGYMYKH

SEQ ID NO: 143947 - protein, 60 aa, Artificial sequence
  protein pattern
  Variant (7)..(7): Xaa in position 7 is Ala, Thr or Val
  Variant (18)..(18): Xaa in position 18 is Pro or Ser
  Variant (27)..(27): Xaa in position 27 is Ile or Met
  Variant (35)..(35): Xaa in position 35 is Ala or Thr
  Variant (36)..(36): Xaa in position 36 is any amino acid
  Variant (39)..(39): Xaa in position 39 is Ala or Thr
  Variant (40)..(40): Xaa in position 40 is any amino acid
  Variant (42)..(42): Xaa in position 42 is Phe or Leu
  Variant (55)..(55): Xaa in position 55 is any amino acid
  Variant (58)..(58): Xaa in position 58 is Asp or Asn
NYKEAVXWYQIAAESGMXYAQNNLGWXYRNGNGVXXDYXXAXFWYKQAALQGHSXAQXNL

SEQ ID NO: 143948 - protein, 22 aa, Artificial sequence
  protein pattern
  Variant (2)..(2): Xaa in position 2 is Ile or Val
  Variant (6)..(6): Xaa in position 6 is Ser or Thr
  Variant (14)..(14): Xaa in position 14 is any or no amino acid
  Variant (16)..(16): Xaa in position 16 is any or no amino acid
  Variant (18)..(18): Xaa in position 18 is Ile or Val
  Variant (19)..(19): Xaa in position 19 is Glu or Lys
MXFTSXCCDNLSIXEXIXXRAE

SEQ ID NO: 143949 - protein, 15 aa, Artificial sequence
  protein pattern
  Variant (2)..(2): Xaa in position 2 is Ile or Val
  Variant (12)..(12): Xaa in position 12 is Ile or Val
IXGFYYNRDSAXDSP

SEQ ID NO: 143950 - protein, 15 aa, Artificial sequence
  protein pattern
  Variant (4)..(4): Xaa in position 4 is Glu or Lys
  Variant (7)..(7): Xaa in position 7 is Glu or Lys
  Variant (8)..(8): Xaa in position 8 is Asp or Gly
  Variant (13)..(13): Xaa in position 13 is Glu or Lys
  Variant (14)..(14): Xaa in position 14 is Ala or Thr
DLYXDGXXVAQNXXL

SEQ ID NO: 143951 - protein, 11 aa, Artificial sequence
  protein pattern
  Variant (10)..(10): Xaa in position 10 is Lys or Arg
DDEKAFYWLXL

SEQ ID NO: 143952 - protein, 8 aa, Artificial sequence
  protein pattern
  Variant (3)..(3): Xaa in position 3 is Gly or Ser
  Variant (7)..(7): Xaa in position 7 is Asp or Asn
GQXVEKXY

SEQ ID NO: 143953 - protein, 7 aa, Artificial sequence
  protein pattern
  Variant (3)..(3): Xaa in position 3 is Cys or Ser
  Variant (4)..(4): Xaa in position 4 is Asp or Glu
GDXXAQY

SEQ ID NO: 143954 - DNA, 936 bp, Escherichia coli
  CDS (1)..(936): transl_table=11
atggcactgccaattctgttagattgcgacccaggtcatgacgacgctatcgcaatagttctcgccctcgcctcaccagagcttgatgtcaaagcaattacgtcttccgccggaaaccagacaccagaaaaaaccttacgcaatgttctgcgtatgctgaccttgcttaatcgcaccgatattccggtagcaggcggcgcggtaaaaccgttaatgcgtgagttgattatcgcggacaatgtgcacggcgaaagcggtctcgacggcccggcattaccggaaccgacattcgcaccgcaaaactgtacggcggtagagctgatggcgaaaacgctgcgtgaaagtgcggaacctgtcaccattgtgtctaccggaccgcaaactaacgttgccttgctgctcaatagccatccggaactgcatagcaaaattgcccgtatcgtgattatgggtggcgctatggggctgggtaactggacgcctgcggctgaatttaatatttacgttgacccggaagcggcagaaattgtcttccagtcagggatcccggtggtgatggccggtctggatgttactcataaagcacaaatccacgttgaagacaccgagcgtttccgcgcgattggtaaccctgtttcaaccattgttgccgaactgctggatttcttcctcgaatatcataaagacgaaaaatggggctttgtcggcgcaccactgcatgacccatgcaccatcgcctggctgttgaaaccggagttatttacctctgttgagcgctgggttggcgtggaaacacaggggaaatatacccagggtatgacggttgttgattattattatctgacaggcaataaaccgaatgccaccgtaatggtcgatgttgatcgtcagggctttgttgatttactggctgatcgtctgaaattttacgcttaa

SEQ ID NO: 143955 - protein, 311 aa, Escherichia coli
MALPILLDCDPGHDDAIAIVLALASPELDVKAITSSAGNQTPEKTLRNVLRMLTLLNRTDIPVAGGAVKPLMRELIIADNVHGESGLDGPALPEPTFAPQNCTAVELMAKTLRESAEPVTIVSTGPQTNVALLLNSHPELHSKIARIVIMGGAMGLGNWTPAAEFNIYVDPEAAEIVFQSGIPVVMAGLDVTHKAQIHVEDTERFRAIGNPVSTIVAELLDFFLEYHKDEKWGFVGAPLHDPCTIAWLLKPELFTSVERWVGVETQGKYTQGMTVVDYYYLTGNKPNATVMVDVDRQGFVDLLADRLKFYA

SEQ ID NO: 143956 - DNA, 1321 bp, Oryza sativa
  CDS (111)..(1079)
actcaaacagccttgcctcctcctgttgagttgacccgatcccatccggtgttatccatcccttccctgatcccccatccatcgccgccgccgccgccgccgtggagacgatgacgacgacgaagaagaagctcgtcatcgacaccgacccgggaatcgatgacgccatggccatcttcgtggcgctgaggtcgccggaggtggagctgctgggcctcaccaccatcttcggcaacgtctacaccaccctcgccacccgcaacgccctccacctgctggaggctgttgggaggactgacatccccgtggcagagggatcccatgtaacaatcaagaaagccaccaagctacggattgcgagctttgttcatggctcggatggtctaggaaatcagaactttcctccgccaactgggaagcccttagatcaatcggccgccgcgtttcttgtcgagcaggcaaatctgtaccctggacaagttactgtggttgcccttggtccacttaccaacctagctttggctatagaacttgatccttctttcccgaagaagattgggcagattgtgatccttggtggtgcgtattcagttaatggaaatgtcaaccctgcagctgaggcaaatatatttggtgaccctgatgcagctgatatagttttcacctccggtgctgatattttggctgtgggaataaatattacacaccaagtagttctttctgatgctgaccgggaaaagcttgaacagtctgatagcaaatatgcccgatacttgagcaagatcctgggtctttattatgattaccacaaggacggctacttcataaaaggagtgtatcttcacgatccagcaacacttattgctgcggtagatccgtcactgatgacttacacggaaggtgtagtgagggtgcagactgatggcatcacaaagggtctcacagttttcgacacaaccaagaaaaggtatggggagataactgcgtggaccggtaagccaaccgtgaaggttgctgtgaccgttgatgctcctgccgttgtggagatgatcatgcagaggcttacgacggatgattagcagcagcagcagcagcagcagcaagcaagcagccaagggaaaaacgctgcctttgtcttgttgaacctgtcggatcttataaagaatagacaatgctgtatatcctaaattctgaagaatttgctttacatgattcgtcgtcgaggttgatcaacatcacacagaactagctagaaacagcctgatgcactgattcagaggttgacaatccatttcaattttatggccagaattcatactac

SEQ ID NO: 143957 - protein, 322 aa, Oryza sativa
MTTTKKKLVIDTDPGIDDAMAIFVALRSPEVELLGLTTIFGNVYTTLATRNALHLLEAVGRTDIPVAEGSHVTIKKATKLRIASFVHGSDGLGNQNFPPPTGKPLDQSAAAFLVEQANLYPGQVTVVALGPLTNLALAIELDPSFPKKIGQIVILGGAYSVNGNVNPAAEANIFGDPDAADIVFTSGADILAVGINITHQVVLSDADREKLEQSDSKYARYLSKILGLYYDYHKDGYFIKGVYLHDPATLIAAVDPSLMTYTEGVVRVQTDGITKGLTVFDTTKKRYGEITAWTGKPTVKVAVTVDAPAVVEMIMQRLTTDD

SEQ ID NO: 143958 - DNA, 1379 bp, Sorghum bicolor
  CDS (80)..(1060)
gtaggctgtagcatttgtcgggttggattgggttgttccgcttgggtagccgggtgggatcgaaatctgtgtggcatccatggcggcggtcgaggggacgacgaagaagaaggtaatcatcgacaccgaccccggaattgacgacgcgatggccatcttcgtggcactgcggtcgccggagctggaggtgctgggcctcaccactaccttcggcaacgtccacaccgccctcgccacccgcaacgcgctccacctgttggaggctgttggaaggacagacatccccgtggcagagggatcccatgcaacaatcaagaaagccaccaagctgaggatcgcaagcttcgtccacggttcagacggcctgggaaaccaggacttccctccaccggctaccaagcctgtagatcagtcggctgctgccttcctggttgagcaggcaaatctgtaccctggacaagttaccgtcgtcgccctcggtccacttaccaaccttgctctggcagtcgagcttgacccttcattcccgaagaagatagggcagattattattcttggcggtgcgtattcagtcaatggaaatgtgaaccctgcagctgaggcaaacatctttggggatcccgacgcggcagatattgtgttcacctgcggtgctgatattttggctgtgggactaaatgtaacccatcaagtagttctaacagatgctgaccgggagaagcttgaacagtgtgagagcaaatatgcccgctacttatgcaagataatgggcatttattttgattaccacaaggatgcctacttcataaaaggagtgtatcttcatgatccaacaacgcttattgctgctgtgaatccatcgctattgacttacacagaaggtgtcgtgagggtacagacagttggaatcacaaagggccttactgtttttgataacaccaagaaaaggtacggagagatcacagcctggactggcatgcccaccgtgaaggtcgctgtcaccgtcgatgctcctgccgtggtagagctgatgatgcagaggttgatgaccgatgactaggagcaatatcagctgattggcagcacggggattaaggctatttgcagagaaaggttggaacttggatgtgcatacctcactagaaatttggtccgcattgtcaccaaaacaaaaggatgcattgcacgctagctatccacttatgtggttatgtgcgtgccttggtgtttatgtacagtttatatgctcgataatcggcacatggccagttcgacaatgtcatacagtcatactagtaatacgtcgcgcatgcttctgagagaacagagtgaaattaacatggtgcaacacttcaaagaatttttcaagattctccgtc

SEQ ID NO: 143959 - protein, 326 aa, Sorghum bicolor
MAAVEGTTKKKVIIDTDPGIDDAMAIFVALRSPELEVLGLTTTFGNVHTALATRNALHLLEAVGRTDIPVAEGSHATIKKATKLRIASFVHGSDGLGNQDFPPPATKPVDQSAAAFLVEQANLYPGQVTVVALGPLTNLALAVELDPSFPKKIGQIIILGGAYSVNGNVNPAAEANIFGDPDAADIVFTCGADILAVGLNVTHQVVLTDADREKLEQCESKYARYLCKIMGIYFDYHKDAYFIKGVYLHDPTTLIAAVNPSLLTYTEGVVRVQTVGITKGLTVFDNTKKRYGEITAWTGMPTVKVAVTVDAPAVVELMMQRLMTDD

SEQ ID NO: 143960 - DNA, 1493 bp, Zea mays subsp. mays
  CDS (378)..(1355)
gagatggtctaacgtgatgtcatagggtgattgtcttctgttctgtctggcagttttttttttttgagaatccgatgcgatcaaggctagaattgtttatcgctcgcgggcgggaagtgtggtgacgcgtctcgatccgcgcaccgcttgggcttctcgtaggagtagtggagtactgctcagcctgtcaccgtcagcgtatgttcttgttccagttcctatttttactccaagtccactagggatcctatccagattcgtggggacactctcttcgagttccaggcttccaaggtccaagggccgtagcatttgtctggttggattgggttgttccgcttgggtagccgggtgggatcggaatctgtgtggcacccatggcggcggtcgaggggacgaagaagaaggtaatcatcgacaccgaccccggaattgatgacgcgatggccatcttcttggcgctgcggtcgccggagctggaggtgctgggcctcaccactaccttcggcaacgtccacaccgccctcgccacgcgcaacgcgctccacctgctggaggctgttggcaggactgacatccccgtggcagagggatcccatctaacgatcaagaaagccaccaaattgaggatcgcaagcttcgtccacggttcagacggcctgggaaatcaggacttccctccaccagctaccaagcctgtaaatcagtctgctgctgccttcctggttgagcaggcaaatctgtaccctggtcaagttaccgttgtcgccctcggcccacttaccaaccttgctctggcagtcgagcttgatcctgcgttcccggagaagatagggcagattattattcttggcggtgcgtattcagttaatggaaacgtgaaccctgcagctgaggcgaacatcttcggggatcctgacgcggcagatatcgtgttcacctgcggtgctgatattttggccgtgggactaaatgtaacccaccaagtcgttctaaccgatgctgaccgggagaagcttgagcagtgtgacagcaaatacgcccgctacttgtgcaagctaatgggcgtttattttgattaccacagggacgcctacttcataaaaggagcgtatcttcacgatccaacgacggttattgctgcggtgaacccatcgctgctgacttacacagaaggcgttgtgagggtacagacggtcgggatcaccaagggccttactgttttcgacaacaccaagaaaaggtacggagagatcacggcctggagtggcatgcccaccgtgaaggtcgctgtcaccgtcgatgcccctgccgtggtagagctgatagtgcagaggctgatgaccgatgactagcaacaacgccaccagctgatccggttgggatcatcatgtggttatgtgcgtgcttggtgtttacgtacagtttatatatgcttgacacgtttgctgatgcttctgagagaacgtgattaaattaaattaaacttgatt

SEQ ID NO: 143961 - protein, 325 aa, Zea mays subsp. mays
MAAVEGTKKKVIIDTDPGIDDAMAIFLALRSPELEVLGLTTTFGNVHTALATRNALHLLEAVGRTDIPVAEGSHLTIKKATKLRIASFVHGSDGLGNQDFPPPATKPVNQSAAAFLVEQANLYPGQVTVVALGPLTNLALAVELDPAFPEKIGQIIILGGAYSVNGNVNPAAEANIFGDPDAADIVFTCGADILAVGLNVTHQVVLTDADREKLEQCDSKYARYLCKLMGVYFDYHRDAYFIKGAYLHDPTTVIAAVNPSLLTYTEGVVRVQTVGITKGLTVFDNTKKRYGEITAWSGMPTVKVAVTVDAPAVVELIVQRLMTDD

SEQ ID NO: 143962 - DNA, 1548 bp, Zea mays
  CDS (239)..(1219)
gccgagccggggtctgctcagcctgtaagcgtcagcgtgttccagttccagcttctatttttgctccaaacaagtcgtgctccactagggatcctatccagattcgtggggacacccccgtccagttccagccttccaacttccaaccctctcctctccgcaggctgtagcatttgtcgggttggattgggttgttccgcttgggtagcctggtgggatcgaaatctgtgtgggatccatggcggcggtcgaggggacgacgaagaagaaggtaatcatcgacaccgaccccggaattgacgacgcgatggccatcttcgtggcactgcggtcgccggagctggaggtgctgggcctcaccactaccttcggcaacgtccacaccgccctcgccacgcgcaatgcgctccacctgttggaggctgttggaaggactgacatccccgtcgcagagggatcccatgtaacaatcaagaaagccaccaagctgaggatcgcaagctttgtccacggttctgacggcctgggaaaccaggatttccctccaccggctaccaagcctgtagatcagtcggctgctgccttcctggttgagcaagcaaatctgtaccctggacaagttaccattgtcgccctcggtccactgaccaaccttgctctggcagtggagcttgacccttcgttcccaaagaagatagggcagattattattcttggaggtgcgtattcagttaatggaaatgtgaaccctgcagctgaggcaaatatctttggggatcctgatgcggcagatattgtgttcacctgcggtgctgatattttggccgtgggactaaatgtaacccaccaagtagttctaactgatgctgacagggagaagcttgaacagtgtgatagcaaatatgcccgctacttatgcaagataatgggcatttattttgattaccacaaggatgcctacttcattaaaggagtgtatcttcatgatccaacaacggttattgctgctgtgaatccatcgctgctgacttacacagaaggtgttgtgagggtacagacggttggaatcacaaagggccttactgtttttgataacaccaagaaaaggtacggagagatcacagcctggagtggcatgcccaccgtgaaggttgctgtcaccgtcgatgcccctgccgtggtagagctgatgatgcagaggttgatgactgatgactagcagcaataccagctaattggcagcgccaccattaagacaatttccagttcttaagggagaaacaaatgttggaacatggaagtgcatttgttgttcaccagaaatttggtcgtcttgtcatcaaaacaccagaattgcattattgcacgctagctactcatttctttggtaattatgtgcgtgcttggtgtttatgtacagttttatgtgcttgataatgggcacatggccagttcgacaatgtcatacagttatactatactagtacattgcttatgcttgtgagagaacagaataaagttaaatgaagagccaaaaaaaaaaaaaaa

SEQ ID NO: 143963 - protein, 326 aa, Zea mays
MAAVEGTTKKKVIIDTDPGIDDAMAIFVALRSPELEVLGLTTTFGNVHTALATRNALHLLEAVGRTDIPVAEGSHVTIKKATKLRIASFVHGSDGLGNQDFPPPATKPVDQSAAAFLVEQANLYPGQVTIVALGPLTNLALAVELDPSFPKKIGQIIILGGAYSVNGNVNPAAEANIFGDPDAADIVFTCGADILAVGLNVTHQVVLTDADREKLEQCDSKYARYLCKIMGIYFDYHKDAYFIKGVYLHDPTTVIAAVNPSLLTYTEGVVRVQTVGITKGLTVFDNTKKRYGEITAWSGMPTVKVAVTVDAPAVVELMMQRLMTDD

SEQ ID NO: 143964 - DNA, 1317 bp, Hordeum vulgare
  CDS (105)..(1079)
ccgctcatccacttggctctgctcgcatcttccttgtcgattccatttcggttccccttgccttgctaagggaagggaagggaagggaagggatccggacggcgatggggcaggacgggcagatccgccgcgacagggtcatcatcgacacggatcccggcatcgatgacagcatgacgatcctaatggcttttggagaaccaagtgtggagatcattgggctgacaaccatattcggcaatgtcactacagagtatgctacacgcaatgcgctcttgctgtgtgagagagcagggcatcctgaggttccagtagcagagggcagccctgagcctcttaagggaggagagccacgcgttgctgactttgttcatggatccgatggtcttggtaatttgtctcttcctgcacctaccagtaagaaggttgaggaaagtgctgccgagttcatggttaataaggtctctcagtttcctggagagatatctgtacttgcattgggacccctgacaaatgtcgcattggccatcaaaagggactcgtcatttgcaagcaaggtcaaaaaaatagttgtgctgggtggagctttcttcgcagctggaaatgtcaaccctgctgctgaagcaaatatctatggagatccggatgcagcggatgtagtttttacatcaggagcagctattgatgtggttggcattaacataacaactcaatgctgttttacagacgaggatctcttggaactgaaaaactcaaaaggggtgcacgcacagttcttgtgtgacatgtgcaagttctacagagattggcatgcgaagtctgacagctttcatgggattttcctacatgatcctgtgagctttacagccttagttcatcccgagtacttcacattcaagaagggtgttgtgagagtcgagacccagggcatttgcaccggccatactttgatggatcatggattgaaaaagtggaattcagaaaatccatggtcgggttatgcaccaatttcagttgcatggacagtcaatgtgccaaaggtccttgcatatgtaaagaagctgctgatggcaccctgagaatagaaccagaggtctattctgaatctttgagccgaagtgtaatggttcaggtcaactctcatggccaaagtatatttttctgtttttagaagcaagcataggaggaagggaagcttcctagtgcaaagcaaccaatgggggtaaattctgcacatgacagacagcattgtgacagcattgattccaaacatttatatatacaactacatttcaaatttggaaaaaaaaaaaaaaa

SEQ ID NO: 143965 - protein, 324 aa, Hordeum vulgare
MGQDGQIRRDRVIIDTDPGIDDSMTILMAFGEPSVEIIGLTTIFGNVTTEYATRNALLLCERAGHPEVPVAEGSPEPLKGGEPRVADFVHGSDGLGNLSLPAPTSKKVEESAAEFMVNKVSQFPGEISVLALGPLTNVALAIKRDSSFASKVKKIVVLGGAFFAAGNVNPAAEANIYGDPDAADVVFTSGAAIDVVGINITTQCCFTDEDLLELKNSKGVHAQFLCDMCKFYRDWHAKSDSFHGIFLHDPVSFTALVHPEYFTFKKGVVRVETQGICTGHTLMDHGLKKWNSENPWSGYAPISVAWTVNVPKVLAYVKKLLMAP

SEQ ID NO: 143966 - DNA, 1209 bp, Helianthus annuus
  CDS (1)..(975)
atgttcaactgcaatggtggaatctctgaaaagattatcattgatacggatccgggcatcgatgatagcatggcgatcatgatggcttttcagacaccaaatttggagatcttaggattgacaacgatatttggtaacgtttctacaagggatgcgactcgaaacgccttgcttctgtgtgagattgcaggatatccaagtgttcctgttgccgagggtagtccagaaccgttaaagggaggggagccagagattcaagattttattcacggatccgatggattagggaacctaaatctaccgccccccaaatcgaagaaagtagaaaaatcagcatcagaatttttagttgataaagtttcggaatatcccggtgaagtatctatacttgcacttggcccgctaacaaatttggctttggcaatcaaaagggactcctcgtttgtaaccaacgttaaaagaatcgtcatactcggtggtgctttctttgcaagtggaaacattaatccggccgctgaagcaaacatatatgaggatcctgaagcagcagatattgtattcacttctggcgcaaatatcgacgttgttggcataaacatcacaacacaagtgaaaatgtcagatgaggatcttgatgaacttaagcgatcgaacgggaggcatgctcggtttttgtgggatagttgtaaattctaccgcgattggcatgtgaaatctgatggtgtttatggaattttccttcatgaccctgtttgtttcgtggcactagttcgacccgatcttttcaccttcaagaaaggggtcgttagggtcgaaacacaaggtctctgtgttggacataccctaatggaccaagggttgaagagatggaattctgaaaatccttggacaggctataaaccagtttcagttgcgtggacggtgaacgttgacagggttcttagttacattaaaaacgtgttaatgatggcgtgatttaaaaagatcacgagttaaaaaaaaataaacaatatttatgtgttcctcttggtctttgtttaatccttatttatggaaatatggggaactaagattattagattttcaccatgaacaatcacatttaatatcactatatgtaaggggtagttgttggtggaactcttatatgaggtacaacctagtacccttgtaatatgattttctcttacttttaaaaaaaaaaaaaaa

SEQ ID NO: 143967 - protein, 324 aa, Helianthus annuus
MFNCNGGISEKIIIDTDPGIDDSMAIMMAFQTPNLEILGLTTIFGNVSTRDATRNALLLCEIAGYPSVPVAEGSPEPLKGGEPEIQDFIHGSDGLGNLNLPPPKSKKVEKSASEFLVDKVSEYPGEVSILALGPLTNLALAIKRDSSFVTNVKRIVILGGAFFASGNINPAAEANIYEDPEAADIVFTSGANIDVVGINITTQVKMSDEDLDELKRSNGRHARFLWDSCKFYRDWHVKSDGVYGIFLHDPVCFVALVRPDLFTFKKGVVRVETQGLCVGHTLMDQGLKRWNSENPWTGYKPVSVAWTVNVDRVLSYIKNVLMMA

SEQ ID NO: 143968 - DNA, 957 bp, Shewanella oneidensis MR-1
  CDS (1)..(957): transl_table=11
atgacttgccctattattctggattgcgatcccggccatgacgacgccattgcgctcattttagcgctagcccatcctgatctcgttccactcgccgtcaccaccagcgccggtaaccaaacgccagataaaaccctcaataatgccttgcggatcttaaccttattaaatcgcagtgatattcctgtcgcgggcggcgccgccaaaccattagcccgtgatttaattattgccgataatgtccacggcgaaaccggactcgacggccctgcattgcctaatccaagttttagtcctcaagccattaccgcagttgaattaatggcgcagcaaattcgcaaaagtcatcagccagtaaccttaattcccacagggccgctgactaacatcgcccttttactcgcgagtcatagcgagttacacgataaaattgaacgcattgtgctgatgggcggcgcagccggcgtcggcaattggacgcctgccgccgagtttaatatttttgtcgacccagaagccgccgatattgtgtttaaatccggtattcccataaccatgtgcggccttgatgtaacccatcaagcgcagatcatggacgaagatatcgaacgtattcgggcaattcccaaccctgtggctaaatgcgtcgccgaattactggatttctttatgatttaccatagggatcctaaatggggatttgttggcgcgccgctgcacgatccatgtactattgcttggttactcaaacctgaactgtttgatgcccaagactgctgggtaggaatcgaaacccaaagcgagttaacgctggggatgacggtcgtcgatcgctatcagcttacgggtaagcccgccaatgccacagtgctgtttggactcaatagacaaggctttgttgacttgttagttcacagcttagcagcctacactccaacgtatctcaaccgcagatga

SEQ ID NO: 143969 - protein, 318 aa, Shewanella oneidensis MR-1
MTCPIILDCDPGHDDAIALILALAHPDLVPLAVTTSAGNQTPDKTLNNALRILTLLNRSDIPVAGGAAKPLARDLIIADNVHGETGLDGPALPNPSFSPQAITAVELMAQQIRKSHQPVTLIPTGPLTNIALLLASHSELHDKIERIVLMGGAAGVGNWTPAAEFNIFVDPEAADIVFKSGIPITMCGLDVTHQAQIMDEDIERIRAIPNPVAKCVAELLDFFMIYHRDPKWGFVGAPLHDPCTIAWLLKPELFDAQDCWVGIETQSELTLGMTVVDRYQLTGKPANATVLFGLNRQGFVDLLVHSLAAYTPTYLNRR

SEQ ID NO: 143970 - DNA, 1333 bp, Triticum aestivum
  CDS (72)..(1046)
acctcgctcgatccgcctgcacaaccgacgctgccccgatccccaagaatccgatccagggatccacgcccatggccgccgtcaccaagaagaagaaggtcatcatcgacaccgacccagggatcgatgacgccatggccatcttcgtcgcgctgaggtcgccggagctggaggtggtgggcctcaccaccatcttcggcaacgtctacaccgccctcgccacccacaacgcgctgcacctcctggagaccgctgggaggaccgacatccccgtcgcagaggggtcccatgtaacaatcaagaaagccaccaagctgcggattgccagcttcgtccatggttcggatggcctcggcaaccagaacttccctccgccggccggcaaggcggtggagcagtccgccgccgccttccttgttgagcaggcgaatctctaccccggacaggtcaccgtcgttgccctcggccccctcaccaaccttgcgctggctgtcgagcttgacccttctttccccaagaagattgggcagattattatcctgggtggcgcatattcagttaatggaaatgtgaaccctgcagccgaggcaaatatatttggtgatcctgatgcggctgatatagtttttacctgcggcgcggatattttggccatcggaattaacatcacgcaccaagtactcctttctgatgttgaccggaagaagcttgaagagtccgatagcaaatatgctcgctacttgagcaatatactgggttattattatgattatcacttggatgcctactccataacaggagtatatcttcatgatccgacaactcttcttgccgccgtagatccatcgctgatgacttacacggaaggagtggtgagggttcagacggatggaatcacaaagggtctcaccgttttcgacaataccaagaaaacgtatggggagataacagcgtggtgtggtaagccgactgtgaaggttgctgtcacggtcgatgcccccgctgtcgtggagctcattatgcagaggcttctcacggacgactgaaacatttcgtttgcaatgctgcagtcaagattcaagaacatacttgtcaatgttgcattatgtactgtctaccttcgggggctgagatgaaccatgggcctcttcttttgtagttcaacacttgaacatttacacttgtagcacaacacttgaatatttacacttgtagtccaacacttaagcattttacacttcaggcagaaagaccagattatagttcatttttcacttttcagttctcaatgcacatctgaataaattgtttggtgtacaaaaaaaaaaaaaaa

SEQ ID NO: 143971 - protein, 324 aa, Triticum aestivum
MAAVTKKKKVIIDTDPGIDDAMAIFVALRSPELEVVGLTTIFGNVYTALATHNALHLLETAGRTDIPVAEGSHVTIKKATKLRIASFVHGSDGLGNQNFPPPAGKAVEQSAAAFLVEQANLYPGQVTVVALGPLTNLALAVELDPSFPKKIGQIIILGGAYSVNGNVNPAAEANIFGDPDAADIVFTCGADILAIGINITHQVLLSDVDRKKLEESDSKYARYLSNILGYYYDYHLDAYSITGVYLHDPTTLLAAVDPSLMTYTEGVVRVQTDGITKGLTVFDNTKKTYGEITAWCGKPTVKVAVTVDAPAVVELIMQRLLTDD

SEQ ID NO: 143972 - DNA, 969 bp, Oryza sativa (japonica cultivar-group)
  CDS (1)..(969)
atgacgacgacgaagaagaagctcgtcatcgacaccgacccgggaatcgatgacgccatggccatcttcgtggcgctgaggtcgccggaggtggagctgctgggcctcaccaccatcttcggcaacgtctacaccaccctcgccacccgcaacgccctccacctgctggaggctgttgggaggactgacatccccgtggcagagggatcccatgtaacaatcaagaaagccaccaagctacggattgcgagctttgttcatggctcggatggtctaggaaatcagaactttcctccgccaactgggaagcccttagatcaatcggccgccgcgtttcttgtcgagcaggcaaatctgtaccctggacaagttactgtggttgcccttggtccacttaccaacctagctttggctatagaacttgatccttctttcccgaagaagattgggcagattgtgatccttggtggtgcgtattcagttaatggaaatgtcaaccctgcagctgaggcaaatatatttggtgaccctgatgcagctgatatagttttcacctccggtgctgatattttggctgtgggaataaatattacacaccaagtagttctttctgatgctgaccgggaaaagcttgaacagtctgatagcaaatatgcccgatacttgagcaagatcctgggtctttattatgattaccacaaggacgcctacttcataaaaggagtgtatcttcacgatccagcaacacttattgctgcggtagatccgtcactgatgacttacacggaaggtgtagtgagggtgcagactgatggcatcacaaagggtctcacagttttcgacacaaccaagaaaaggtatggggagataactgcgtggaccggtaagccaaccgtgaaggttgctgtgaccgttgatgctcctgccgttgtggagatgatcatgcagaggcttacgacggatgattag

SEQ ID NO: 143973 - protein, 322 aa, Oryza sativa (japonica cultivar-group)
MTTTKKKLVIDTDPGIDDAMAIFVALRSPEVELLGLTTIFGNVYTTLATRNALHLLEAVGRTDIPVAEGSHVTIKKATKLRIASFVHGSDGLGNQNFPPPTGKPLDQSAAAFLVEQANLYPGQVTVVALGPLTNLALAIELDPSFPKKIGQIVILGGAYSVNGNVNPAAEANIFGDPDAADIVFTSGADILAVGINITHQVVLSDADREKLEQSDSKYARYLSKILGLYYDYHKDAYFIKGVYLHDPATLIAAVDPSLMTYTEGVVRVQTDGITKGLTVFDTTKKRYGEITAWTGKPTVKVAVTVDAPAVVEMIMQRLTTDD

SEQ ID NO: 143974 - DNA, 942 bp, Mesorhizobium loti MAFF303099
  CDS (1)..(942): transl_table=11
atgccccaaccacgcaagatcatcatcgacaccgatcccggccaggatgatgccgtcgccattctcttggcgctcggcagcagcgaactggagatcgtcggcatcaccgccgttgccggcaacgtgccgctgaagcttaccgaaaagaatgcccgcaagatttgcgaactggccggccggccagaaatgaaagtctatgccggtgccatccgccccctggcgcgcacactggtcaccgcagaggaagtgcatggcaagaccggcctcaacggcccacagctgcccgaaccgacgatgaaactgcaggagcagtatgccgtcgacttcatcgtcgagacgctgatgaaggaggagagcggtaccattacgctctgcccgctcgggccgctgaccaacatcgcactggcgctgatccgcgaaccacggatcgcgccgcgcatcaaggaaatcgtgctgatgggcggcggtttcttcgagggcggcaacgtcacgcccgcggccgaattcaacatttatgtcgatccgcaggccgccgatctggtgttcaagtccggcatcccgatcgtgatgatgccactcgacgtcacccacaaggcgttgaccaccaccaagcgcacgcaggccttccgcgcgctcggcaccaaggtcggtatcgcgaccgccgagatgctggaattcttcgagcgctacgacgagggcaaatacggcaccgatggcggcccgctgcacgacccctgcgtcatcgcctatctcctgaagccggagctgttcaagggccgcaactgcaatgtcagcgttgagaccgcctcggaactgaccatgggcatgaccgtgatcgactggtggggtgtcaccaagcgggaaaagaacgccatggtgatgcgcgaaatcgaccatgacggcttcttcgcgttgctggtggagaggctggggcggctttag

SEQ ID NO: 143975 - protein, 313 aa, Mesorhizobium loti MAFF303099
MPQPRKIIIDTDPGQDDAVAILLALGSSELEIVGITAVAGNVPLKLTEKNARKICELAGRPEMKVYAGAIRPLARTLVTAEEVHGKTGLNGPQLPEPTMKLQEQYAVDFIVETLMKEESGTITLCPLGPLTNIALALIREPRIAPRIKEIVLMGGGFFEGGNVTPAAEFNIYVDPQAADLVFKSGIPIVMMPLDVTHKALTTTKRTQAFRALGTKVGIATAEMLEFFERYDEGKYGTDGGPLHDPCVIAYLLKPELFKGRNCNVSVETASELTMGMTVIDWWGVTKREKNAMVMREIDHDGFFALLVERLGRL

SEQ ID NO: 143976 - DNA, 945 bp, Deinococcus radiodurans R1
  CDS (1)..(945): transl_table=11
atggtttcttccttgcccgtccttctcgatggtgaccccggcctggacgacgcggtggcgtggctgctcgcctttgccagccccgaaacgcaggtgctgggcgtcacggcggtgcacggcaacgtgccgcttcagcaaggagtgcgaaataccggcgtggtgcttgcgctggccggcgagcgggcggcgggcgtgccgtactttgccggagctgaccgccccctgctgcgcgagggaatgaccgcgacgcaggtgcacggcgccaccggcctccccgccgcccacctgccagagcctgtgcgcgggccggaagccgagcacgcggtggacttcatcatccgcacggtgcgggcgaatccggggcaaatcacgctggtcgccagcggcccgctgacgaacgtggcgctcgcgtttcggttggcgcccgacctgccggggctgctgcgtgaggtcgtgtggatgggcggcagcaccgcgcagggcaaccgcacccccgccgccgagttcaacgcgctcgccgacccgcacgccgcgcacatcgtgctgcacagccccgtgccggtccgcatggtgggcctgaacgtcaccatgcagtgcatcgccacgccggagcggctggagcaactgcgtgccctcggcaaccgcgccggggcggtgtcggcggagatgctggagttctacgccggggtctaccgcgagcgctatgggctcagcggcggcgccctgcacgacccgctggcggtggcggcggcgctgagccccgagctgctcacctggcaggccatgaacgtcgaagtcgagctgagcgagggcctgaacgtgggccgcactgtctgcgacctctacggcgtgaccgaccgggaaaaaaacgtccaggtcgcggtgggcgtggacgacgcggcttttttcaagctgttgctggagcggctggggacgctgccctaa

SEQ ID NO: 143977 - protein, 314 aa, Deinococcus radiodurans R1
MVSSLPVLLDGDPGLDDAVAWLLAFASPETQVLGVTAVHGNVPLQQGVRNTGVVLALAGERAAGVPYFAGADRPLLREGMTATQVHGATGLPAAHLPEPVRGPEAEHAVDFIIRTVRANPGQITLVASGPLTNVALAFRLAPDLPGLLREVVWMGGSTAQGNRTPAAEFNALADPHAAHIVLHSPVPVRMVGLNVTMQCIATPERLEQLRALGNRAGAVSAEMLEFYAGVYRERYGLSGGALHDPLAVAAALSPELLTWQAMNVEVELSEGLNVGRTVCDLYGVTDREKNVQVAVGVDDAAFFKLLLERLGTLP

SEQ ID NO: 143978 - DNA, 936 bp, Sulfolobus solfataricus P2
  CDS (1)..(936): transl_table=11
atgagacactttataatagattgtgataccgctgaagacgacgtattaagcctatatcttttattaaagaacaacattgacgtagttgcagtaactattgttgaaggtaatatatcgtacgaacaagaggtaaagaacgcactatgggctttagaacaagtcaaccgtgaaattccagtttatcccggtgcgaataagccattattaaaaaattacataacagttgagaaggtacatggaaaaggtggaataggcgatgtaacggttgaacctaaaaggttaaaagcccaagagaaacatgcggcattagcgatcatagatttagcaaatgaatatgcgggagaattggaatttttagcgatttcacctctaactaacttagctttagcctacttattggataattcgatcgtaaagaaaattaagaaagtctgggtaatgggtggtgcagtattcggaataggtaatattacaccagtagcagagtttaacatttgggtagatccagatgcagctaaaatagtatttaacgctggtttcgatattacaatgataccgtgggatgtaataatcaattacccagtaacggatgaagagtggaatgtaatcaaaaatatgaagactagaatgagcgaactttacgtttcaatgtatttacactacagacaatactcttcaacggtacagaagataaatggtcatcctcatcctgatgcaattacaactgccatagctatcgatggaagtatagcaacgagaagagaaaaaaggtttgtagtaatagacaacaccgataatattaccagaggtatgacactagtggatagatttgatgccgacactagttggtctgacaaacctaatgctgaaatagtttatgaaataaataagaaaagctttatggaaaaaatttatgatttattaaattggttttag

SEQ ID NO: 143979 - protein, 311 aa, Sulfolobus solfataricus P2
MRHFIIDCDTAEDDVLSLYLLLKNNIDVVAVTIVEGNISYEQEVKNALWALEQVNREIPVYPGANKPLLKNYITVEKVHGKGGIGDVTVEPKRLKAQEKHAALAIIDLANEYAGELEFLAISPLTNLALAYLLDNSIVKKIKKVWVMGGAVFGIGNITPVAEFNIWVDPDAAKIVFNAGFDITMIPWDVIINYPVTDEEWNVIKNMKTRMSELYVSMYLHYRQYSSTVQKINGHPHPDAITTAIAIDGSIATRREKRFVVIDNTDNITRGMTLVDRFDADTSWSDKPNAEIVYEINKKSFMEKIYDLLNWF

SEQ ID NO: 143980 - DNA, 1002 bp, Agrobacterium tumefaciens str. C58
  CDS (1)..(1002): transl_table=11
ttgacaagtgagcacccgccgctcgaaaaaagcgctcatctcaacggcgggcaagacatggcagaacgcagaaaaatcatcatcgacaccgatccgggccaggacgacgcggcggcaatcatgctcgcctttggaagtcctgaggaaatcgacattctcggactgtgcgccgttgccggcaacgttccgctgaagctgaccagccgcaacatccgcatcatctgcgaattgtgcggccgcaccgatattcccgtctatgagggcgcggagaagccgctggtgcgcaagcccatcaccgccgagcatgttcacggcagcaccggccttaacggcccggttctcgatgaaccgaccatggaggcgcaaaagcagcatgcggtcgatttcatcatcgaaacgctgatgcgggaacccgccggcaccgtaacgctctgcacgcttggcgcgctgaccaatgtggcgctggctctcctcaaggcgccggaaattgccgatcgcgtcaaggaactggtgatgatgggcggcggcttcttcgaaggtggaaacatcacgccggcggcggaattcaacatctatgtcgacccgcaggccgccgacatcgttttccgttccggcatgcctgtcgtcatgatgccgctcgacgtcacccacaagctgctgaccaccaaggcgcgcgtcaaccgcattcgtgacattggcacgcgccctgccatcgccatggcggaaatgctggaattcttcgagcgttttgacatcgagaaatacggttcggatggcggcccgctgcatgatccgagcgtcattgcctatctcctcaagcccgaactgttcgagggccgcgagtgcaatgtcgaaatcgaggtcatttccgaactgaccatgggcatgactgtcgtggactggtggcgggtgactgaccgtcccgccaatgcccgcgtgatgcgcaatgtggatgccgacggcttctttgaattgctgaccgaacgtttcgcccggctctga

SEQ ID NO: 143981 - protein, 333 aa, Agrobacterium tumefaciens str. C58
MTSEHPPLEKSAHLNGGQDMAERRKIIIDTDPGQDDAAAIMLAFGSPEEIDILGLCAVAGNVPLKLTSRNIRIICELCGRTDIPVYEGAEKPLVRKPITAEHVHGSTGLNGPVLDEPTMEAQKQHAVDFIIETLMREPAGTVTLCTLGALTNVALALLKAPEIADRVKELVMMGGGFFEGGNITPAAEFNIYVDPQAADIVFRSGMPVVMMPLDVTHKLLTTKARVNRIRDIGTRPAIAMAEMLEFFERFDIEKYGSDGGPLHDPSVIAYLLKPELFEGRECNVEIEVISELTMGMTVVDWWRVTDRPANARVMRNVDADGFFELLTERFARL

SEQ ID NO: 143982 - DNA, 921 bp, Agrobacterium tumefaciens str. C58
  CDS (1)..(921): transl_table=11
atgggcgtgtggatcgataccgatatgggctttgacgatatcgccgccatcatggtggtgcaatcggcaggccttgccatcgacggcatctctttggtgttcggcaatgccacgctggatgcggtctgccgcaatgccgcaggcgccgtagcaagcttcggctggtcgatgccgatccatcagggccgcgccatgcccgtcctcggcgcgctcgaaaccgcgcagtccatcctcggtgaaagcggcattccgaccgccggccaaagcctgccggatgcgccggctctgccaaaaagcgatgcctttaccgctctctgcaactggctggagggtgaaggcgaaaagcgcatcctcgcgctcggcccgctcaccaatatcgccgcactttgtctcgctcggcccgatcttgccgccagaatttccgacctcacctggatggggggcgggcttaccagtggcaaccacacggcatcggccgaattcaacgccttcgccgatcccgaggcactggccatcgtgctcgcccatggcctgccgctgcgcatggtcgatctcgatgcttgccgcaaggtcatggcctcgcccgccgatgtcctgccgatccgcaccgccgacggcaggaatgcgggccttattgccgatctgtttgatggtttcatcggcatcgccaccagtcgcggtagggctgccatggcgctttacgatcccgtcgccgcagtcggctttacctccgatcatctcggctggcagcaggcgcgcatcgatgtcgaactccatgcctcgctgacgcggggaagaaccgtggtcgagacacgcgcggagaaggtgacagactttaacgcccagtttgccgtgaccgttgatgctggagccgcaaaggccgccatattggaagcattgcgccgggaggctgcccgatga

SEQ ID NO: 143983 - protein, 306 aa, Agrobacterium tumefaciens str. C58
MGVWIDTDMGFDDIAAIMVVQSAGLAIDGISLVFGNATLDAVCRNAAGAVASFGWSMPIHQGRAMPVLGALETAQSILGESGIPTAGQSLPDAPALPKSDAFTALCNWLEGEGEKRILALGPLTNIAALCLARPDLAARISDLTWMGGGLTSGNHTASAEFNAFADPEALAIVLAHGLPLRMVDLDACRKVMASPADVLPIRTADGRNAGLIADLFDGFIGIATSRGRAAMALYDPVAAVGFTSDHLGWQQARIDVELHASLTRGRTVVETRAEKVTDFNAQFAVTVDAGAAKAAILEALRREAAR

SEQ ID NO: 143984 - DNA, 927 bp, Sulfolobus tokodaii str. 7
  CDS (1)..(927): transl_table=11
atgaggcatttcataatagattgtgatacagctgaagatgacataatgagcctttttatgttactcagaaataatatagatgtccaaggaataactattgttgaaggaaacatatcttatgagcaagaaataaataacgcattatggagcttagagtttgtaggaaaagatatcccagtttatcctggtagtgatagaccgctagttaaacaattcagaagtgtcccagaggttcacggcaagggaggaattggagatgaggtagtaaaacccagtaaacttaaaccacaaaataagaaagctgtagatgccattgttgagattgctgacagatatgctggtgaattagagttcttggcaatatccccgttaacaaatcttgccttagcttacttaaaagacaagtcagtagttgaaaagataaaaaaggtttggataatgggaggaacagtgtgggggagaggaaacataaccccagttgccgaatataatatttgggtagacccagattcagcaaaaattgtttttaactctggtttcgatattaccatggtaccgtgggatgttattgttaactatccaatcaccgatgaagaatgggaacaaataaagacgatgaagactaagatggctcaattttacgttaagatttacactcattatagaaaatattctatggaaaaagagaaaataaaggggactcctcaccccgacttaattacaacttctgtggctctcaatagaaatgtagtattaaaatcggaaaggcaatatgtggatattgaaaattgtgattgcttaaccagaggaatgactgttattgactatttaggaatttggggtaaagaacccaatgctgaaataatttatgagataaacaagaaagagttctattcaatgttaatcgacttactcaattggttctag

SEQ ID NO: 143985 - protein, 308 aa, Sulfolobus tokodaii str. 7
MRHFIIDCDTAEDDIMSLFMLLRNNIDVQGITIVEGNISYEQEINNALWSLEFVGKDIPVYPGSDRPLVKQFRSVPEVHGKGGIGDEVVKPSKLKPQNKKAVDAIVEIADRYAGELEFLAISPLTNLALAYLKDKSVVEKIKKVWIMGGTVWGRGNITPVAEYNIWVDPDSAKIVFNSGFDITMVPWDVIVNYPITDEEWEQIKTMKTKMAQFYVKIYTHYRKYSMEKEKIKGTPHPDLITTSVALNRNVVLKSERQYVDIENCDCLTRGMTVIDYLGIWGKEPNAEIIYEINKKEFYSMLIDLLNWF

SEQ ID NO: 143986 - DNA, 921 bp, Sulfolobus tokodaii str. 7
  CDS (1)..(921): transl_table=11
gtgagaaaaactatatttgatacagatactgctagtgatgatgcaatagcgcttatgttagctttagattactttgaagtactaggagttacaatagttgcaggaaatgtaaaatttgaaaatgaggtgagtaacgctttatttacactagagtacttaagtaggcctgatattccagtgtatttaggtgcacaaagaccgttacttggtcaatggagaacagttgaagaagttcatggtaaaaacggtttcggggattgggagtatccaagtccattgaagaaacctgagagcgagtttgcagcagatgcaataattagattatctaaggaatatgaaggagaattagagattttagctgtatctcctttaactaatatagcattggcatatctaaaagatccaaaaattattaatagaataagaaaaatatggataatgggaggagcatttactagaggaaatacaacagaaatagctgaattcaatttctgggtagatcctgaagctgcacaaatagtactaaatgctggatttgatataaccatagttccttgggaaatagcagaagagagcgctactataacagatgaagaatggaataaaatagaagatattaatactaaaagatctgaatttttcattaaagttaatagagttctaagagagtactctaaatcagtaggttccagaggaagcgttcatccagattcgctaactgtaacgatagcctatgataattctgttgctattgaaaaggtaagtaagtatgttaatgttgagttatgttctagatctcgcggtgcaatgttaatagattggtatggtttaaataaaagaagacccaatgctgaagtagtaattaaggcagattctcaaaaatttaagaagtacctatttgattctctctcaaaagcttag

SEQ ID NO: 143987 - protein, 306 aa, Sulfolobus tokodaii str. 7
MRKTIFDTDTASDDAIALMLALDYFEVLGVTIVAGNVKFENEVSNALFTLEYLSRPDIPVYLGAQRPLLGQWRTVEEVHGKNGFGDWEYPSPLKKPESEFAADAIIRLSKEYEGELEILAVSPLTNIALAYLKDPKIINRIRKIWIMGGAFTRGNTTEIAEFNFWVDPEAAQIVLNAGFDITIVPWEIAEESATITDEEWNKIEDINTKRSEFFIKVNRVLREYSKSVGSRGSVHPDSLTVTIAYDNSVAIEKVSKYVNVELCSRSRGAMLIDWYGLNKRRPNAEVVIKADSQKFKKYLFDSLSKA

SEQ ID NO: 143988 - DNA, 945 bp, Sinorhizobium meliloti 1021
  CDS (1)..(945): transl_table=11
gtgtcaagcgcaagaaaaatcatcatcgacacggatccgggccaggacgacgcggcggcaatcatgctggccctcggcagcccggaggaaatcgaggtcctcggcatcaccgcggttgccggcaatgtcccgctgacactgacagcccgcaacgcccgcatcgtctgcgagctctgcaacaggaccgacgtcaagatcttcgcaggtgccgagcggccggtcgcacgcccgctcgtcacggccgagcacgtgcacgggaagacggggctcgatggccctgcgctcgacgagccgacgatgccgcttcaagagcagcacgccgtcgacttcatcgtcgaaacgctgcgcgcggaggcgccgggtgccgtgacgctttgtacgctcggaccgctgacgaatatcgccctggccctgacaaaggctccggaaatcgcaccatcggtacgcgagctcgtgatgatgggcggcggcttcttcgagggcggcaacataacgcctgcggcggaattcaacatctatgtcgatccggaggcagccgagatcgtcttccgctccggcatcccgatcgtcatgatgcccctcgacgtcacccatcgcgttctgacacggaagactcgcgtggagaaaatccgtgcgatcggcagtccggcggcagtggcccttgctgagatgctggaattcttcgagcgtttcgacatcgagaaatacggtaccgacggcgggccgctgcacgatccgaccgtcatcgcctatatcttgcggccggagctcttcacagggcgggactgcaacgtcgagatcgaaacggcgtctccgctcaccacgggtatgaccgtggtcgactggtggcaggtcaccggccgtgcgcacaacgccaaggtcatgcggcacatcgacgacgagggcttcttcgagcttttggccgagcgccttgcgcggatctga

SEQ ID NO: 143989 - protein, 314 aa, Sinorhizobium meliloti 1021
MSSARKIIIDTDPGQDDAAAIMLALGSPEEIEVLGITAVAGNVPLTLTARNARIVCELCNRTDVKIFAGAERPVARPLVTAEHVHGKTGLDGPALDEPTMPLQEQHAVDFIVETLRAEAPGAVTLCTLGPLTNIALALTKAPEIAPSVRELVMMGGGFFEGGNITPAAEFNIYVDPEAAEIVFRSGIPIVMMPLDVTHRVLTRKTRVEKIRAIGSPAAVALAEMLEFFERFDIEKYGTDGGPLHDPTVIAYILRPELFTGRDCNVEIETASPLTTGMTVVDWWQVTGRAHNAKVMRHIDDEGFFELLAERLARI

SEQ ID NO: 143990 - DNA, 924 bp, Nostoc sp. PCC 7120
  CDS (1)..(924): transl_table=11
atgacaaaacaactagtgttaatggatcatgatggtggtgtagatgattatctagcaactatgctgctgttgacgatggataatgtgcaactcatgggtgttgttgttactcctgctgattgttatgtccagcctgcggtgagtgctacgcgtaaaattattgatttgatgggattttctcatatcccagtggcagaaagtactgtacgcgggattaatccgtttcctcggctgtatcggcgtgattcgtttattgttgaccatctgcctattctcaatcaaaccgaattgattcatacacctttggttgaggaaactggtcaagattttatggtcagagtattgcaagaagcactagaacccgtaacattaatggttacaggcccactcacaacggttgcagttgctttagaccaagcaccagacattgaagccaagattgacaagattgtctggatgggtggcgctttgaatgttcctggtaatgtggaaaaaagtttagaggctggacaagatgggtctgccgaatggaatgtctattgggatgcagtttcagctgcacgagtatggcaaagggaaattaagattattatgtgtcccttagatttgactaacgatgtaccagtgacatctgagttagtatacaaaatggggcgacaaagacattatcccgtatctgatttagctggacaatgttatgccttagttatcccacaagattattatttctgggatgtgttagcaacggcttatttaggacacccagaattttatcaactccgcgaatgggagacagaaattattactagtggtttgagtcagggacggactaaagttgtcactggtgggcgcaagattttagctatggataaagtggataaggatgctttttatgcttacattttgcaacagtgggcaaggtaa

SEQ ID NO: 143991 - protein, 307 aa, Nostoc sp. PCC 7120
MTKQLVLMDHDGGVDDYLATMLLLTMDNVQLMGVVVTPADCYVQPAVSATRKIIDLMGFSHIPVAESTVRGINPFPRLYRRDSFIVDHLPILNQTELIHTPLVEETGQDFMVRVLQEALEPVTLMVTGPLTTVAVALDQAPDIEAKIDKIVWMGGALNVPGNVEKSLEAGQDGSAEWNVYWDAVSAARVWQREIKIIMCPLDLTNDVPVTSELVYKMGRQRHYPVSDLAGQCYALVIPQDYYFWDVLATAYLGHPEFYQLREWETEIITSGLSQGRTKVVTGGRKILAMDKVDKDAFYAYILQQWAR

SEQ ID NO: 143992 - DNA, 1056 bp, Ralstonia solanacearum GMI1000
  CDS (1)..(1056): transl_table=11
atggctacgtttccgaatgtcccccgtcgcgcattcctgaacctggtcagcctgtttgccggcggcgcgctgctgccggcaagctcgcaagccgttggcctgagcgcccccgctcccgcctccgtgatcatcgatgccgatccaggacaggacgacgcgatcgcgatcctgttcgcgctcggggcgagggggcgcctcgacgtgcgtgccctgaccgtcgtggcgggcaatgtgccgctgggcctgaccgagcgcaatgcgcgcatcattcgcgactgggcgggccgcacgcatgcgttgccggtctacgccggctgcgcggggccgctgacgcgcgagctggtcacggctgcccacgtgcatggcaagaccggtcttgaaggtgtcgatctgcccgcgccgttggcaccgctggcgtcgcagcacgcggtgtcgtacctggttgatacgctcacgcaggcggcgccgaacagcgtgacgctgtgtgcgctcggaccactgaccaacatcgccagcgcgctgagcgaggctccgcagatccgccccgcgctgcgcgagatcgtgctgatgggcggtgcgcatttcgagcgcggcaacatcacgccggccgcggagttcaacatctacgtcgacccgcaggccgccgagatcgtgttcggcagcggcgtgccgatcgtcgtgctgccgcgcgacgtcgccatgaaggcgcagatcacgctggcgcgggttgcaccgttccgcgggctcggcaaccgctgcggcgcgatcgtcgccgacatcatggcggccgagatcgcgtaccagaagacgcgccgcggcgtcgagcgggcgccgatgtacgatccgaccgcggtcggttatctgttcgacccgtcgatgttcaacgggcgcaaggtgaacgtggtggtcgaaaccgccggccagtggacgctgggcgagaccgtcgtcgactgggaaggccgcagcggccgcgcaccgaacgcgatgtggatccacgacgtcgatgcggaccgcttctatgccgcgctgctcgacagcgtcgcgaagctgccctaa

SEQ ID NO: 143993 - protein, 351 aa, Ralstonia solanacearum GMI1000
MATFPNVPRRAFLNLVSLFAGGALLPASSQAVGLSAPAPASVIIDADPGQDDAIAILFALGARGRLDVRALTVVAGNVPLGLTERNARIIRDWAGRTHALPVYAGCAGPLTRELVTAAHVHGKTGLEGVDLPAPLAPLASQHAVSYLVDTLTQAAPNSVTLCALGPLTNIASALSEAPQIRPALREIVLMGGAHFERGNITPAAEFNIYVDPQAAEIVFGSGVPIVVLPRDVAMKAQITLARVAPFRGLGNRCGAIVADIMAAEIAYQKTRRGVERAPMYDPTAVGYLFDPSMFNGRKVNVVVETAGQWTLGETVVDWEGRSGRAPNAMWIHDVDADRFYAALLDSVAKLP

SEQ ID NO: 143994 - DNA, 945 bp, Agrobacterium tumefaciens str. C58
  CDS (1)..(945): transl_table=11
atggcagaacgcagaaaaatcatcatcgacaccgatccgggccaggacgacgcggcggcaatcatgctcgcctttggaagtcctgaggaaatcgacattctcggactgtgcgccgttgccggcaacgttccgctgaagctgaccagccgcaacatccgcatcatctgcgaattgtgcggccgcaccgatattcccgtctatgagggcgcggagaagccgctggtgcgcaagcccatcaccgccgagcatgttcacggcagcaccggccttaacggcccggttctcgatgaaccgaccatggaggcgcaaaagcagcatgcggtcgatttcatcatcgaaacgctgatgcgggaacccgccggcaccgtaacgctctgcacgcttggcgcgctgaccaatgtggcgctggctctcctcaaggcgccggaaattgccgatcgcgtcaaggaactggtgatgatgggcggcggcttcttcgaaggtggaaacatcacgccggcggcggaattcaacatctatgtcgacccgcaggccgccgacatcgttttccgttccggcatgcctgtcgtcatgatgccgctcgacgtcacccacaagctgctgaccaccaaggcgcgcgtcaaccgcattcgtgacattggcacgcgccctgccatcgccatggcggaaatgctggaattcttcgagcgttttgacatcgagaaatacggttcggatggcggcccgctgcatgatccgagcgtcattgcctatctcctcaagcccgaactgttcgagggccgcgagtgcaatgtcgaaatcgaggtcatttccgaactgaccatgggcatgactgtcgtggactggtggcgggtgactgaccgtcccgccaatgcccgcgtgatgcgcaatgtggatgccgacggcttctttgaattgctgaccgaacgtttcgcccggctctga

SEQ ID NO: 143995 - protein, 314 aa, Agrobacterium tumefaciens str. C58
MAERRKIIIDTDPGQDDAAAIMLAFGSPEEIDILGLCAVAGNVPLKLTSRNIRIICELCGRTDIPVYEGAEKPLVRKPITAEHVHGSTGLNGPVLDEPTMEAQKQHAVDFIIETLMREPAGTVTLCTLGALTNVALALLKAPEIADRVKELVMMGGGFFEGGNITPAAEFNIYVDPQAADIVFRSGMPVVMMPLDVTHKLLTTKARVNRIRDIGTRPAIAMAEMLEFFERFDIEKYGSDGGPLHDPSVIAYLLKPELFEGRECNVEIEVISELTMGMTVVDWWRVTDRPANARVMRNVDADGFFELLTERFARL

SEQ ID NO: 143996 - DNA, 975 bp, Agrobacterium tumefaciens str. C58
  CDS (1)..(975): transl_table=11
atggatgagggcattatgcataaagtgatattcgatacggaccccggtgtggatgatgccatggcgcttcttttcctgcaccgtcaccccgatatcgatctgatcggtgtcaccacggttttcggtaatgcgcccatcgacatcaccacccgcaatgcgcttttcctcaagcgggaatggcagatgaccgcgcctgttgcgaaaggcgctggcgtgacctttgatcccgcccgcaaggaaggccactggccgaccttcattcatggcgaaaatggcctcggtgatatcgatattcccgagaccatcgacctgccgctcgatccgcgtcccgcgcatcgcttcattatcgagaccgtgaaggccaatcccggcgaggtgacgctgatcgccgttggccgcatgaccaatctggcgctggcattgcgcgaggagccggattttgcagcattggtgaagcaggtcatcgtcatgggcggcgccttcgatatcaacggcaatgtttcgccggcggccgaggccaatattcacggtgatccggaagcggccgatctcgtcttcaccgccccgtggcgcgtggtggtcgtcggtctcgatgtcaccacaaaaacggtaatgaccagcgctttcatggcggagatggctgaagccggcggcaagcccgtacagctgctttctgacctgtcgcaattctacatcgatttttacaagacccgcaccggcgatggcatggtggtgcatgacagctgcgcctgcgtctatctcgtggcgcctgagctgtttacgacccgcagcggcccggtgcgcgtcgtctgcggtggccttgccgatggcgagacgatccagaagccggatggccgcgcctttccaccgggtgactgggatgggcatccaagccagctcatctgcacggatatcaagccggagcgcgtgctttcggtcatccgcgcggcaattgtgaagggcgagcgcggctga

SEQ ID NO: 143997 - protein, 324 aa, Agrobacterium tumefaciens str. C58
MDEGIMHKVIFDTDPGVDDAMALLFLHRHPDIDLIGVTTVFGNAPIDITTRNALFLKREWQMTAPVAKGAGVTFDPARKEGHWPTFIHGENGLGDIDIPETIDLPLDPRPAHRFIIETVKANPGEVTLIAVGRMTNLALALREEPDFAALVKQVIVMGGAFDINGNVSPAAEANIHGDPEAADLVFTAPWRVVVVGLDVTTKTVMTSAFMAEMAEAGGKPVQLLSDLSQFYIDFYKTRTGDGMVVHDSCACVYLVAPELFTTRSGPVRVVCGGLADGETIQKPDGRAFPPGDWDGHPSQLICTDIKPERVLSVIRAAIVKGERG

SEQ ID NO: 143998 - DNA, 996 bp, Brucella melitensis 16M
  CDS (1)..(996): transl_table=11
ttgagcaaacatgcagtatcatgcgcaatcccctcccaacgaactcatcaggaaaccaccatggcccgtaaaatcattatcgataccgatcccggtcaggacgatgccgtcgccattttgctggcgcttgcaagccctgaactcgacattctcggcattaccgccgttgcaggaaatggcccgctggcgcgcacagaagtcaatgcccgcacggtctgcgaagtggcgaaaaagccggacacaaaagtatttgcaggctccatccgcccattggtgcgcccgcttgtcaccgctgaaaacgttcatggcaagaccggcctcgatggctatgacctgcccgcccccaccatgccgcttcaagcccagcatggcgttgatttcatcattgaaacactgatgaaggaagaaccgggcaccgtcacactctgcccgatcgggccgctgaccaacatcgcttccgcgctgatccgcgagtcgaagattgccgggcgcgtcaaggaaatcgtgctgatgggcggcggctatttcgagggcggcaacatcacgccatcggcggaattcaacatctatgtcgatccgcatgccgcatcggttgtcttcagctccggcatcaagatcaccatgttgccgctcgatgtcacgcacaaggttctcaccactgaaaagcgcatcgccgccattcgcaacataggcagccatgtcggcgaagtggtcgcggcctggcttgagtttttcgagcgttatgatgaagccaaatacggcaccgatggtgccccactgcatgacccgaacgtcatcgcctatctcatcaagccggagctttattcaggccgtgcatgcaatgtggaaatcgagatcaattcggaactgaccatcggcgaaacagtcgttgactggtgggaggtgacagaccgtccgaagaatgccttcttcatcaaggatgtggatgccgatggcttcttcagcctgctgacggagcgtctggcgacgctttga

SEQ ID NO: 143999 - protein, 331 aa, Brucella melitensis 16M
MSKHAVSCAIPSQRTHQETTMARKIIIDTDPGQDDAVAILLALASPELDILGITAVAGNGPLARTEVNARTVCEVAKKPDTKVFAGSIRPLVRPLVTAENVHGKTGLDGYDLPAPTMPLQAQHGVDFIIETLMKEEPGTVTLCPIGPLTNIASALIRESKIAGRVKEIVLMGGGYFEGGNITPSAEFNIYVDPHAASVVFSSGIKITMLPLDVTHKVLTTEKRIAAIRNIGSHVGEVVAAWLEFFERYDEAKYGTDGAPLHDPNVIAYLIKPELYSGRACNVEIEINSELTIGETVVDWWEVTDRPKNAFFIKDVDADGFFSLLTERLATL

SEQ ID NO: 144000 - DNA, 969 bp, Arabidopsis thaliana
  CDS (1)..(969)
atggcgataggagaccgcaagaagattatcatcgatactgatcctggaatcgatgatgcaatggcgatattcgtagctttaaattcacctgaagttgatgtcattggcctcactactatctttggaaacgtgtataccactctcgccactcgaaacgccttgcatttgttggaggttgcgggtaggaccgatattccggtggctgaaggaacacataaaaccttcttgaacgatacgaagcttcgaatagctgactttgttcatggaaaagatgggcttggcaaccaaaacttccctccacctaaaggaaaaccaattgaaaagtctggacctgagtttttagttgaacaagcaaagctttgccctggtgaaatcacggttgttgctttgggaccactaacaaatctcgcgttggctgttcagcttgatccagagttttcgaaaaatgtcggacaaattgttcttcttggtggagcatttgcagtaaacggaaatgtaaatccagcttcggaagctaatatttttggcgatcccgaagctgcagatattgtgttcacatgtggggccgatataattgctgtgggaatcaatgtgacccatcaagttattatgacagctgatgacaaggacaaactagcatcatcgaaggggaaattagctcaatatctctgtaaaatccttgatgtgtactatgattatcatctcacggcttacgaaatcaaaggtgtgtaccttcatgatcctgcgacgatccttgcggctttccttccttctctattcacttatacagaaggagttgctagagtgcagacaagtggtatcactaggggactcactttactgtacaacaatcttaagaggtttgaggaagcgaacgagtggtcagacaaaccaacggtaaaagtggcagtgacggttgatgctcctgcagtcgtgaagctcataatggataggcttatggagtcttaa

SEQ ID NO: 144001 - protein, 322 aa, Arabidopsis thaliana
MAIGDRKKIIIDTDPGIDDAMAIFVALNSPEVDVIGLTTIFGNVYTTLATRNALHLLEVAGRTDIPVAEGTHKTFLNDTKLRIADFVHGKDGLGNQNFPPPKGKPIEKSGPEFLVEQAKLCPGEITVVALGPLTNLALAVQLDPEFSKNVGQIVLLGGAFAVNGNVNPASEANIFGDPEAADIVFTCGADIIAVGINVTHQVIMTADDKDKLASSKGKLAQYLCKILDVYYDYHLTAYEIKGVYLHDPATILAAFLPSLFTYTEGVARVQTSGITRGLTLLYNNLKRFEEANEWSDKPTVKVAVTVDAPAVVKLIMDRLMES

SEQ ID NO: 144002 - DNA, 1011 bp, Arabidopsis thaliana
  CDS (1)..(1011)
atggattgtggtatggagaattgtaatggtgggatctcaaacggtgacgttttgggtaagcatgagaagctcattatcgatacagacccaggaattgatgatagcatggcgatattgatggcgtttcaaacaccggagctggagatattaggattaactactgtgtttggtaatgtttctacacaagatgctactcgcaacgctttactcttgtgtgagattgctggcttccctgatgttcccgttgcagaaggaagttccgaacctttaaagggtggaattccgcgtgttgctgattttgtgcatggtaaaaacggactaggagatgtctctcttcctcctccgagtagaaagaaatctgagaaaagtgcagctgagtttctagatgagaaggtcgaagaatatccgggtgaagtcaccattctcgccctcggacctctaaccaacctggcattagccatcaaacgcgatagttcatttgcgagcaaggtgaagaaaattgttattcttggtggagctttcttttctttgggaaatgtcaatcctgcagctgaggctaatatatatggtgacccggaagcagctgatgttgttttcacatctggagcggatatcactgttgtcggtataaacatcacaacccaacttaaactatcagatgatgacctcttggagcttggtaactgcaaggggaaacactctaaattgataagcgatatgtgcaaattttatagagattggcacgtcaaatctgatggtgtttacggagtgtacctccatgacccagtcagctttgtggctgtagtacggcctgatttattcacatataagaaaggcgttgttcgggtggagactcaagggatatgtgttggccacacgctcatggatcaaggcctcaagagatggaacggaagcaatccgtgggtgggatattcaccgatatcagttgcttggacggttgacgtagaaggagttttggaatatgtcaaagcaaagctgatgaagccataa

SEQ ID NO: 144003 - protein, 336 aa, Arabidopsis thaliana
MDCGMENCNGGISNGDVLGKHEKLIIDTDPGIDDSMAILMAFQTPELEILGLTTVFGNVSTQDATRNALLLCEIAGFPDVPVAEGSSEPLKGGIPRVADFVHGKNGLGDVSLPPPSRKKSEKSAAEFLDEKVEEYPGEVTILALGPLTNLALAIKRDSSFASKVKKIVILGGAFFSLGNVNPAAEANIYGDPEAADVVFTSGADITVVGINITTQLKLSDDDLLELGNCKGKHSKLISDMCKFYRDWHVKSDGVYGVYLHDPVSFVAVVRPDLFTYKKGVVRVETQGICVGHTLMDQGLKRWNGSNPWVGYSPISVAWTVDVEGVLEYVKAKLMKP

SEQ ID NO: 144004 - DNA, 1035 bp, Drosophila melanogaster
  CDS (1)..(1035)
atggacaagaagcatcgcctcgtggtctacgactgcgacattgggaccgatgatgcctggggattggccatgttgctgcgcgcggaggagctaactctgcgcgaaggaaggacctgcaaagtgttggccataacaacggtgcatggcaacacggatgcggacaatggaacactgaatgccctgcgggtgctgcacacgttgaacaggcgcgatgttccggtctttaggggctgttacgaatccatagtgccacgcacttgggagtataccaactgtttccatggccaggatggcctaaacgatgtgggcaactatcctgtggtcgatgtggagcaggaactgcaaccggagcacgctgtcaatgccatgtaccgcctggccagagctaatcccggccaagtggactttctgctgtgcggaccacttaccaactttgccaactgcatcaatttgtatggaaactcatttctgacgaacattggtcgagtctatataatgggtggcaacatattcggcaagggtaatgtcacgaaaagtgccgaattcaatttcatgatggatcccgaggcggcgcacattaccctggagcgtctgctggaaccggcgatcatcctgccctgggagccctgcatcgatggagagttcgacaccaccctcgactggcgactgaatgtcctcggagcggttgatcatccctttatagagctactcacacgcgtggaacgctccatgctggagccgcgaggattcgtgaagtggatcagttgtgattccctactcaccgccgcctatctcttcccggatgcgatgatcgccgaacagcggcagtactacgccaccgtggagctgagtggcatccacacccgtggccagatggtgctggatcacctgcgcggccggaaagtggacgacattcatggcaagaagataaatgtgcacatcattaggcgcctcactagtggagcgaccttccgcacgatcatcgcctggacgggattccttcccaatgccgatatcgcacaactatgcgcttag

SEQ ID NO: 144005 - protein, 344 aa, Drosophila melanogaster
MDKKHRLVVYDCDIGTDDAWGLAMLLRAEELTLREGRTCKVLAITTVHGNTDADNGTLNALRVLHTLNRRDVPVFRGCYESIVPRTWEYTNCFHGQDGLNDVGNYPVVDVEQELQPEHAVNAMYRLARANPGQVDFLLCGPLTNFANCINLYGNSFLTNIGRVYIMGGNIFGKGNVTKSAEFNFMMDPEAAHITLERLLEPAIILPWEPCIDGEFDTTLDWRLNVLGAVDHPFIELLTRVERSMLEPRGFVKWISCDSLLTAAYLFPDAMIAEQRQYYATVELSGIHTRGQMVLDHLRGRKVDDIHGKKINVHIIRRLTSGATFRTIIAWTGFLPNADIAQLCA

SEQ ID NO: 144006 - DNA, 933 bp, Schizosaccharomyces pombe 972h-
  CDS (1)..(933)
atgaaaataataattgatacagatccaggtcaagatgatgccataactgctctactggctattgctagcccagaaattgagctgttgggtgtgacaacagttgctggaaatgttcctgtatccatgaccacaagaaatgcgcttcaaatgttggatttagcaggacgcccggacattccagtatatgccggatcaaacaagcctctgctacgggctccaattacagctactcatgttcatggtgctagtggttttgaaggggcagttcttcctcctccctctagaaaagagaacgaaggacatgctgtcgatttcatcattgatacactacggaacaatgaacctggaaccatcacaatttgtaccattggccctttaactaatattgctttagcattaaataaagcacccgaggtcatacagcgtgctaaacaaattgtaatgatggcaggtgctttttcagaagttggcaacattacacctgctgcggagtttaacatatacgtggatcctcatgcggcacagatggttctttcttctggaatacctatcgttatgatgccgttggatataacacatcaattgcatacaagcgccaaacgaattgcacgcatggaagctttgccaaatagagttggtcctgtagtagctgcttggttacgtatggaaaaagcatacgaagctaaaaaatacgggactgatggagggcctcttcatgatcccaataccgttatgtggcttttacgcccagacatctattctggtagaaaggttaatgtgcaaatagaaacacaaagtgaactaactatgggtatgagcgttgtggattggtggcaggttggtcttttaccagctaatgtgacatttttaaggacagttgatgatgatgagttttacgaagttttgatagaaagacttggacgtcttccttag

SEQ ID NO: 144007 - protein, 310 aa, Schizosaccharomyces pombe 972h-
MKIIIDTDPGQDDAITALLAIASPEIELLGVTTVAGNVPVSMTTRNALQMLDLAGRPDIPVYAGSNKPLLRAPITATHVHGASGFEGAVLPPPSRKENEGHAVDFIIDTLRNNEPGTITICTIGPLTNIALALNKAPEVIQRAKQIVMMAGAFSEVGNITPAAEFNIYVDPHAAQMVLSSGIPIVMMPLDITHQLHTSAKRIARMEALPNRVGPVVAAWLRMEKAYEAKKYGTDGGPLHDPNTVMWLLRPDIYSGRKVNVQIETQSELTMGMSVVDWWQVGLLPANVTFLRTVDDDEFYEVLIERLGRLP

SEQ ID NO: 144008 - DNA, 939 bp, Corynebacterium glutamicum ATCC 13032
  CDS (1)..(939): transl_table=11
atgaccaccaagatcatcctcgactgcgatccaggacacgacgacgctgtagccatgctgctcgcagccggcagcccagaaattgaactgcttggaatcaccacggtcggcggcaaccagaccttggacaaggtcacccacaatacgcaggtcgtagccaccatcgctgatatcaatgcgcccatctaccgcggtgtcacccgaccattggtgcgccccgttgaggtagccgaagatatccacggcgataccggcatggaaatccacaagtacgaactgcctgaaccaaccaagcaggtagaagacacccacgcggtggatttcatcatcgataccatcatgaataacgagcccggcagcgtagcgctggttcccaccggaccactgaccaacatcgcgctggcagtccggaaagaaccacgcatcgccgagcgagtcaaggaagttgtcctcatgggcgggggctaccacgtaggaaactggaccgccgtagctgaattcaacatcaagatcgaccccgaagcagcccacatcgtattcaacgaaaagtggccactgactatggtcggcctcgaccttacccaccaggcgctcgcaacacctgagatcgaagccaagttcaacgagctgggcaccgacgtcgccgacttcgtcgtcgcgcttttcgacgctttccgcaagaattaccaggacgcacagggttttgataacccaccagtacacgacccttgtgctgttgcataccttgttgacccaaccgtattcaccacccgcaaagcaccactcgatgtggagctgtacggcgcactcaccacaggcatgaccgttgctgatttccgcgcaccggctccagcagattgcaccacccaagtagctgttgacctggactttgataaattctggaacatggtgatcgatgcagtaaagcgcatcggatag

SEQ ID NO: 144009 - protein, 312 aa, Corynebacterium glutamicum ATCC 13032
MTTKIILDCDPGHDDAVAMLLAAGSPEIELLGITTVGGNQTLDKVTHNTQVVATIADINAPIYRGVTRPLVRPVEVAEDIHGDTGMEIHKYELPEPTKQVEDTHAVDFIIDTIMNNEPGSVALVPTGPLTNIALAVRKEPRIAERVKEVVLMGGGYHVGNWTAVAEFNIKIDPEAAHIVFNEKWPLTMVGLDLTHQALATPEIEAKFNELGTDVADFVVALFDAFRKNYQDAQGFDNPPVHDPCAVAYLVDPTVFTTRKAPLDVELYGALTTGMTVADFRAPAPADCTTQVAVDLDFDKFWNMVIDAVKRIG

SEQ ID NO: 144010 - DNA, 981 bp, Streptomyces coelicolor A3(2)
  CDS (1)..(981): transl_table=11
gtgcgcaccgtctccgagcagcagcagcccattccggtgatcatcgactgcgacaccggcatcgacgacgccctggccctgctgctggcggtccggcacccgcgcctcgacctgcgcgcggtgacctgcgtggccgggaacacggacgtggcgggggtcgtccggaacacgctgacggtgctggagcgggccggtgccccggacgtccccgtcgcccggggtgccgagcggccgctgatcgagggcgtgcgcaccgcgcggcacgtgcacggggccgacggcatgggcgacctcgggctgcccgcgcccacccgcgcccccgccgacgtggacgcggtgacactgctgcgccgggagatcctcgcctccccgcggccggtcaccctgatccccaccgcgccgctgaccaacatcgcgctgctgctgcgcacccacccggaggtcaccggcaacatcgagcggatcgtgttcatgggcggcgcggtggccaccgggaacgcgacgccggtcgccgagttcaacgtgtggcacgacccggaggccgccgcgatcctgctcaccgccggggtgccgatcaccatgtacggcctcgacgtgttcgagcgggtgatcgtgcccggcaccgacgtacggcggctgcgcgcgagcgccgagcccggcacccggctcgccggggaactgctcgcccaccggggcccggccaccgacgccgcggaccccggcggcgggctcggcgacgcgggcgcggtctgcgcggtgatcgacccggcgggcctgaccacgcaccggctgcccgtcgaggtgtccctggcccccgggccgtcccgcggccagaccctggtcgaccggcggctgcgcgtcggcgagtccgaactgcacgacggcatgcgcgaacagcccctggtggacgtggcgttggacgtggacgtgacccggtacgtggagctgtacctgggcacggtcgagcgcacgggagcgtag

SEQ ID NO: 144011 - protein, 326 aa, Streptomyces coelicolor A3(2)
MRTVSEQQQPIPVIIDCDTGIDDALALLLAVRHPRLDLRAVTCVAGNTDVAGVVRNTLTVLERAGAPDVPVARGAERPLIEGVRTARHVHGADGMGDLGLPAPTRAPADVDAVTLLRREILASPRPVTLIPTAPLTNIALLLRTHPEVTGNIERIVFMGGAVATGNATPVAEFNVWHDPEAAAILLTAGVPITMYGLDVFERVIVPGTDVRRLRASAEPGTRLAGELLAHRGPATDAADPGGGLGDAGAVCAVIDPAGLTTHRLPVEVSLAPGPSRGQTLVDRRLRVGESELHDGMREQPLVDVALDVDVTRYVELYLGTVERTGA

SEQ ID NO: 144012 - DNA, 939 bp, Xanthomonas campestris pv. campestris str. ATCC 33913
  CDS (1)..(939): transl_table=11
atgacaaaaaagataccgctgctgatcgacaccgacccgggcgtggatgacgcgctggcgctgctgatggcgttcaacgatacccgccatgacgtggtcggcctgaccatcgccgcaggcaatgtcggtctggagcacaccgtgcgcaatgcgctcaaagtgtgcgaggtggccggtcgcgccgatgtgccggtgtatgcgggctgcccgcaaccgctgctgcacccgtcggtggacgcggcgcatgtgcatggcatcgacggcttcggcgatgtcggcctgccgcctgccgcgcgggctgcggacgccgagcatgccgcgctggccatcctgcggctgtcgcacgtgcatgcaggcgagttgttgctggtggcacttggcccgctgaccaacctcgccctggctctgaccctggacccgaccctgccacagcgtgtggcgcggctggtggtgatgggcggggcgctgaccgggcacggcaacattaccgccgcggctgaattcaatatcggcttcgacccggaggcggcgcatatcgtgttccgcgggtttccccagttcgatgtggccgattgggaggcgaccgccgcgcacggcctgctgcaccgtgatgtggagcagtggctggcggccgattcgccgcgtgcgcgcttctacgaagaaatctcgcgcaagacccggctgtggtcggaggacagtcgtggcgagtactggtatgccgcagacgcgttggcgatggccttcgccctgcagccggacggcgcgcagcgcctggagcagcggccggtgcacatcgaactgtcgggcacgcacacccgcggcatgaccctggtggactggaaccggcagggcggggcggccgacaacgccaccctgttgctggactacgaccgccagcgcttctacggcctggtcgggcaggcgcttgcggccggctag

SEQ ID NO: 144013 - protein, 312 aa, Xanthomonas campestris pv. campestris str. ATCC 33913
MTKKIPLLIDTDPGVDDALALLMAFNDTRHDVVGLTIAAGNVGLEHTVRNALKVCEVAGRADVPVYAGCPQPLLHPSVDAAHVHGIDGFGDVGLPPAARAADAEHAALAILRLSHVHAGELLLVALGPLTNLALALTLDPTLPQRVARLVVMGGALTGHGNITAAAEFNIGFDPEAAHIVFRGFPQFDVADWEATAAHGLLHRDVEQWLAADSPRARFYEEISRKTRLWSEDSRGEYWYAADALAMAFALQPDGAQRLEQRPVHIELSGTHTRGMTLVDWNRQGGAADNATLLLDYDRQRFYGLVGQALAAG

SEQ ID NO: 144014 - DNA, 939 bp, Xanthomonas axonopodis pv. citri str. 306
  CDS (1)..(939): transl_table=11
atgacaaaaaagataccgctgctgatcgacacggaccccggcgtggacgacgccttggcgctgctgatggccttcaacgacaaccgccatgaggtcgtcggcctgaccatcgccgccggcaacgtgggcttggagcacaccgtgcgcaacgccttgaaggtctgcgagatcgctggccgtcccgatgtgccggtctacgccggctgcccgcagccattgctgcacccgtcggtggatgcggcacacgtgcacggtctcgacggattcggcgatgtgggcctggcaccggccaagcgcaccgccgaggccgaacacgccgcgctcgccatcctgcgtctgtcgcacgaacacgccggcaagctgctgctggtggcgctcggtccactgaccaatcttgccctggcactcactctggacccgaccctcccgcaacgcgtggcgcggctggtggtgatgggcggggcgttgaccgggcacggcaatatcaccgccgcggccgagttcaacatcgggttcgacccggaagcggcgcatatcgtgttccgaggttttccgcagttcgacgtggccgattgggaagccaccattgcgcacgggctactgcaccgggacgtggagcactggctggcggccgattctgcccgcgcccggttctacgaggatatctcgcgcaagacccggctgtggtccgaagacagccgcggcgagtactggtatgccgccgacgcgctggcgatggctttcgccttgcacccggaaggcgcgcagcggctggagcagcgcccggtacacatcgaactgtccggtgcgcatacccgtggcatgaccctggtggactggaaccggcagggcggggcgcccgacaatgccaatctgctgctggcctatgacatccagcagttctaccggctggtaggggcggccctggcggcgaactga

SEQ ID NO: 144015 - protein, 312 aa, Xanthomonas axonopodis pv. citri str. 306
MTKKIPLLIDTDPGVDDALALLMAFNDNRHEVVGLTIAAGNVGLEHTVRNALKVCEIAGRPDVPVYAGCPQPLLHPSVDAAHVHGLDGFGDVGLAPAKRTAEAEHAALAILRLSHEHAGKLLLVALGPLTNLALALTLDPTLPQRVARLVVMGGALTGHGNITAAAEFNIGFDPEAAHIVFRGFPQFDVADWEATIAHGLLHRDVEHWLAADSARARFYEDISRKTRLWSEDSRGEYWYAADALAMAFALHPEGAQRLEQRPVHIELSGAHTRGMTLVDWNRQGGAPDNANLLLAYDIQQFYRLVGAALAAN

SEQ ID NO: 144016 - DNA, 921 bp, Bifidobacterium longum NCC2705
  CDS (1)..(921): transl_table=11
atgaagcagatccctctgattatcgacactgaccccggcatcgatgacgccgtcgccatcgcactggcagtgttcaacccgcgcttcgacgtgcggctgattactacggttgctggcaatgtcagcattgaagcgacaacgacgaacgcgctcaagctgatggcctactacggtaaggatgtaccggtcgctcgtggcgctgctgaaccgctgatccgtcagcttgatgatgcaagcgatatccacggtaaaaccggtatggagggattcgatttccctgagcccaaaactgaacttctgctggataagcatgctgtcgaagcaatgcacgacgagatcatggcttctgctgaacccgtcaccgtcatgccaatcggtccgctgaccaacatcgcactgttgctaaaaacttttccggaagtcaagtcgcgtattgagcgcattgtgctcatgggtggttcggtcactcgcggcaacaagggtgttatggccgaattcaatattttcgttgaccctgaagccgccaagattgtgctcacttctggtcttgacattactatggccacactggacgccggcttgggaactgtgattccgccggagaaaaccgctcagcttaaggatatgggcaaggtcggtctgatggctcatgacctgttccagcgctaccgcaagcgcagcttcggcaccggtctcaaaatgtatgacgcttgcgcagtcgcatgcttgctggagcctgacctattcgacatgactaaggcatttgtggacgtagaaatcgctggcgaactcactgcagggtgtacggtcgttgatcttaagggctaccttaagcgcgaaccgaatgccaccgtcaccaccggcgttcacgcagatcgattctgcgactggttcatggacggcatcgcccattgtgcatag

SEQ ID NO: 144017 - protein, 306 aa, Bifidobacterium longum NCC2705
MKQIPLIIDTDPGIDDAVAIALAVFNPRFDVRLITTVAGNVSIEATTTNALKLMAYYGKDVPVARGAAEPLIRQLDDASDIHGKTGMEGFDFPEPKTELLLDKHAVEAMHDEIMASAEPVTVMPIGPLTNIALLLKTFPEVKSRIERIVLMGGSVTRGNKGVMAEFNIFVDPEAAKIVLTSGLDITMATLDAGLGTVIPPEKTAQLKDMGKVGLMAHDLFQRYRKRSFGTGLKMYDACAVACLLEPDLFDMTKAFVDVEIAGELTAGCTVVDLKGYLKREPNATVTTGVHADRFCDWFMDGIAHCA

SEQ ID NO: 144018 - DNA, 999 bp, Brucella suis 1330
  CDS (1)..(999): transl_table=11
ttgttgagcaaacatgcagtatcatgcgcaataccctcccaacgaactcatcaggaaaccaccatggcccgtaaaatcattatcgataccgatcccggtcaggacgatgccgtcgccattttgctggcgcttgcaagccctgaactcgacattctcggcattaccgccgttgcaggaaatggcccgctggcgcgcacagaagtcaatgcccgcacggtctgcgaagtggcgaaaaagccggacacaaaagtatttgcaggctccatccgcccattggtgcgcccgcttgtcaccgctgaaaacgttcatggcaagaccggcctcgatggctatgacctgcccgcccccaccatgccgcttcaagcccagcatggcgttgatttcatcattgaaacactgatgaaggaagaaccgggcaccgtcacactctgcccgatcggaccgctgaccaacatcgcttccgcgctgatccgcgagccgaagattgccgggcgcgtcaaggaaatcgtgctgatgggcggcggctatttcgagggcggcaacatcacgccatcggcggaattcaacatctatgtcgatccgcatgccgcatcggttgtcttcagctccggcatcaagatcaccatgttgccgctcgatgtcacgcacaaggttctcaccactgaaaagcgcatcgccgccattcgcaacataggcagccatgtcggcgaagtggtcgcggcctggcttgagtttttcgagcgttatgatgaagccaaatacggcaccgatggtgccccactgcatgacccgaacgtcatcgcctatctcatcaagccggagctttattcaggccgtgcatgcaatgtggaaatcgagatcaattcggaactgaccatcggcgaaacagtcgttgactggtgggaggtgacagaccgtccgaagaatgccttcttcatcaaggatgtggatgccgatggcttcttcagcctgctgacggagcgtctggcgacgctttga

SEQ ID NO: 144019 - protein, 332 aa, Brucella suis 1330
MLSKHAVSCAIPSQRTHQETTMARKIIIDTDPGQDDAVAILLALASPELDILGITAVAGNGPLARTEVNARTVCEVAKKPDTKVFAGSIRPLVRPLVTAENVHGKTGLDGYDLPAPTMPLQAQHGVDFIIETLMKEEPGTVTLCPIGPLTNIASALIREPKIAGRVKEIVLMGGGYFEGGNITPSAEFNIYVDPHAASVVFSSGIKITMLPLDVTHKVLTTEKRIAAIRNIGSHVGEVVAAWLEFFERYDEAKYGTDGAPLHDPNVIAYLIKPELYSGRACNVEIEINSELTIGETVVDWWEVTDRPKNAFFIKDVDADGFFSLLTERLATL

SEQ ID NO: 144020 - DNA, 960 bp, Corynebacterium efficiens YS-314
  CDS (1)..(960): transl_table=11
ttgagaattaggagtttcaccatgaccaccaagatcatcctcgactgcgatcccggacacgatgacgccgtcgccatgctgctcgcccacggcaacccggacatcgagctgctcggcatcaccaccgtcggcggcaaccagaccctggccaaggtcacccacaacgcccgtgtcgtggccaccatcgccggcatggacaccccgatctacccgggcgtgacccgcccgctggtccgcccagtcgaggtcgccgaggacatccacggcgacaccggcatggagatccacaactatgacctccccgagccgaccgtgggcgttgaggacacccacgcggtggacttcatcatcgacacggtgatgaacaacgaaccgggcaccgtcgccctggttcccaccggcccgctgaccaacatcgccctggcggtgcgcaaggaaccccgcatcgccgagcgcgtcaaggaggtcgtcctcatgggtggcggctaccacgtgggcaactggaccgccgtcgcggaattcaacatcaagatcgacccggaggccgcccacatcgtcttcaacgagtcctggcccctgaccatggttggtctggatctcacacaccaggcgctggccaccccggaggtggaggagaaactcgccgcactgggcaccgagacgggcgacttcgtcgtcgcgcttttcgacgccttccgcaagaactatcaggacgcccagggattcgacaacccacccgtccacgacccctgcgccgtggcctacctcatcgaccccaccgtgttcaccacccgcaaggcaccactggatgtggaactgtccggcgcgctgaccaccggcatgaccgtcgctgatttccgcgcccccgccccggaggactgcaccacccaggtggcggtggatctggacttcgataagttctggaccatggtcgtcgatgcggtgaagcgcatcggttag

SEQ ID NO: 144021 - protein, 319 aa, Corynebacterium efficiens YS-314
MRIRSFTMTTKIILDCDPGHDDAVAMLLAHGNPDIELLGITTVGGNQTLAKVTHNARVVATIAGMDTPIYPGVTRPLVRPVEVAEDIHGDTGMEIHNYDLPEPTVGVEDTHAVDFIIDTVMNNEPGTVALVPTGPLTNIALAVRKEPRIAERVKEVVLMGGGYHVGNWTAVAEFNIKIDPEAAHIVFNESWPLTMVGLDLTHQALATPEVEEKLAALGTETGDFVVALFDAFRKNYQDAQGFDNPPVHDPCAVAYLIDPTVFTTRKAPLDVELSGALTTGMTVADFRAPAPEDCTTQVAVDLDFDKFWTMVVDAVKRIG

SEQ ID NO: 144022 - DNA, 951 bp, Corynebacterium efficiens YS-314
  CDS (1)..(951): transl_table=11
atgaccaagaaggccatcctggacctggacaccggcatcgatgatgctctcgcactggcctacgccctgggctccccggagctggaggtcatcggcgtgacctgcacctacggcaacgtcctgctggacaccggcgctgcgaacaacctcgcgctgctggaactgttcggggcccccgatgttccggtttacctcggtgagccccatgccctcatgcgcgacgggttcgaggtcctggacatctccgccttcatccacggtgccaacggtatcggcgaggtcgccctggagaaggcccgcgccgaggcccgcgaaggtggtgtggatttcctcatcgattccgtgcgtgaacacggcgacgatctggtcatcatcgccaccggtccgctgaccaacatcgcggcggccgccgcgaaggatgcggccttcgcggacaacgcccacatcgtcatcatgggcggtgcgctcaccgtcccgggcaatgtcagcccctgggccgaagccaacatcaaccaggacccggatgccgccaacaatgtcttccgtgcggcggccgatgtgaccatgatcggcctggatgtcaccctgcagaccctgctgacctccaggcacaccgcgcagtggcgtgagctgggcaccccggctgccatcgccctggcggacatgaccgactactacatcaaggcctatgagaccaccgccccgcacctgggtggctgtggtctccatgacccgttggccgtgggtgtggccgtcgacccgtccctggtcaccctgttgccgatcaacctcaaggtcgatgtggagggtgagacccggggccgcaccatcggtgatgaggtccgcctcaacgatcccgtgcgcaccgctcgtgcggccgtggcagtcgatgtggaccggttcctgtccgagttcatgacccgcgtgggtcgggtggccgcaaacaactag

SEQ ID NO: 144023 - protein, 316 aa, Corynebacterium efficiens YS-314
MTKKAILDLDTGIDDALALAYALGSPELEVIGVTCTYGNVLLDTGAANNLALLELFGAPDVPVYLGEPHALMRDGFEVLDISAFIHGANGIGEVALEKARAEAREGGVDFLIDSVREHGDDLVIIATGPLTNIAAAAAKDAAFADNAHIVIMGGALTVPGNVSPWAEANINQDPDAANNVFRAAADVTMIGLDVTLQTLLTSRHTAQWRELGTPAAIALADMTDYYIKAYETTAPHLGGCGLHDPLAVGVAVDPSLVTLLPINLKVDVEGETRGRTIGDEVRLNDPVRTARAAVAVDVDRFLSEFMTRVGRVAANN

SEQ ID NO: 144024 - DNA, 969 bp, Escherichia coli CFT073
  CDS (1)..(969): transl_table=11
ttgtcgcaaagaaacacacaacaaggagcaacaatggcactgccaattctgttagattgcgacccaggtcatgacgacgctatcgcaatagttctcgccctcgcctcaccagagcttgatgtcaaagcaattacgtcttccgccggaaaccagacaccagaaaaaaccttacgcaatgttctgcgtatgctgaccttgcttaatcgcaccgatattccggtagcaagcggtgcggtaaaaccgttaatgcgtaatttgattattgcggacaacgtgcacggcgaaagcggtctcgacggcccggcattaccggaaccgacgttcgcaccgcaaaactgtacggcggtggagctgatggcgaaaacgctgcgtgaaagtgaggaacctgtcaccattgtttctaccggaccgcaaactaacgttgccttgctgctcaatagccacccggaactgcatagcaaaattgcccgtatcgtgattatgggcggcgcaatggggcttggtaactggacgcctgcggctgaatttaatatttacgttgacccggaagcggcagaaattgtcttccagtcaggaattccggtggtgatggccggtctggatgttactcacaaagcacaaatccacgttgaagacactgagcgtttccgcgcgattggcaaccctgtttcaaccattgttgccgaactgctggatttcttcctcgaatatcacaaagacgaaaaatggggctttgtcggcgcaccactgcatgacccatgcaccatcgcctggctgttgaaaccggagttgtttaccactgttgagcgctgggttggcgtggaaacacaagggaaatatacccagggtatgacagttgttgattattattatctgactggcaataaaccgaatgccaccgtaatggtcgatgttgatcgtcagggctttgttgatttactagctgatcgtctgaaattttacgcttaa

SEQ ID NO: 144025 - protein, 322 aa, Escherichia coli CFT073
MSQRNTQQGATMALPILLDCDPGHDDAIAIVLALASPELDVKAITSSAGNQTPEKTLRNVLRMLTLLNRTDIPVASGAVKPLMRNLIIADNVHGESGLDGPALPEPTFAPQNCTAVELMAKTLRESEEPVTIVSTGPQTNVALLLNSHPELHSKIARIVIMGGAMGLGNWTPAAEFNIYVDPEAAEIVFQSGIPVVMAGLDVTHKAQIHVEDTERFRAIGNPVSTIVAELLDFFLEYHKDEKWGFVGAPLHDPCTIAWLLKPELFTTVERWVGVETQGKYTQGMTVVDYYYLTGNKPNATVMVDVDRQGFVDLLADRLKFYA

SEQ ID NO: 144026 - DNA, 933 bp, Clostridium tetani E88
  CDS (1)..(933): transl_table=11
gtgattttgaaaatgaataagaaaactaaaattattttagatacagatccaggaattgatgatgctgtagccatagtagccgcattatttagtcctaaaattcaagtggaattaataactactgtatctggaaatgtagatgtagataaaacaacagaaaatgcactgaaaatattagaatttttaaataaagatgtacctatagcaaaaggtgctagaaaaccattaatgagagaattagatgatgcaagtgatatacatggagattctggattagatggttacaattttggtaaaattacaagaaaaacagatgaaaaacccgctatagataagatgagagaagttataattaattcagaagagaaaataactttagtagcaataggacctttaactaatattgcattacttttaagttcatatccagaagttaaagataaaatagacaagttagttataatggggggatctgcatctagaggaaataaaacacctgctgcggaatttaacatttatgttgacccagaaagtgctaatatagtatttaaatctggaataaatatagtaatgtgtgggttagatattacaaacaacgctatatttaaagaagaagatataaattatataaaaaatctaaataaaacaggatatatgctttattcattatttaaatgttacagaagtggaagttttaagaagggattaagaatgcatgatttatgtgcaatagcttatttagataaacctgaaatatttaaagcggtttctgcaaaggttgatatagaaaccaaaggagaacatacattaggtgccacagtggtagactttgataattactctaatggtaaggcacaagtgaaagtatgcatggaacttgatgtagaagatttaaaaaagtggttctttagtatattgaataaagtaaattag

SEQ ID NO: 144027 - protein, 310 aa, Clostridium tetani E88
MILKMNKKTKIILDTDPGIDDAVAIVAALFSPKIQVELITTVSGNVDVDKTTENALKILEFLNKDVPIAKGARKPLMRELDDASDIHGDSGLDGYNFGKITRKTDEKPAIDKMREVIINSEEKITLVAIGPLTNIALLLSSYPEVKDKIDKLVIMGGSASRGNKTPAAEFNIYVDPESANIVFKSGINIVMCGLDITNNAIFKEEDINYIKNLNKTGYMLYSLFKCYRSGSFKKGLRMHDLCAIAYLDKPEIFKAVSAKVDIETKGEHTLGATVVDFDNYSNGKAQVKVCMELDVEDLKKWFFSILNKVN

SEQ ID NO: 144028 - DNA, 921 bp, Lactobacillus plantarum WCFS1
  CDS (1)..(921): transl_table=11
atgtcaacaaagattatcatggacactgaccctggtattgatgatgccgccgcaattacctttgcgttaaatcatcctgacttggacttacaattaattacaacggtcgccggcaatgtgacggtcgacaaaacgacgctgaatgcgctcaaactaacgcgcttctttaacagtgacgttcccgtagcgggtggggctgcccaaccgctgatcaaaccgtttgaagatgccgtccgaattcacggtgtttcaggaatgccgggttacgacttcccgactgaccttgcggaaccattaccagaaacagccgttgaagcgctccgtgactacatcatggctgctgaacaaccgattacgttagtgccaacgggagcctataccaacattgcgctcttatttaagacctaccccgaagtaatgccacacattaaagaaatcgttgcgatgggtggggccttaggcaaaggtaatatgaccagcgccgcagagttcaacgtctttaccgacccgcacgcggctgaaatcatgtaccaatccggcgttccaattaccatggtcggcttagacgtgacgatgaaggcccttttaacgcgcaaatcgattgaacagttaccgaccctcggtaaaactggcgaaatgctccacgccctctttggtcattacaacgaccgcaaccagactggcgttgcgatgcatgatgtcaatacgctcttctacttactacatccagaagccttcacgactgaaaagatgtggattgatgtccagacggagggccccgctaatggcgagaccgttggcgatattcgtggtgcttaccatgacggcaaaaccaacgcgaccgtttgtgtcgatattgatgcggcggctttcaataaatggttcctagaaaccgtggcagccattgaccaatctaaataa

SEQ ID NO: 144029 - protein, 306 aa, Lactobacillus plantarum WCFS1
MSTKIIMDTDPGIDDAAAITFALNHPDLDLQLITTVAGNVTVDKTTLNALKLTRFFNSDVPVAGGAAQPLIKPFEDAVRIHGVSGMPGYDFPTDLAEPLPETAVEALRDYIMAAEQPITLVPTGAYTNIALLFKTYPEVMPHIKEIVAMGGALGKGNMTSAAEFNVFTDPHAAEIMYQSGVPITMVGLDVTMKALLTRKSIEQLPTLGKTGEMLHALFGHYNDRNQTGVAMHDVNTLFYLLHPEAFTTEKMWIDVQTEGPANGETVGDIRGAYHDGKTNATVCVDIDAAAFNKWFLETVAAIDQSK

SEQ ID NO: 144030 - DNA, 957 bp, Lactobacillus plantarum WCFS1
  CDS (1)..(957): transl_table=11
atggcaaaacgtaaaatgattttagacttagacaccgggattgacgacgcaatggccattgcctacgcagtcggtgcacccgacgttgatttaattgggattatcagttcttatgggaactgcctagtggatcaggcggcgattaacagtttacaaattctagaactactaggtgccactgacgtacccgtctttctaggtgaaccccactccagtacgacggaacactttgacgttatgccgatttcacagcagattcatggcatgaacggtatcggcgacgtgaaccttcctgaaccgaaacgcgccgtggaaaagcagtccggtgtcgacttcttaattgatgccgttcaccaatatggcgccgatctgaccctagtgccaaccggtcccttaaccaacttggccgaagcactcgaaaaagcaccagacattgccagcaccattggtaatgtgaccttaatgggtggtgcactgactgttccaggtaatgtcagtcactacgctgaagccaatattaatcaagatgccgaagcggccaacgccgtcttcaccagtacgatgcctcttacgatggtcggactcgacgtaacgttacggacattattaaccaagactgaaacacaacaatggcgggacttaaagacaactgcgggcgaaaaatttgctgacattgttgactattacattgcggcttacgatattacgagtcctgacttacacggttgtgccttacacgatccactggcagtcggcgtttcactcgatccaagttttgtcaccacgttagacctgaatatgtacgtccaggctagtggtgaagattatggccggacaattggtgaccctgcgcgactcaatgacccaactaacgtcacggttgcgttaacggtcgacaaggatcgttatttgaagacattcatgaattacctgacgacattatttaaagcccattag

SEQ ID NO: 144031 - protein, 318 aa, Lactobacillus plantarum WCFS1
MAKRKMILDLDTGIDDAMAIAYAVGAPDVDLIGIISSYGNCLVDQAAINSLQILELLGATDVPVFLGEPHSSTTEHFDVMPISQQIHGMNGIGDVNLPEPKRAVEKQSGVDFLIDAVHQYGADLTLVPTGPLTNLAEALEKAPDIASTIGNVTLMGGALTVPGNVSHYAEANINQDAEAANAVFTSTMPLTMVGLDVTLRTLLTKTETQQWRDLKTTAGEKFADIVDYYIAAYDITSPDLHGCALHDPLAVGVSLDPSFVTTLDLNMYVQASGEDYGRTIGDPARLNDPTNVTVALTVDKDRYLKTFMNYLTTLFKAH

SEQ ID NO: 144032 - DNA, 936 bp, Lactobacillus plantarum WCFS1
  CDS (1)..(936): transl_table=11
ttggaagatattattttagattgtgacccaggacatgatgacgccgtagccttaatgattgcaattgcatcaaaggatattaacctactcgctgtaacgacttcagctggaaatcagcgtcacagtcaaacattacgtaacgcgatgtcccttcttactttaatgaaacgtcaagatattccagttgcttcaggaaacacgaagcctttaatgcgttccctaatctccggcgttagtatgcatggtgttacagggttagatggtgcagatttaccatccccagatttcttttctcaaggaataccagctatcgagctaattgctaagatcctcactgatcacccacagaaagtcactctagttgtcacagggccttgcacaaatatcgcattattcctatctgtgcatcctgagttacgttctcgtatcaagcagattgttattctagggggtggcatgggactcggaaactggggaccaaccactgagttcaacattcaggtggatccagaagctgcgaaaatcgtcttagattccggaataccgattattttagcgccgttaaatgtcgcatttgaagcacagctacttcctaacgaaatcgaaaaaattcataatattgataattcagtagctcagacaattagcggccttatggacttctatggaatttcatttggtcgtcaacgatggggatttaaaggtctcccattatacgacccttgtacagttgcttggctcatcgatccttcaaagtttacaagtaaacgttgcaatgttgaagtagagactaaaggagagctcactactggggagaccgttatcgattattatcatattaccaaccgtaagcctaatgctgaggtattgtttcatattgatcgccagtggtttgccgatctaaccattagtagcattaaatccttcgatttttaa

SEQ ID NO: 144033 - protein, 311 aa, Lactobacillus plantarum WCFS1
MEDIILDCDPGHDDAVALMIAIASKDINLLAVTTSAGNQRHSQTLRNAMSLLTLMKRQDIPVASGNTKPLMRSLISGVSMHGVTGLDGADLPSPDFFSQGIPAIELIAKILTDHPQKVTLVVTGPCTNIALFLSVHPELRSRIKQIVILGGGMGLGNWGPTTEFNIQVDPEAAKIVLDSGIPIILAPLNVAFEAQLLPNEIEKIHNIDNSVAQTISGLMDFYGISFGRQRWGFKGLPLYDPCTVAWLIDPSKFTSKRCNVEVETKGELTTGETVIDYYHITNRKPNAEVLFHIDRQWFADLTISSIKSFDF

SEQ ID NO: 144034 - DNA, 921 bp, Enterococcus faecalis V583
  CDS (1)..(921): transl_table=11
atggatacaaagaaaagaccgatcattattgatacggacccaggaattgatgatgctgtagctttagcgattgcactgaatcatcctaacctagaagttcgcttaataacgacggttgcagggaatgtagatgtagaaaaaacaacaaataatgccttgaaacttgtcgatttttttgggaaaaaggttcctgtagccaaggggtgtaattgtccgttacttattcaattagaagattctgctgagattcatggggagactggtatggatggctttgagtttccgcaacctatctctacgtgtttagatattcatgcagtggaagctatgcgaaaagaaattctgtctagtgatgttcctttgaccattgttccaattgctgcattaacgaatattgctttgttactgaccctctatccagaagtcaaagaaaatattgcagaaatcgtcatgatgggtggctcattagcaaggggaaatacaaatacaagtgccgaatttaatacgtatgtcgatccacacgctgcacaaattgttttccaatcaggtgtcccgctaacaatggtaggattagatgttacaagtcaagctgtgttaacgaatcatgaagtaacagccatcagagcgcttggtagagttggggaaatgttttatggtcttttccgtcattatagaggcggcagtctaactacaggtttgaaaatgcatgatgtctgtgcgattgcctatttaacttcaccagaattatttgagacaactgaaacgttcattgaagttgctttggaaggtccagctgcgggagctactgttgcggatttaaaaatgaagtatcataaaaacacgaatgccgttgcctgtatagatgtaaatgttgaagcttttcaaaaatgggttgtcgaaaaaatgaaagcggttaattaa

SEQ ID NO: 144035 - protein, 306 aa, Enterococcus faecalis V583
MDTKKRPIIIDTDPGIDDAVALAIALNHPNLEVRLITTVAGNVDVEKTTNNALKLVDFFGKKVPVAKGCNCPLLIQLEDSAEIHGETGMDGFEFPQPISTCLDIHAVEAMRKEILSSDVPLTIVPIAALTNIALLLTLYPEVKENIAEIVMMGGSLARGNTNTSAEFNTYVDPHAAQIVFQSGVPLTMVGLDVTSQAVLTNHEVTAIRALGRVGEMFYGLFRHYRGGSLTTGLKMHDVCAIAYLTSPELFETTETFIEVALEGPAAGATVADLKMKYHKNTNAVACIDVNVEAFQKWVVEKMKAVN

SEQ ID NO: 144036 - DNA, 951 bp, Photorhabdus luminescens subsp. laumondii TTO1
  CDS (1)..(951): transl_table=11
atgaccaccaaaaaaattattcttgattgcgatccgggacatgatgatgccattgcgatgttattggcgcatggcaaccctaatattgagctattagccgtcacgacggttgtcgggaatcagacactggataaagtcactcgcaatgcgctggcgatagcgcatattgccggtattaccggcgtgccctttgcctcaggctgtcatcggccactcgttcgcgatatcgaaacggcatcggatattcacggcgaatctggtctgggtggcgtgaagttgcctaaacactcccgaacacttgatccccgccacgcaacggatctgatcattgataccatcatgtctcacccgcccaaaacggtgactttagtccccgttggcagcttaaccaatattgctctcgccgtccgtaaagcaccgcagatcgttgagcgggtaaaagaagtggtattaatggggggtggatatcacaccggcaacagaagtgcagtggcagaattcaatatcaaaaccgatccggaagccgcacatattgttttcaatgaaaaatggccgctgaccatggtcggtcttgatctgacacatcaagctcgcgccacaccagaaatcaccaaagcaatttcacgtatcaataccaaagtgtctcggtttgtcgtagaactactggattactatggtcaacgttatcaagagagacatggtttcaactgcccgccaatacatgatccttgtgccgtcgcctatgttattgatcctacagtgatgacaacgcaaaaagtccccgtcaatattgaactgaacggtaccttaaccgtaggaatgacagtggcggatttccgttacccgccaacagaagattgccatacccaagttgctgtcaaactcgatcaacagcgattctggcaattgattattgatgcattgaaaaacatcggcgatacctgcgattaa

SEQ ID NO: 144037 - protein, 316 aa, Photorhabdus luminescens subsp. laumondii TTO1
MTTKKIILDCDPGHDDAIAMLLAHGNPNIELLAVTTVVGNQTLDKVTRNALAIAHIAGITGVPFASGCHRPLVRDIETASDIHGESGLGGVKLPKHSRTLDPRHATDLIIDTIMSHPPKTVTLVPVGSLTNIALAVRKAPQIVERVKEVVLMGGGYHTGNRSAVAEFNIKTDPEAAHIVFNEKWPLTMVGLDLTHQARATPEITKAISRINTKVSRFVVELLDYYGQRYQERHGFNCPPIHDPCAVAYVIDPTVMTTQKVPVNIELNGTLTVGMTVADFRYPPTEDCHTQVAVKLDQQRFWQLIIDALKNIGDTCD

SEQ ID NO: 144038 - DNA, 939 bp, Corynebacterium diphtheriae NCTC 13129
  CDS (1)..(939): transl_table=11
atgacccgaaaaattattctcgactgcgacccaggacacgacgacgccgtagccatgctactcgccgcagcaaaccccaacatcgaactgctgggaatcaccaccatcggcggcaaccaaaccctgcccaaagtcacccacaatgcgcaggttgttgccacgatcgcaggaatcaccgcacctatccatgcaggttgttcccgcccactcgtgcgtgacgtcgaggtcgccgagagcatccacggcgatactggaatggaaatccacaactacacgctgccagagccagcagtaggagtatctgatacccacgccgtggactttattatcgacaccatcatgtcccacgagccaggaactgtcacccttgttcctaccggcccgcttaccaacattgctatggcggcgcgcaaagagccccgcattgtcgaacgagtccaagaagtcgtgctcatgggcggcggataccacgtaggtaactggtcccctgttgcagaattcaacatcaagatcgaccccgaagcagcgcacatcgttttcaacgaaaaatggccactgaccatggtgggcctcgaccttactcaccaagcgcttgcaaccccagaagtagaagcacgcctgagcgcaatcggctccgacgttgccgactttgtagtcgcactcttcggcgcattccgtaagaactaccaagacgcacaaggctttgataacccaccagtccacgacccgtgcgcagtggcctacgtgatcgacccgacggtatttactacggtcaaggtacctatcgacgtcgagctgaccggggcactgaccaccggcatgaccgtcgcggacttccgcgcaccagcacctgccgactgccacactcaagcagctgtcgccctcgactttgacaagttctggggtttggttgaaagcgctgtcaaagaactaagctag

SEQ ID NO: 144039 - protein, 312 aa, Corynebacterium diphtheriae NCTC 13129
MTRKIILDCDPGHDDAVAMLLAAANPNIELLGITTIGGNQTLPKVTHNAQVVATIAGITAPIHAGCSRPLVRDVEVAESIHGDTGMEIHNYTLPEPAVGVSDTHAVDFIIDTIMSHEPGTVTLVPTGPLTNIAMAARKEPRIVERVQEVVLMGGGYHVGNWSPVAEFNIKIDPEAAHIVFNEKWPLTMVGLDLTHQALATPEVEARLSAIGSDVADFVVALFGAFRKNYQDAQGFDNPPVHDPCAVAYVIDPTVFTTVKVPIDVELTGALTTGMTVADFRAPAPADCHTQAAVALDFDKFWGLVESAVKELS

SEQ ID NO: 144040 - DNA, 1038 bp, Nasonia vitripennis
  CDS (1)..(1038)
atgttaaggataatattacctcatttcttcgtatatttgctggtcgtcagtggttccagctcagaaaaaatcataatcgacactgacgccggatctgacgatgccgtagcaattttgatgcttttaagggctgaatcgatgagaaaattccatctgccccaatacgaagtcatcggaatcacgtgtacctacggaaacactaaggaggaaaatgtcgaagtcaacgtattgaagacactgacagtcgcggaaagacctgacattccagtgtacgcgggggcgaagaagcctttaataggaaatttttcgaccgataatcactttgggagcgatggtttcggcgacgctgactttgacagggacattaacggtgaagtggacagatcaatgcacgcctccgtcgccctcgctgagctgacaaaaaagcacgaaggcaacgtcagtgtcattttgctgggaccaacgacgaacgtagcattggccgcttcgctggactcaaacttcacgcgtcgagtcaagagattctacgtgatgggctcgagcgtggctggagttggtttgtacagtccaaacgtcgagttcaactttgcagccgatccagaggccaactttattctcctaaacaagaccaccagctctgatctgacgcttttcccttgggaagctggattgaacgccaaactcacaaaggactggcgcataaacgttctcggcaaatatgactctccgatcatccgtttcctgaacgcgatcgagcaagtcagtcttaaatcgccaggggattactacacatctactgatgcgatgacagttgcaacgatgctgtggccggacatggtcaacgcgactttggataccaatgtccaggcggttttcgacggggcagccagaggatcagtactggttgactactataggaacgacaaacagaggccgaaaaacgccaggatcattcagtccatcgacggtgaaaagctcaaagaggcgctcgtcttctaccttacttggcaagagcatcaagtgcaaataatattttaa

SEQ ID NO: 144041 - protein, 345 aa, Nasonia vitripennis
MLRIILPHFFVYLLVVSGSSSEKIIIDTDAGSDDAVAILMLLRAESMRKFHLPQYEVIGITCTYGNTKEENVEVNVLKTLTVAERPDIPVYAGAKKPLIGNFSTDNHFGSDGFGDADFDRDINGEVDRSMHASVALAELTKKHEGNVSVILLGPTTNVALAASLDSNFTRRVKRFYVMGSSVAGVGLYSPNVEFNFAADPEANFILLNKTTSSDLTLFPWEAGLNAKLTKDWRINVLGKYDSPIIRFLNAIEQVSLKSPGDYYTSTDAMTVATMLWPDMVNATLDTNVQAVFDGAARGSVLVDYYRNDKQRPKNARIIQSIDGEKLKEALVFYLTWQEHQVQIIF

SEQ ID NO: 144042 - DNA, 1020 bp, Nasonia vitripennis
  CDS (1)..(1020)
atgctgtgcaaaatttcggtgataatcgtctccgttcttctgatcttcttgcttccggccacgacgacgacggttcgagattccatgggcaattccagactcgtggttatagataccgatgcaggaggcgacgacgccgtcgctatactcttggcattggccgtcgacgaagtccaggtcgttgccatcacctgctcgtacggaaataccgatgaagataaggtggagactaatgtgctcaagattctcactgttgccggaagatctgacattccagtgtacggcggagcaaaaaggcctctgctcaagaagtacaaagcttcggaatacttcggtaaagacggcttcggcgatttccaattcgatgggcgactgatcggtagtatcgacagatcaaaacacgccgctatcgcacttatagaattggctaaaacataccgaggtgaaataagtgtggtggcgttaggcccactgacgaacattgcactggcagcttcgctagatccaactttcacgcagaacgtacagagattttacgttatgggctcgagggtggacgagctgaagaacgcaaaaaacgcctcgctggagttcaacttcggtttggatccagaaggcaacgcgatttttttgaaagagcccacgaacttaacaacactcgtcacgccttacgacgttgtacacagtaacaccatcgatatgaaatggcgaatgaagatactgggaacatcagattcggcggtcgcgcagttcctgaacaaagctgaatcggtagtcctcaaaaacattcccgacaagtggtccgtcgcggattcgataaccgttgcaacgatgatctggccggaacttgttaccgaatccctcgaagctcacatgtcagcggatctccacagtcctttggggtccggttcggtgatagtcgaggcaaatggatacagcgccaagaggaataacgtagagattatcagagggctgaatatgataggctttcaggaaaagctcttgaggtatttggcgtga

SEQ ID NO: 144043 - protein, 339 aa, Nasonia vitripennis
MLCKISVIIVSVLLIFLLPATTTTVRDSMGNSRLVVIDTDAGGDDAVAILLALAVDEVQVVAITCSYGNTDEDKVETNVLKILTVAGRSDIPVYGGAKRPLLKKYKASEYFGKDGFGDFQFDGRLIGSIDRSKHAAIALIELAKTYRGEISVVALGPLTNIALAASLDPTFTQNVQRFYVMGSRVDELKNAKNASLEFNFGLDPEGNAIFLKEPTNLTTLVTPYDVVHSNTIDMKWRMKILGTSDSAVAQFLNKAESVVLKNIPDKWSVADSITVATMIWPELVTESLEAHMSADLHSPLGSGSVIVEANGYSAKRNNVEIIRGLNMIGFQEKLLRYLA

SEQ ID NO: 144044 - DNA, 981 bp, Nasonia vitripennis
  CDS (1)..(981)
atggagtgccaaaaaattatagttgactgtgatgctggaactgatgatgctttagctttaacaatgttgatagcagctcacaaacaaaagaaaatagaaataatggcaatcacttgtgttactggtaacacatatgttgacaatgtaataaacaatgtcttcagaactctgcatgtgtgtgatgctgtagatattccagttcataaaggagcagactctgcgctgctatcaacagaaaatgcacgggtagctgtaagtcatggatttcatggttccgatggatttggtgatgtctatactgataagcctgatatcagtaaacttaaagatgagcatgcagtatgcgcattacataggataacatctcaatatccgggagaagtaacagtgcttggacttgggccattaacaaatattgctcttgctattaaaatgtatccagattttgcaaacaatgttaaaaaatatttagtcatgggtggaaatttatctgctattggtaatataacatcacaagcagaatttaacttttatgcggatccagaaagtgtgcatatagttatgagttttgcagcaaagaagatgtggttattgccatgggaaacgtgtatgaaatcaaatattgctcatgaatggagagataatgtatttggaaaaatagatactcctgtagtggaacttatcaatgcaattgatggtggtatttacaataccaatgaaaagcgaacatggaattatagaccctgtgatgcatttatagctggtgttttactcagaccagatattgctaaagatgtagtgttacaccatgttgatatagaacttagtggtttgaaaacgagagggcaagttgtaattgatcatctcatatcaaatgaaccaaatgtgcacgttattcaagatttggattttgagactttcaaagagctcttactctatgctgcaaatccaaatacaaaaaacagtcgtgtacttttataa

SEQ ID NO: 144045 - protein, 326 aa, Nasonia vitripennis
MECQKIIVDCDAGTDDALALTMLIAAHKQKKIEIMAITCVTGNTYVDNVINNVFRTLHVCDAVDIPVHKGADSALLSTENARVAVSHGFHGSDGFGDVYTDKPDISKLKDEHAVCALHRITSQYPGEVTVLGLGPLTNIALAIKMYPDFANNVKKYLVMGGNLSAIGNITSQAEFNFYADPESVHIVMSFAAKKMWLLPWETCMKSNIAHEWRDNVFGKIDTPVVELINAIDGGIYNTNEKRTWNYRPCDAFIAGVLLRPDIAKDVVLHHVDIELSGLKTRGQVVIDHLISNEPNVHVIQDLDFETFKELLLYAANPNTKNSRVLL

SEQ ID NO: 144046 - DNA, 978 bp, Nasonia vitripennis
  CDS (1)..(978)
atggaatgtcaaaaaattattgtcgactgtgacgctggaaccgacgatgccttggctttgatattgttgatagccgcccataaacaaaagaaaattgaaatactggcaattacttgcgttaccggtaacacgtacgttgacaacgtagtaaacaatgtcttcagaactctacgtgtttgcgatgctttggatataccagtgcataaaggcgcagattctgcactattgtcaacagaaagtgcacggatagttgtacgtcatggatttcatcacggctccgatggattcggcgatgtttatactgataagcctgatatcagtaaactcaaagaagagcacgccgtatgcgcgttgcataggataacggctaaatatcctggtgaagtaacagtgcttggtcttgggcctttaactaatgttgctatcgctgtgagaatgtatccagatttcgcgaaaaacgttaaaaaattcttagtcatgggcgggaatctatgtggtagcctatcatcacaagtagactttaacttttttgctgacccagagagtgtgcatatagttatgaattttgcagcaaagaagatgtggttattgcccttaggaacatgcatgagatcgaatattactcatgaatggagagacaacgtattcggcaaaatagacactcctgtggtagaactcattaatacaatcgatagtggtaaatacaaaactagcaaaaagcgaacattgaattatagaccctgcgatgcacttttagctggtgttttgctcaggcctgacattgctaaggatctagcgttacaccatgttgatatagaacttaatggtctgaaaacaagagggcaagttgtaattgatgatctcgcgtcgaatgaaccaaatgtgcacattattcaagatctagactttgaaactttcaaagatctcttaatttacgctgctaatccgaacacagaaaacagtagagtacttttataa

SEQ ID NO: 144047 - protein, 325 aa, Nasonia vitripennis
MECQKIIVDCDAGTDDALALILLIAAHKQKKIEILAITCVTGNTYVDNVVNNVFRTLRVCDALDIPVHKGADSALLSTESARIVVRHGFHHGSDGFGDVYTDKPDISKLKEEHAVCALHRITAKYPGEVTVLGLGPLTNVAIAVRMYPDFAKNVKKFLVMGGNLCGSLSSQVDFNFFADPESVHIVMNFAAKKMWLLPLGTCMRSNITHEWRDNVFGKIDTPVVELINTIDSGKYKTSKKRTLNYRPCDALLAGVLLRPDIAKDLALHHVDIELNGLKTRGQVVIDDLASNEPNVHIIQDLDFETFKDLLIYAANPNTENSRVLL

SEQ ID NO: 144048 - DNA, 942 bp, Anopheles gambiae str. PEST
  CDS (1)..(942)
atggccgcaccaaggaaggtaattatcgatctggatgtcggtacagacgacgcatgggccctgtggatgctgctgcagtgtgagaagacgtacggctacgaggtgatcgccatcacgtgcgtgaacggcaatacgggcgtggagaatgtggtggaaaacacgctcaccgtgctgtccgcgatgggccgtacggatgtgcccgtgtaccggggtgcccacgaaccgctggtccatccgcggggaacgaaatacgacggcaacttccacggccagaatgggctcggtgatatcgacttcgggatcgaggtgaaccgcactcccctgcaagaggaacacgcggtcactgccatccagcgtctgctgaacgcgcacaaaggaagcatcgatttgatctttatcggtccgctgacgaatttggcactggccatgaagctacggccggggctgctgaagcaggcgagccatctctacatcatgggcggcaaccggcacggagtcggcaatatcacgtggtcggccgagttcaacttccacaccgatccggaggcggcccatattgtgctgcagagcgattgctgcccgatctcgatcgtaccgtgggagacgtgtcagcggcacgccgttccgctggcctggcgaatggaggagctgggtgcggatgaaaccaaaccgatgctgcggatactgaacgcagtggagcgcaaagtgtacggccagcggccaaactggatgccgtgcgatgcgtacctggtggcggcgttcattcaaccggactgtgtgctgaaggcccacagctatacggttgacgtggagctgcacggtgcgcttacccgcggtcagatggtgctggatcaccgcggtgctggcgcgggccacgtgcgcatcatcgacgatattgatgagggcaagtttaaggagctgtgctggaagacggtcgcctga

SEQ ID NO: 144049 - protein, 313 aa, Anopheles gambiae str. PEST
MAAPRKVIIDLDVGTDDAWALWMLLQCEKTYGYEVIAITCVNGNTGVENVVENTLTVLSAMGRTDVPVYRGAHEPLVHPRGTKYDGNFHGQNGLGDIDFGIEVNRTPLQEEHAVTAIQRLLNAHKGSIDLIFIGPLTNLALAMKLRPGLLKQASHLYIMGGNRHGVGNITWSAEFNFHTDPEAAHIVLQSDCCPISIVPWETCQRHAVPLAWRMEELGADETKPMLRILNAVERKVYGQRPNWMPCDAYLVAAFIQPDCVLKAHSYTVDVELHGALTRGQMVLDHRGAGAGHVRIIDDIDEGKFKELCWKTVA

SEQ ID NO: 144050 - DNA, 1155 bp, Magnaporthe grisea 70-15
  CDS (1)..(1155)
atgagcgctcagcctataccagtctggcttgactgtgacccaggccacgatgatgcttttgccatacttttggccgcacaccatcccatgataaatcttctgggcatttcaaccgtgttcggcaacgcatctttagagaaaacaacatacaacgccacatcacttctcgctgccattggcaagcatgatcaagtgacggtttacccaggcgccgcaaaggcccggtctcggccaccagttcactctccaaccgacatccatggagagtctggtatcgatggcactgacctgcttcccaagccgctgagggctccagataggtcaatctctgcagtcgacgccatggccaaggctgtcctggctcagcccgcaggtactccgtggatcgtggcgactggatgcctcaccaatgtcgccgaggctgtcgagaagtatccccagcttgcggagcacgttgcgggcctgtcttttatgggaggtgccgtgggtggaggcttcactacagccgtgtcgggacaggtcgacggtctcgagaggatcgggaacaggaccccctgggcagagttcaacatctttatcgacccggagtctgccgactttatcctcagcaacgaagttctggctcagaaatccaccatgatcccccttgacgtgacgcatctggttctggccacgaaggaagtccagcagcggctgcttcatggcgacggaggccccgttgaagccggggccaagggcaggacgacactgcgcgtcatgctcgttgagcttctcaacttctttgccgagacttacagaactgcctttggcatcacagagggtcctcccctgcacgatccagtggctgccgccatagtgttgcagaccttgcctgaggaataccggattccattttacgacttcgacattgcgagggatggagggaagcgccatgaacgcttctccgtcaaggtcgtcaccgagggcacctacgaagatgcctatgccggtgcgcagacgggtcgcaccatcgcgactctgcttcccgagggtgcacaaggcgttgcgataccgcgcgggctggatattcccaagttctggaccgtgatcgaggagtgtatacagcgggccgacaatctgaacgcaaagtctagcgcgggaggtccgggtgcttga

SEQ ID NO: 144051 - protein, 384 aa, Magnaporthe grisea 70-15
MSAQPIPVWLDCDPGHDDAFAILLAAHHPMINLLGISTVFGNASLEKTTYNATSLLAAIGKHDQVTVYPGAAKARSRPPVHSPTDIHGESGIDGTDLLPKPLRAPDRSISAVDAMAKAVLAQPAGTPWIVATGCLTNVAEAVEKYPQLAEHVAGLSFMGGAVGGGFTTAVSGQVDGLERIGNRTPWAEFNIFIDPESADFILSNEVLAQKSTMIPLDVTHLVLATKEVQQRLLHGDGGPVEAGAKGRTTLRVMLVELLNFFAETYRTAFGITEGPPLHDPVAAAIVLQTLPEEYRIPFYDFDIARDGGKRHERFSVKVVTEGTYEDAYAGAQTGRTIATLLPEGAQGVAIPRGLDIPKFWTVIEECIQRADNLNAKSSAGGPGA

SEQ ID NO: 144052 - DNA, 1134 bp, Gibberella zeae PH-1
  CDS (1)..(1134)
atgtccgaagctcaggttcctatttggttggattgcgatccaggtcatgatgacgctttcgcaattctccttgcagcttatcaccctcagatgagacttcttggtgtctcaacagtttttggaaacgcatctcttgaaaacaccacacacaatgcggcttctattctcaccgccattggaatgcatgatattcccttgtatatcggcttgggaaaggcccttgagcgccctgctctccatgcaccaacagacatccatggcgtttctggactagacggcactgatcttttgcccacgccgctcgtcacaccttcaaccatgccagccgttgaggccatggccacggctctacgtgctcaacaacctggaacagcgtggattgttgcgacaggtgcgctgaccaatgttggagctctgttccgtgcgtacccagaacttatcagccacgtcaagggtgtcagtctcatgggcggctctatcggtgacaacttctcagatgcaccgctaggtgaagttgatggtcgacctcgaatcggaaactacacgccttgggccgagttcaacattctcgttgaccccgaggctgctgcaacagtcttccataacaaggagattgcggccaagaccacgattgtgccgcttgatctcagccatcaggtgctggccacacctgaggtgagagatatgcttctatatgggcctggtgccgagaagtcgggctctggaaagacaactcttcgaacaatgcttgttgagctcctttacttctttgcccaaacatacgctgacactttcggcattactgctggcccccctctccatgaccctatagctgttgccgccatactgatcggtacggagagcgaaatccccttctttgagtgggacgccaagcacagccagccccctcagcacgatgagcggttcgaggtcaccgttgtcaccgagggcacttttgaggaggccacggagggtggtaagcagacaggccgcacaatcgcaaagttgctcccacctggcgaacaaggtgtcagaattccacgcggagtcgatactgccaagttctggcaggtcattgaagagtgtatcgagcgagcagatgcaaaaaatgctgcgctcgcgcttgcactatga

SEQ ID NO: 144053 - protein, 377 aa, Gibberella zeae PH-1
MSEAQVPIWLDCDPGHDDAFAILLAAYHPQMRLLGVSTVFGNASLENTTHNAASILTAIGMHDIPLYIGLGKALERPALHAPTDIHGVSGLDGTDLLPTPLVTPSTMPAVEAMATALRAQQPGTAWIVATGALTNVGALFRAYPELISHVKGVSLMGGSIGDNFSDAPLGEVDGRPRIGNYTPWAEFNILVDPEAAATVFHNKEIAAKTTIVPLDLSHQVLATPEVRDMLLYGPGAEKSGSGKTTLRTMLVELLYFFAQTYADTFGITAGPPLHDPIAVAAILIGTESEIPFFEWDAKHSQPPQHDERFEVTVVTEGTFEEATEGGKQTGRTIAKLLPPGEQGVRIPRGVDTAKFWQVIEECIERADAKNAALALAL

SEQ ID NO: 144054 - DNA, 1014 bp, Candida glabrata CBS 138
  CDS (1)..(1014)
atgacagcaaccgaaatacctatctggctagattgtgatcctggccacgatgatgcagttgcaatactcttggcatgctgcctacctgcattcaaactagtgggactaagcacctgctttggtaatgcgccaccagaaaatactgactataatgctagatccctattgacagctttggggaagactgatgtgccagtatatctaggagcacaaagaccttggattagaaaacctcattatgctcctgatattcatggagaaactgggttggacggcacttctttattgcctgttccagtagtggaggtaaacaaagaggttaactttattgatgctattgaaaaagccattttggaaagtgatggtgagctatcattcgtctcaaccggagctaccaccactattgccactgtattgcgggagaaaccctacttattagaaaaaattaaatacattagcattatgggaggtggcctgggtgtgggtaatgtgaataaaggtttatcagctgaatttaatgtatggattgatcctcatgctgctaaattcttgcttacagatccaggtatcaaacggaagtgtatattaattcctttgaatctcacacacaaagccttggctactgatgaagtaatgaagagggttcttggtgatggtaagtcgaatataaggagactgttctacgatttgttcctatttttcaaaaagacatatgaacatgctcaaggatttgaaagtgggcccccaattcatgatccacttactttattacctcttcttgagctttatggctgggaaacaaaggaggtcattaatttctcgtataggcgcttagatatcgatgttgatattgatatccatagtgaccacgcgggaaaactgataatattgaacgaatatgagcaagaagaagttcagaaaggtgttattgtaggatatgagctgaatttcgattacttctgggataaattatacttctgtttggaagaagctgagaaaacttcaacaatatag

SEQ ID NO: 144055 - protein, 337 aa, Candida glabrata CBS 138
MTATEIPIWLDCDPGHDDAVAILLACCLPAFKLVGLSTCFGNAPPENTDYNARSLLTALGKTDVPVYLGAQRPWIRKPHYAPDIHGETGLDGTSLLPVPVVEVNKEVNFIDAIEKAILESDGELSFVSTGATTTIATVLREKPYLLEKIKYISIMGGGLGVGNVNKGLSAEFNVWIDPHAAKFLLTDPGIKRKCILIPLNLTHKALATDEVMKRVLGDGKSNIRRLFYDLFLFFKKTYEHAQGFESGPPIHDPLTLLPLLELYGWETKEVINFSYRRLDIDVDIDIHSDHAGKLIILNEYEQEEVQKGVIVGYELNFDYFWDKLYFCLEEAEKTSTI

SEQ ID NO: 144056 - DNA, 1017 bp, Kluyveromyces lactis NRRL Y-1140
  CDS (1)..(1017)
atgacgggcaattcagtcatacctatatgggtggactgcgatcctggtcatgatgacgcagtcgctattttattgagttgtttccatccaagcataagattattgggcatatcagcatcgtacggaaacgcttccccagaaaacacattgtacaataccctttctttacttacagcttttgggaaacaggatgaggtgcctgtgtacaaaggtgcccaacgtccttgggttagagatgttgcatacgccccagatattcatggggagactggattggacggtacgacgttattaccaaaaccaaaaaggtcatttgttgatgctgactacataaaagctatggaaaatgctatactagcaaacggagggaatattgccttggtttctacaggaactctaacatcgatagctactttgttcaaggaaaagccatatttaaaggaacaggttagatatatctccataatggggggtggcctacacgcaggaaaccgtaatgataatgattctgcggaattcaatatttgggcagaccctgatgctgcagattttatcctcaatgatgaagacattaagcataaatgcattctctctccgttggatttaacgcatacctgtattgccactgaatatatagacaagactatcttgggagatggatcatgcaaacttagaaagctcttttatgaactatttttgttctttgcgaaaacttataaaaacaaacaagggttcgaagctggtccaccggtacatgatcctgtcacactgatgccattattatatttatatggtcatatttcgaatgatattttgaggttcaagtatggaaggtttgatttgtcaatagataagaaccaagatagcataaactatggtcgcaccattgttacacaagagtacccttccgattcaaattttggcttaatggtgggtctgcagattaatgtggatttcttttggaatcaggtattgaatgcaattgatgtagcagaaaactatccaggctctctttga

SEQ ID NO: 144057 - protein, 338 aa, Kluyveromyces lactis NRRL Y-1140
MTGNSVIPIWVDCDPGHDDAVAILLSCFHPSIRLLGISASYGNASPENTLYNTLSLLTAFGKQDEVPVYKGAQRPWVRDVAYAPDIHGETGLDGTTLLPKPKRSFVDADYIKAMENAILANGGNIALVSTGTLTSIATLFKEKPYLKEQVRYISIMGGGLHAGNRNDNDSAEFNIWADPDAADFILNDEDIKHKCILSPLDLTHTCIATEYIDKTILGDGSCKLRKLFYELFLFFAKTYKNKQGFEAGPPVHDPVTLMPLLYLYGHISNDILRFKYGRFDLSIDKNQDSINYGRTIVTQEYPSDSNFGLMVGLQINVDFFWNQVLNAIDVAENYPGSL

SEQ ID NO: 144058 - DNA, 1056 bp, Debaryomyces hansenii CBS767
  CDS (1)..(1056)
atgactatcgcagattctattcctatatggctagattgtgatccaggtaatgacgatgcttttgccattttgttagccgcatttcacccaaaatttaatttgcttggtatatctacggtatatggaaatgccccaaattcaagtacaactcacaatgcattagcattattagatgttttaggggccgagcaagatcaaataaaggtttactccggggaaaataaaccattagttaagcctgttaaatttgcaccagaaatacatgggccaaccggtattggtggggccaagttacctaagacacctagaattaaagagtcgacagatcagacatacttgcaagccatgagatcagctattttggagcacgcaggaaaaatatgtgtcatttgtactgggactttgaccaatatggctattttgatagaaacctacccagaagtgaaatctaagattaggtttgtgtctattatgggtggtgcgttgaataagggtaatgctactaaatacgccgagtttaacgttcattgtgatccactcgcggctgctaatgtcttgaatgatgaagagctaagtggcaaaacgatattgactggattgaatattacacacaaggcaatcgctactatggaagtcaggaggaacatatacgacgaaacaaatccaaaaaaggactctcatgtgagaaaattgttctacgatattgcaatgttctatgcggaatcatatcgtgttcaacataatataacccttggtccaccaattcatgatccgttagcggttttccttattcttgcattagtaaataagcaagaagacttggcagatgacgttgatttcaaatatatcaaaagaaaattgaaggttatccaggagggtgaacgcgagggagagacgcaaatagctaatggggacctcgatgagctgaaggaggaggaaaatggggtttatgtcggcttgaatgttaacgtggaattattctggagttacgtcttaaaagcacttgataatgccgagcatcatgtagctaactacaaccaaaattctagcatgtaa

SEQ ID NO: 144059 - protein, 351 aa, Debaryomyces hansenii CBS767
MTIADSIPIWLDCDPGNDDAFAILLAAFHPKFNLLGISTVYGNAPNSSTTHNALALLDVLGAEQDQIKVYSGENKPLVKPVKFAPEIHGPTGIGGAKLPKTPRIKESTDQTYLQAMRSAILEHAGKICVICTGTLTNMAILIETYPEVKSKIRFVSIMGGALNKGNATKYAEFNVHCDPLAAANVLNDEELSGKTILTGLNITHKAIATMEVRRNIYDETNPKKDSHVRKLFYDIAMFYAESYRVQHNITLGPPIHDPLAVFLILALVNKQEDLADDVDFKYIKRKLKVIQEGEREGETQIANGDLDELKEEENGVYVGLNVNVELFWSYVLKALDNAEHHVANYNQNSSM

SEQ ID NO: 144060 - DNA, 1149 bp, Yarrowia lipolytica CLIB122
  CDS (1)..(1149)
atgccccgatcgctcatcatcgacactgatcccggcgtggacgacgcgctggccatctcgctggctctcaactcgcccgagtgcgacctcaagctcatttctctgtgtttcggcaactgcgacacgaacgccagtctgcgcaatgtggagacactcttcagcgtgtttgaacgcgagcgagtgtggcgagagcagcagggtctgcccgccaagcaccacgtgaaccagaaacccattgtggctgtcggaatggacacggcgttggacggaacccgactggacgctacctacttccatggtgacgacggactcggtaacgtgcacaccaagatgcccgagttcaccagcaccgacaagaacggacccggatacacgttttccgacaagccttcgtatcaagtcattctcgacctgctgcgtgaagagcccgacaagtccgtgacgattgcggccattggcccgctcatgaacattgcccgagcggcccagattgatcccgacaccttttcgcgggtgaaggagattgttcacatgggcggcgctctcaaggtgcctggaaatgtgactccccgtgctgagttcaactgttactctgaccccctggctgcggcggtggtgtactcgttttcggccactgagcagccctgtgtgactttgcctcctcgaaaggagttccacgtaacgcttccgcgacctgtgcccgtcacaatcttccctctggatattaccatggagtacaatctctacgagaaccagtttttcaccgcggtttccgaccgcgccgcagcaggctctcctctgacggtgtggtcgtcggtgtggctccagtccacctttgacaccttccgtcgacttaacgtggactgttctgacgtccatatcaacatgcatgatcccctggccacctggtacgccatttgtggagatgagcatggcgcctgggagtcacacgaccaggatgtccgtgtggaaaccgagggacagtggtcccgtggggtaactattgaggacgaccgcggccgacaaaagacggatgccgaggccgaggacgacggaaagtggctgggacgaggaggaaaccatgtcaaggtggtgaccaaggcgccagtcgaggtgggccagttgttggtggagcggatttacgtgtaa

SEQ ID NO: 144061 - protein, 382 aa, Yarrowia lipolytica CLIB122
MPRSLIIDTDPGVDDALAISLALNSPECDLKLISLCFGNCDTNASLRNVETLFSVFERERVWREQQGLPAKHHVNQKPIVAVGMDTALDGTRLDATYFHGDDGLGNVHTKMPEFTSTDKNGPGYTFSDKPSYQVILDLLREEPDKSVTIAAIGPLMNIARAAQIDPDTFSRVKEIVHMGGALKVPGNVTPRAEFNCYSDPLAAAVVYSFSATEQPCVTLPPRKEFHVTLPRPVPVTIFPLDITMEYNLYENQFFTAVSDRAAAGSPLTVWSSVWLQSTFDTFRRLNVDCSDVHINMHDPLATWYAICGDEHGAWESHDQDVRVETEGQWSRGVTIEDDRGRQKTDAEAEDDGKWLGRGGNHVKVVTKAPVEVGQLLVERIYV

SEQ ID NO: 144062 - DNA, 993 bp, Candida albicans SC5314
  CDS (1)..(993): transl_table=12
atgacgaaactgcctattccaatttggttagactgtgatccaggaaacgatgatgcctttgctatcttattatccttgtttgacagtcgattccaacttttaggtatttccacagtacatggaaatgccccaattagcatgacaacacacaatacattagggttactagatctattgcgtgtctataataaagttaaagtctacaaaggagccgaattcccactcaaagtaccttcaaagtttgcattggaagtacatggaaagaatggattagccgatatagaattttctgaaaatacaatcaatgaaattagtcaagacatggattgtattgaagctatgaaacaaacaatagacttgaattccgaaaatatcaatcttgtatgcacaggtacattaacaaatgtcgccaaactaattacaaaatacccagatgtcacatcacagattaaatgggtctccataatgggcggaagctttgggtttggcaatattactccctatgctgaattcaatttgcatactgatccacatgcagccaaattagtaattcaggaattaagtaacaaggttattttatccccattgaattttacccataaagtcattgccacttcggaaattagaaaacatatgtatgacgacaataacgagaaacgaagttctccaataagaaatgttttctttcgtattttgacattctattacaaagtgtatgctgcaaatggatttttggaaggcccaccaatacacgatccattggctgtctatagcttgcttccatttttcaattcatttgagcaatatggatatacctgtgcgcagaagaatattgatattattactgaaggtgttagaatgggtgaatcggtgattgttgaaggagggaatactgacaaaggagtttatattggtgaagcgatagataacaaaaagttttgggatagtattttattggctcttcaaaatgcggatttacaaacaaagaattga

SEQ ID NO: 144063 - protein, 330 aa, Candida albicans SC5314
MTKSPIPIWLDCDPGNDDAFAILLSLFDSRFQLLGISTVHGNAPISMTTHNTLGLLDLLRVYNKVKVYKGAEFPLKVPSKFALEVHGKNGLADIEFSENTINEISQDMDCIEAMKQTIDLNSENINLVCTGTLTNVAKLITKYPDVTSQIKWVSIMGGSFGFGNITPYAEFNLHTDPHAAKLVIQELSNKVILSPLNFTHKVIATSEIRKHMYDDNNEKRSSPIRNVFFRILTFYYKVYAANGFLEGPPIHDPLAVYSLLPFFNSFEQYGYTCAQKNIDIITEGVRMGESVIVEGGNTDKGVYIGEAIDNKKFWDSILLALQNADLQTKN

SEQ ID NO: 144064 - DNA, 1221 bp, Cryptococcus neoformans var. neoformans B-3501A
  CDS (1)..(1221)
atgccgcacaaaatcatcctcgacaccgacccaggcgtagacgacgtcctcgccatcctcctcgcgctctcctcccccgaagtcgacctggccctcatctccatcgtctttggcaacacccacgcgcccgttgcgcatagtaacttgttaaagatataccatctcctggcgcaagaggtggcgcagactgcgggcgcggaggggaggtatgggaggttgaaggggcaggtgaagacggtgttggcgatgggggaggatgggccgattggcggggagaaggcggtggctgcgtactttcatggcccagatggattgtcaaacattagcgagacgcaccctcatttcactcctcccgagattcagccaggggacatgcatgcacatctcgacacatcgcctaaaccttcttacgaggtgatacttgatatcctcagggcggagcctgacgacagcgtgaccatcgttgccctcggtccattgacgaacattgcacactctctgcgtgccgatccagagacattcaccaaagtctcccgcgttgtatggatgggcggtgcgatcgatcacccgggtaacacttcccccgtcgctgaattcaactgttttgccgacccttacgccgcgtcttccgtcatctctgccgccaaggagggtaagattgaactcgtcatggctcctctcgacatcaccaccccgcacgccatccctttttctgatctgatccatccttccgtcgtccccatccccgagccatccaccggtgctgtccgaaaagccccagaaacgcccacgccgctggaagcgttcatctctgcgatgctcgtcagggtccgtggtctccaagcgagttttgggctaccagatgcgatggagatgcatgatcctgtagctgtgtggtatgccattgcgcacgctggtgttccccgcggagccgggccggtggaagggtgggcgctgcagggacgggagtttacggtcgagcggacgggcgagtacacgagagggatgtgtgtggtggatcgacgcgggacgggggagacaggcgtggataggagtaaggatgagcgtattctttcacaggggctggcgcaggacacgggaaatacattgccagagaaggcgttgaagccgcggatgttgccgcttgtgatcacgcgcacgccgggggcagaagtactgaggagcacgctgcttggacgggtgtttggagagcgggagtaa

SEQ ID NO: 144065 - protein, 406 aa, Cryptococcus neoformans var. neoformans B-3501A
MPHKIILDTDPGVDDVLAILLALSSPEVDLALISIVFGNTHAPVAHSNLLKIYHLLAQEVAQTAGAEGRYGRLKGQVKTVLAMGEDGPIGGEKAVAAYFHGPDGLSNISETHPHFTPPEIQPGDMHAHLDTSPKPSYEVILDILRAEPDDSVTIVALGPLTNIAHSLRADPETFTKVSRVVWMGGAIDHPGNTSPVAEFNCFADPYAASSVISAAKEGKIELVMAPLDITTPHAIPFSDLIHPSVVPIPEPSTGAVRKAPETPTPLEAFISAMLVRVRGLQASFGLPDAMEMHDPVAVWYAIAHAGVPRGAGPVEGWALQGREFTVERTGEYTRGMCVVDRRGTGETGVDRSKDERILSQGLAQDTGNTLPEKALKPRMLPLVITRTPGAEVLRSTLLGRVFGERE

SEQ ID NO: 144066 - DNA, 930 bp, Tribolium castaneum
  CDS (1)..(930)
atggcggacggtaggcgaaaagtcattgtcgacgtggacgtcggcaccgacgatttcctcgcacttctgatcctcctaaatgccgaaaaaaggcgtcaaatcaaaattgaagccatcgtgtgttcgatggggaacaccgccgtggaaaatgtttgcgttaacgtgatgaggctcctcgaggcagtggaacgcacggacatcccggtgtttaaaggcgccacgaaacaactcataccaccaacgcacgaaattcgacttttccatgggaaggacgggttcggggatttggggcttaaaggaaggccgcatatggaagcaattaaagaaccggcggcttccaaaattgcggaacttattgtggggaatcccggcgaaatcagcctcatttgcgtggcccccctgaccaatgtcgccctcgcgttgcgactctacgacaattttgcggactctatcaaggatttgtggataatggggggcaattacaccgcagttggaaacatcacacccaccgcagagtacaatttttacattgaccctgaagctgcgtttatcgtgctcgacacggtcaaaaaaccgatttttatcctcacatgggagacgtgcctttatccaaaaatcacattcgattggcgcttcaaggttttcggcgccaagaaaaacccagctattgaattactaaacctagctgaaagaagtgtttacaaggaagacgagaaaatttggctgccttgcgacgcttttctcgcagcggcgttcctcaaacccgaaataatcacgaaaaaaagcgctcattatgcaagtgttgagcttcacgggagtcagacacgggggcaaatcgtgctcgaccatttgaaaaccaagaaagaaaacgttacgattatcgaacagtttgatgctgaggcattccagcaaatactcatggatttgtaa

SEQ ID NO: 144067 - protein, 309 aa, Tribolium castaneum
MADGRRKVIVDVDVGTDDFLALLILLNAEKRRQIKIEAIVCSMGNTAVENVCVNVMRLLEAVERTDIPVFKGATKQLIPPTHEIRLFHGKDGFGDLGLKGRPHMEAIKEPAASKIAELIVGNPGEISLICVAPLTNVALALRLYDNFADSIKDLWIMGGNYTAVGNITPTAEYNFYIDPEAAFIVLDTVKKPIFILTWETCLYPKITFDWRFKVFGAKKNPAIELLNLAERSVYKEDEKIWLPCDAFLAAAFLKPEIITKKSAHYASVELHGSQTRGQIVLDHLKTKKENVTIIEQFDAEAFQQILMDL

SEQ ID NO: 144068 - DNA, 936 bp, Staphylococcus aureus subsp. aureus MRSA252
  CDS (1)..(936): transl_table=11
atgaaaagaaagattattatggattgtgatccaggacacgatgatgcaatagcattaattttagcgggggcaattgacagtccactagagatattagctgtaaccacagtcgcaggtaatcaatcagttgacaagaacacgacaaacgccttgaacgtattagatattatgggacgccaagatatagtagtagcgaaaggtgcggataggccgttaattaaactagttgcctttgcttctgaaatacatggggaatctggattagatggtccgaaactaccgtcgacaccatcacgtcaagcagttgcaatgccagcatcagatgtgattattaacaaagtgatgacgagtgatacacctgtaacaattgtagcgacaggtcctcttacgaatgtagcaacggcattgattcgtgagccaagaatcgctgagcatattgaatctattactttgatgggtggtggtacatttggaaattggacgcctacagcagaattcaatatttgggtagatgctgaagcagcgaagcgtgtttttgaaagtgggattactataaatgtgtttggtttagatgtaacacatcaagttttagccgatgaacacgtgattgaacgctttgaaagtatcaataatcctgttgcacagttcgtcgtagaattattgcaattctttaagaagacatacaagactcactttaatatggacggtggtccaatacatgatgcttgtacaattttgtatttgttacaaccagaattgtttacaatggtacccgttaatatcgacattgaacatcaaagtccactaacttatggcactatggctgtagatttaaatcatgttacaggtaagcctgccaatgcctattttgctacagcagttgatgttgaagaagtgtggaacttgatagatcataagttacgtacatacgaataa

SEQ ID NO: 144069 - protein, 311 aa, Staphylococcus aureus subsp. aureus MRSA252
MKRKIIMDCDPGHDDAIALILAGAIDSPLEILAVTTVAGNQSVDKNTTNALNVLDIMGRQDIVVAKGADRPLIKLVAFASEIHGESGLDGPKLPSTPSRQAVAMPASDVIINKVMTSDTPVTIVATGPLTNVATALIREPRIAEHIESITLMGGGTFGNWTPTAEFNIWVDAEAAKRVFESGITINVFGLDVTHQVLADEHVIERFESINNPVAQFVVELLQFFKKTYKTHFNMDGGPIHDACTILYLLQPELFTMVPVNIDIEHQSPLTYGTMAVDLNHVTGKPANAYFATAVDVEEVWNLIDHKLRTYE

SEQ ID NO: 144070 - DNA, 942 bp, Staphylococcus aureus subsp. aureus MRSA252
  CDS (1)..(942): transl_table=11
gtgactaagaaagtttattttaaccatgatggtggtgtagatgatttagtatctctatttttattattacaaatggaaaacgttcaattgataggggtcagtacaattggtgctgattgttatttagaaccatctttgagcgcatcagtaaaaattattaatcgtttttcaaaggaagatattcaagttgcgccatcatatgaacgaggaaaaaatccatttcctaaagaatggcgtatgcatgccttttttatggacgcattgccaattttaaatgagccagtcaaacacgttgcttcaaatgtgagagacaaagaagcctttgaagacattattcaaactttaaagagacaatcagaaaaagtaacattattatttacaggcccgcttacagatttagcaaaagcactacaaaaagattcatcaatcgttcagtatatagaaaaattagtttggatgggtggtacctttttaccaaaaggaaatgttgaagaacctgagcatgatggttctgcagaatggaatgcatattgggatccagaagcggttaaaattgtttttgatagcgatatagagattgatatggttgctttagaaagtacgaatcaagtaccgctaacgttagatgttagacaaagatgggcgaatgaacgccaatatacgggcattgattttttaggagtaagttatgcagcggtaccaccattaacacactttataacaaattctacttactttttatgggatgttttaacgactgcttatattggtaacaaggacttagttcactcaattgagaaaaaagtggatgtaataagttatggaccaagtcaaggtaagacatttgagtgtaaagatgggcgcaaaattaatgtcataaatcatgtagataacaacgcattttttgattatataactgcacttgctaaaaaagtaaattaa

SEQ ID NO: 144071 - protein, 313 aa, Staphylococcus aureus subsp. aureus MRSA252
MTKKVYFNHDGGVDDLVSLFLLLQMENVQLIGVSTIGADCYLEPSLSASVKIINRFSKEDIQVAPSYERGKNPFPKEWRMHAFFMDALPILNEPVKHVASNVRDKEAFEDIIQTLKRQSEKVTLLFTGPLTDLAKALQKDSSIVQYIEKLVWMGGTFLPKGNVEEPEHDGSAEWNAYWDPEAVKIVFDSDIEIDMVALESTNQVPLTLDVRQRWANERQYTGIDFLGVSYAAVPPLTHFITNSTYFLWDVLTTAYIGNKDLVHSIEKKVDVISYGPSQGKTFECKDGRKINVINHVDNNAFFDYITALAKKVN

SEQ ID NO: 144072 - DNA, 948 bp, Acinetobacter sp. ADP1
  CDS (1)..(948): transl_table=11
atgacacattctcctcatcaaattattattgatacagatccaggtcaggatgatgcagttgcaattttattggcactggcgagccctgaagtaaaggtacttgcgattacaacggtcgctggaaatgtgccattggcattgaccagtgcaaatgcacgtaaagtatgtgaattggctggacgtccagatatttctgttttcgctggatgcgatcgtccgttgaaacgtccattaattaccgccgaaaatgtacatggaaaaacaggactcgatggtattgagttacctgagccgcaaatgcctttgcaggcccagcactcagttgattttattattgaaactctgcgaaatgcacctgagaaaacaattacgatctgttctttggggccgatgaccaatactgctcaggcactattaaaagctccagatattgcagcgcgagttaagcgaattgtcttgatggggggcggcttttttgaaggaggaaatattacaccttcggcagaatttaatatgtttgttgacccagacgcagcgaaaattgtatttgctgcgggtattccattaactgtgattccacttgatgtcacacatcaagtcttaacctcgaaagaatgggtcgatggtttgcgccgtatggataatcaggtcggtcctgctgtagcagcctggacagatttctttgaacgttatgatatggaaaaatacggttctgaaggcgcaccattacatgatccttgtgtcatcggctatatgatcaaacctgaactattctctggtcgttttatcaatgtcgagattgaagcggatagcccattgacagtgggcgctatggttgcagactggtggaatgtcactggtcgcactgcaaatgcagaatatttacgtgatattgatcgtgatggcttctttgatttgctatcagagcgtctggcaacgtatcagtag

SEQ ID NO: 144073 - protein, 315 aa, Acinetobacter sp. ADP1
MTHSPHQIIIDTDPGQDDAVAILLALASPEVKVLAITTVAGNVPLALTSANARKVCELAGRPDISVFAGCDRPLKRPLITAENVHGKTGLDGIELPEPQMPLQAQHSVDFIIETLRNAPEKTITICSLGPMTNTAQALLKAPDIAARVKRIVLMGGGFFEGGNITPSAEFNMFVDPDAAKIVFAAGIPLTVIPLDVTHQVLTSKEWVDGLRRMDNQVGPAVAAWTDFFERYDMEKYGSEGAPLHDPCVIGYMIKPELFSGRFINVEIEADSPLTVGAMVADWWNVTGRTANAEYLRDIDRDGFFDLLSERLATYQ

SEQ ID NO: 144074 - DNA, 972 bp, Erwinia carotovora subsp. atroseptica SCRI1043
  CDS (1)..(972): transl_table=11
atggttcgagagcgcattattattgataccgatcccggcgttgacgatgcaatcgccatctggctggcattggcgtcgcccgaactggacgtgctcggtattaccgttgtggcaggtaatgtgccgcttgaagcgacgttgccgaatgcttgcaacgttgttgggctgacgggcagaaccgatgtgcccatttttgctggtgcctcgcgtccgctcattcgcgatcaggttttcggtaaatacgcccatatcggcaaattttcctctgagtgggtgccgcagagcacgctatcgccggaacaggaacacgccgtcgattttctggtgcggatgacgcgtcaggccgctgccgacaataatccgatcaccatttgttcactcgggccgatgacgaatctggcgttggcgctgtgcttccatcctgatgttgcacgcggtatcaaacagattgtttccatgagcggtgcctttaccgcgatggggaatcgcgtgccgtgggctgactttaacgtctatgccgacccgcatgcagcggaaatcgtattttcctccggtgttcccgttgtcattatgccgttggatgtgacctttcaggcactgattcagacggaacaggttgatgtcatcgaacgcagcgccggtgcaccgggtaaagcgatggcggcactgctgctcatgtttgaccgcaacgaggtagaacgctttggtcgcgaaggtggaccgattcatgatgcgactgtcatcgcgtggctgttgaagccagaattgttcaagtcaaaatatgcgcgtatcggggttgaagtttccggtaagaccgcaggttacgtgtttgccgatttttatcacaaactgggtgagccagcgaatgcgctggtcatgcgggaaatcgacgaacagggatttcttgggctgattgctgaccgcctgcgccactacgatgttgatacattaaacggttcaggggggcgctga

SEQ ID NO: 144075 - protein, 323 aa, Erwinia carotovora subsp. atroseptica SCRI1043
MVRERIIIDTDPGVDDAIAIWLALASPELDVLGITVVAGNVPLEATLPNACNVVGLTGRTDVPIFAGASRPLIRDQVFGKYAHIGKFSSEWVPQSTLSPEQEHAVDFLVRMTRQAAADNNPITICSLGPMTNLALALCFHPDVARGIKQIVSMSGAFTAMGNRVPWADFNVYADPHAAEIVFSSGVPVVIMPLDVTFQALIQTEQVDVIERSAGAPGKAMAALLLMFDRNEVERFGREGGPIHDATVIAWLLKPELFKSKYARIGVEVSGKTAGYVFADFYHKLGEPANALVMREIDEQGFLGLIADRLRHYDVDTLNGSGGR

SEQ ID NO: 144076 - DNA, 954 bp, Erwinia carotovora subsp. atroseptica SCRI1043
  CDS (1)..(954): transl_table=11
atgagtgcgttacctattattattgattgtgatccggggatagatgacgctattgcgttattaagtgcattcgtggcaccagagttggatattcgcggcatctgtacggtgtgcggtaaccaggcgctggaaaagacggtgcgtaatgcgctgcaaattgttgagctgggtcagcgcacggatatccccgttttcgcaggctgccatcggccgctgttgcgcgaacctattcatggccagtttcacggcgaaagcgggctgggccagacggtgctgcctgaaccgcaaaaacaggccgaagcgcagcatgcggtgagttttattattgcgcagtgtcggcaggcgatagctgacggcacgccgatcacgctgtgtacgttggggccattaaccaatgtggcgatggcgctgcgtatggctcccgagattgccgacggtattgcacgcattgtcatgatgggcggtgcgtatcgggaagcgggcaaccgcagcctgacatctgaattcaatatgattgccgatccgcaggcagcgaaggtggtatttgactcgtcgattgcccttgtcgcgctgccgctggatgttacgcatcaggtaattttaacaccggaattggtggcgcgtttcgttgcgctatccgggcggatttccgtgccgctgggtgaaatgatggcgttttgggatcgtaacgatatccgccgctatggttcacgcggtggcccgctacacgatccgttggttattgcctgggttctggcgccgcactgtttcacgacagaaaaagccagcgtttacattgagcaggaaagtgagctgtgcatgggacaaaccgttgccgactggtatggaaaaaccgatcgtcagccgaatgtggatgtggtgacaggggttgatgccaaacaggttgtcgagctgtttgctgacctattgagccgctacagagagggggtctga

SEQ ID NO: 144077 - protein, 317 aa, Erwinia carotovora subsp. atroseptica SCRI1043
MSALPIIIDCDPGIDDAIALLSAFVAPELDIRGICTVCGNQALEKTVRNALQIVELGQRTDIPVFAGCHRPLLREPIHGQFHGESGLGQTVLPEPQKQAEAQHAVSFIIAQCRQAIADGTPITLCTLGPLTNVAMALRMAPEIADGIARIVMMGGAYREAGNRSLTSEFNMIADPQAAKVVFDSSIALVALPLDVTHQVILTPELVARFVALSGRISVPLGEMMAFWDRNDIRRYGSRGGPLHDPLVIAWVLAPHCFTTEKASVYIEQESELCMGQTVADWYGKTDRQPNVDVVTGVDAKQVVELFADLLSRYREGV

SEQ ID NO: 144078 - DNA, 942 bp, Silicibacter pomeroyi DSS-3
  CDS (1)..(942): transl_table=11
atgcccccccgcaagatcatcatcgacaccgaccccggccaggacgacgcggttgccatcctgctggcgctggccagccccgacgagctcgaggtgctgggcatcaccgccgtggccggcaacgtgccgctgccgctcaccgcaaaaaacgcccgtatcgtctgcgaactggcgggccgcgctgatgtcgccgtctacgccgggtgcgacgcgcccatcgcgcgcaagctggtcaccgccgaacatgtgcatggcaagaccgggcttgacggccccgacctgcccgacccggtgatgccgctgcaagaggcgcatgccgtcgatttcatcatcgacaccctgcgcgcccatgctccgggcacggtgacgctctgcccgctgggcccgctcaccaatatcgccaccgcattcacccgcgcgcccgacattgtctcccgcgtgcaggagatcgtgctgatgggcggcgcctatttcgaggtgggcaacatcacccccgccgccgaattcaacatctatgtcgatcccgaagccgctgatatcgtgttcaaatccggtgcgccgattgtggtgatgccgctcgatgtcacccacaaggcgcttgtcaccaaggcgcgcaacgatgccttccgcgcgctcggcacccccgccggcatcgccgtcgcccagatgaccgatttcttcgagcgcttcgacaaggagaaatacggctccgaaggtgcccccctgcacgacccttgtgtcaccgcctatctgctcaaccccgatctgttctcgggccgtcacatcaatgtcgccgtcgaaaccacctcggaactgaccctcggcatgaccgtggccgactggtggcgggtgaccgagcgggcgcccaacgcgctcttcatcggcgatctcgacgccgagggcttcttcacgctgctgaccgaccgtctggcgcgcctatga

SEQ ID NO: 144079 - protein, 313 aa, Silicibacter pomeroyi DSS-3
MPPRKIIIDTDPGQDDAVAILLALASPDELEVLGITAVAGNVPLPLTAKNARIVCELAGRADVAVYAGCDAPIARKLVTAEHVHGKTGLDGPDLPDPVMPLQEAHAVDFIIDTLRAHAPGTVTLCPLGPLTNIATAFTRAPDIVSRVQEIVLMGGAYFEVGNITPAAEFNIYVDPEAADIVFKSGAPIVVMPLDVTHKALVTKARNDAFRALGTPAGIAVAQMTDFFERFDKEKYGSEGAPLHDPCVTAYLLNPDLFSGRHINVAVETTSELTLGMTVADWWRVTERAPNALFIGDLDAEGFFTLLTDRLARL

SEQ ID NO: 144080 - DNA, 933 bp, Bacillus clausii KSM-K16
  CDS (1)..(933): transl_table=11
gtggccagaaaaatcttacttgacgttgatacaggcgtagatgatgccctcgccattatccttgcctccaaaagcacggacgcacaactgcttgcaattacgacagtgaacggaaatgtttctttagaaaaagcgactgttaacacgttaaaagtgttgacacttcttcataaagagggcgacattcccgttatccaaggggctcatgcgccacttcggcgcccgtgcttttttgaacatagcgtccacggcaatgacggccttggcggtgctttgcctcattttgagccaacggcacagcctgccgacggttatgctcctgattatataatcgaacaggcaaaccgttatccaggcgaactcacgcttgtcatgacagggccgctgacgaacttggcgttagcgcttgaaaaatgccctgatttgccaaaactcgtggcgggcgtcgtctatatgggtggtgccgcctttacacatggcaatgtcacccctgtggctgagtacaacatgtatgtcgatcctgaagcagcgcgcaaggtgatccatgccggcttcgccccccttgtgcaagtcggattagatgttacccgcaaagcacttctcactagggaaaacattggatcgctcgttgactcgcctatcaagcagtttatcaaaacgtgcaccgcagactatataaaacggtatgaagcgcgcaacaccgtggcagcttgtgccctccacgatcctcttgccgttgcttatgccttaaaacccgaattgctccatttggaagagatgtttgtggaagtagaaacaaacagccaattttgcgatgggcagacggtatgcgacaggcaacagcgcttaggaaaaccggcaaacgttaacgttgccactgagatcgacagcgatgcatttttatcgtactttttgcattcaattcaaaactga

SEQ ID NO: 144081 - protein, 310 aa, Bacillus clausii KSM-K16
MARKILLDVDTGVDDALAIILASKSTDAQLLAITTVNGNVSLEKATVNTLKVLTLLHKEGDIPVIQGAHAPLRRPCFFEHSVHGNDGLGGALPHFEPTAQPADGYAPDYIIEQANRYPGELTLVMTGPLTNLALALEKCPDLPKLVAGVVYMGGAAFTHGNVTPVAEYNMYVDPEAARKVIHAGFAPLVQVGLDVTRKALLTRENIGSLVDSPIKQFIKTCTADYIKRYEARNTVAACALHDPLAVAYALKPELLHLEEMFVEVETNSQFCDGQTVCDRQQRLGKPANVNVATEIDSDAFLSYFLHSIQN

SEQ ID NO: 144082 - DNA, 909 bp, Staphylococcus epidermidis RP62A
  CDS (1)..(909): transl_table=11
atgtctattcccattataattgatactgatcctggtatagatgatgctacagcaattagtatcgcactttcacaccctcaatttgacgttaaaatgatatcaactgtgaatggtaatgtaggtattgagaaaacgacagcaaatgcattaaagctaaaaaggttttttaatagttctgttcctgtacatagaggggcatcccaaccattgattaatgacatctttgaagctacatcaattcatggtgagtctggtatggatggttacgagtttccacaaataaatcaagatgatttaacatcaattcatgcagttgaagcaatgagaaatctattagtaaatactcaagaacctttaaccttgattgccataggtccactaacaaatatcgctattcttttaactagttatcccgaagttcaaccatttattaaggaaattgttttaatgggtggtagtaccggtagaggtaatgtaacgcctttagctgaatttaatatatattgtgatccagaagctgctcaaattgtatttaactctggattacctttgactatgattggtcttgatttggctcgtgaagcattgtttactcaccattttgtaaaagacttcaaagatacaaatgcaacttcaaacatgttatataatttatttcagcactataagagtgaagattttgaaataggatttaaattatacgatgtattcactatattatatttgttggatccagaagcctttaatgtcaaggaggcgtatactcaaatagaattaaatggcaactttacaaggggagccacagtggtagactttaatatggagcatcccaattgtacagttgttttaagtcctgttgaaagacagtatgaggatttattcttaaacgccctttcttattgtaaataa

SEQ ID NO: 144083 - protein, 302 aa, Staphylococcus epidermidis RP62A
MSIPIIIDTDPGIDDATAISIALSHPQFDVKMISTVNGNVGIEKTTANALKLKRFFNSSVPVHRGASQPLINDIFEATSIHGESGMDGYEFPQINQDDLTSIHAVEAMRNLLVNTQEPLTLIAIGPLTNIAILLTSYPEVQPFIKEIVLMGGSTGRGNVTPLAEFNIYCDPEAAQIVFNSGLPLTMIGLDLAREALFTHHFVKDFKDTNATSNMLYNLFQHYKSEDFEIGFKLYDVFTILYLLDPEAFNVKEAYTQIELNGNFTRGATVVDFNMEHPNCTVVLSPVERQYEDLFLNALSYCK

SEQ ID NO: 144084 - DNA, 1026 bp, Pseudomonas syringae pv. phaseolicola 1448A
  CDS (1)..(1026): transl_table=11
atgacgttgatgcagttttccagacagttcattcgtggagcattgctcttgtccatactgagtagcgctgccgttcaggcggcagaaaagcgtgatctgatcatcgataccgaccctggcgcggacgacgtcgttgcgttgctgctggcgctggcgtcacccgaagaattgaacgtgatggcgatcaccaccgtcgccggcaatgtccgtctggacaagacctcgcgcaatgccaggctggcgcgtgaatgggccgggcgtgaagaagtgccggtgtatgccggtgcgcccaaaccgttggtgcgcacacctatctacgccgaaaacgttcacggtcaggaaggggtgcccggcgtgcccgtgcatgagccagccaaggggttggccgacggtaatgcagtcgattacctgatccgcaccttgagcaaggccaagccgcacagcatcactatcgccatgctcggtccgcagaccaacctggcgctggcgctcgtgcaggcaccggaaatcacccagggcatcaaggaagtggtggtcatggggggcgcgcatttcaacggcggtaacattacgccggttgccgaattcaacctgtttgctgacccgcatgctgcgcagatcgttctggccagtggtgtgaagcttacttacgtaccgttggacgtgacccacaagatcctgaccagcgaacaacgcctcaagcagattgccgcattgggcaataacgccggcaagctggtcgacggcattctcaatgaatacgtcaaactggacatggagcattacggcttgcccggtggtccggttcacgacgccagtgtcattgcctggttgctcaagcccgagttgttttccgggcggcagatcaacgttgcggtcgacacccgcgagggcattggtttcggccagacggtggctgactggtacggcacgctcaagcagccgcagaatgtattctgggtcgagaatggcgacgctcagggtttcttcgatctgctgaccgagcgtctggcgcgactgaagtaa

SEQ ID NO: 144085 - protein, 341 aa, Pseudomonas syringae pv. phaseolicola 1448A
MTLMQFSRQFIRGALLLSILSSAAVQAAEKRDLIIDTDPGADDVVALLLALASPEELNVMAITTVAGNVRLDKTSRNARLAREWAGREEVPVYAGAPKPLVRTPIYAENVHGQEGVPGVPVHEPAKGLADGNAVDYLIRTLSKAKPHSITIAMLGPQTNLALALVQAPEITQGIKEVVVMGGAHFNGGNITPVAEFNLFADPHAAQIVLASGVKLTYVPLDVTHKILTSEQRLKQIAALGNNAGKLVDGILNEYVKLDMEHYGLPGGPVHDASVIAWLLKPELFSGRQINVAVDTREGIGFGQTVADWYGTLKQPQNVFWVENGDAQGFFDLLTERLARLK

SEQ ID NO: 144086 - DNA, 1029 bp, Pseudomonas fluorescens PfO-1
  CDS (1)..(1029): transl_table=11
atgcaccgctatgctcaaaaattgcatcaattgattcgggggctgctgcttttgtccgtgataaccgcgaccggcgcccaggcggcggaaaagatcgacctgatcattgacaccgatccgggtgccgacgacgtggtcgccctgttgtttgccctggcctccccggaagagctgaacattcgcgcgttgaccaccgtggccggcaatgtgcgtctggacaagacttcgcgcaatgccaggttggcccgtgagtgggctgggcgggaagatattccggtgtacgccggggcgccaaaaccgctgatgcgcacgccgatctacgctgaaaacatccatggcaaggaaggcctgtcgggtgtcaccgtgcatgagccgaagaaaggcctggccgaaggcaatgcggtcaactatctgatcgacaccctgaaaaaagccaagccgcacagcatcaccatcgcgatgctcggcccgcagaccaacctggccctggcgctgatccaggagccggagatcgttcagggcatcaaggaagtcgtgatcatggggggcgctcacttcaatggcggcaacatcacgccagtggccgaatttaacttgtacgccgacccgcaagccgcggaagttgtgctcaaaagcggcgtgaaactgacttatctgccgctggacgtgacccacaagatcctcaccagtgacgcacgcctgaagcagattgcggcgctgaacaacaatgcgagcaagattgtcggcgacatcctcaacgagtacatcaaaggggatatggagcactacggcattccgggtggcccggtgcatgacgccaccgtcgtggcttatctgctcaagcctgaactcttcacgggtcgttcggtgaatgtggtggtcgatagccgtgaaggcccgacattcggccagaccattgtcgactggtatgacggcctgaaggcgccgaagaacgctttctgggtggagaacggcgatgcccaaggcttcttcgatctgctgaccgagcgtctgaagcgtctgaagtaa

SEQ ID NO: 144087 - protein, 342 aa, Pseudomonas fluorescens PfO-1
MHRYAQKLHQLIRGLLLLSVITATGAQAAEKIDLIIDTDPGADDVVALLFALASPEELNIRALTTVAGNVRLDKTSRNARLAREWAGREDIPVYAGAPKPLMRTPIYAENIHGKEGLSGVTVHEPKKGLAEGNAVNYLIDTLKKAKPHSITIAMLGPQTNLALALIQEPEIVQGIKEVVIMGGAHFNGGNITPVAEFNLYADPQAAEVVLKSGVKLTYLPLDVTHKILTSDARLKQIAALNNNASKIVGDILNEYIKGDMEHYGIPGGPVHDATVVAYLLKPELFTGRSVNVVVDSREGPTFGQTIVDWYDGLKAPKNAFWVENGDAQGFFDLLTERLKRLK

SEQ ID NO: 144088 - DNA, 942 bp, Rhodobacter sphaeroides 2.4.1
  CDS (1)..(942): transl_table=11
atgaccccgccccgccggatcatcatcgacacggaccccggacaggacgacgccgtggcgatcctgctcgcgctggccagccccgaactcgaggtgctgggcatcaccgccgtggcgggcaacgtgccgctgcggctcaccgagcgcaatgcgcgcatcctctgcgagatcgcgggccggaccgacattcccgtcttcgcgggctgcgacgcgccgctggctcggcccctcgtcacggccgagcatgtccacggcaagaccggcctcgacgggccggccctgcccgaccccaccctgcccctgcaggagcgccacgcggtcgattacctgatcgagacgctgcgatccgagcccgcaggcagcatcacgctctgcccgctcggtcccctcaccaacatcgcggccatgcttcagcgcgcgccggacgtggcgccgcgcatccgcgagatcgtgctgatgggcggggcctatttcgaggtgggcaacatcacccccaccgccgagttcaacatcttcgtcgatcccgaggccgcggccatcgtcttcggcgccggcgtgccgctcgtcgtcatgccgctcgacgtgacgcacaaggccgtcaccgacagggcccgcgtggcgcggttccgcgagatgggcacccggatcggggagctggtcgaggaatggatggacttcttcgagcggttcgaccgcgagaaatacggcagcgagggcgcgccgctgcacgacccctgcgtgatcgcctatctcctcaaccccgacctcttcctcgggcggcacatcaatgtcgagatcgagaccgagggccgcttcaccaccggcatgacggtggcggactggtggcgggtgagcgaccggacaccgaacgcgctcttcatgcgcgacctcgatgcggacggcttcttcgcgctcctgaccgaacggatcgcgcggctctga

SEQ ID NO: 144089 - protein, 313 aa, Rhodobacter sphaeroides 2.4.1
MTPPRRIIIDTDPGQDDAVAILLALASPELEVLGITAVAGNVPLRLTERNARILCEIAGRTDIPVFAGCDAPLARPLVTAEHVHGKTGLDGPALPDPTLPLQERHAVDYLIETLRSEPAGSITLCPLGPLTNIAAMLQRAPDVAPRIREIVLMGGAYFEVGNITPTAEFNIFVDPEAAAIVFGAGVPLVVMPLDVTHKAVTDRARVARFREMGTRIGELVEEWMDFFERFDREKYGSEGAPLHDPCVIAYLLNPDLFLGRHINVEIETEGRFTTGMTVADWWRVSDRTPNALFMRDLDADGFFALLTERIARL

SEQ ID NO: 144090 - DNA, 1074 bp, Burkholderia sp. 383
  CDS (1)..(1074): transl_table=11
atgttttctgagcgccagaccatgacccattcgatcgcatcccgccgcaccttcctgaaactgtccgccgcgctggccggcaccgcgctgctgcccgaaacgggcgcgttcgcggccggcggcgacgccgcgcgccgcacggtgatcatcgataccgacccggggcaggacgacgccatcgcgatcctgttcgcgctgggcgcgcaggaccggctcgacgtacgcgcgctgaccgccgtcgcgggcaacgtgccgctcgacctgaccgaacgcaatgcgcggatcatccgcgactgggccgcccgcacgaagacgctgcccgtctacgcaggctgcccgcgtccgctcgtgcgcgacctcgtgacggccgcgaacgtacacggcaagaccggtctcgaaggtgtcgagctgcacgagccgcgcgcgccgcttgccggcggccatgctgtgtcgtatctcgtcgatacgctgagccgcgcagcgccggggagcgtgacgctgtgcgcgctcggcccgttgacgaacatcgcgaccgcgctggtcgaagcgccgcagattcgcggcgcactgcgcgaaatcgtgctgatgggcggcgcgttcttcgaacgcggcaacattacgccggccgccgaattcaacatctacgtcgatccgcaggcggccgaagtcgtattcggcagcggcgtgccgatcgtcgtgctgccgcgcgacgtcgcggtaaaggcgccgatcacgccggcgcgcgtcgcgccgttccgcgcgctcggcaaccgttgcggcacgatcgttgccgacatcatggatgccgagctcgcgtacaacaagaagcggcgcggcgtcgaagacgcaccgatgtacgacccgacggcggtcggctatctcgtcgatccgacgctgttcggtggccgcaaggtgaacgtgatggtcgagacgaccgggcagtggacgctcggcgagaccgtcgtcgactggaacggacgcagcggccgaacggcgaatgcgacgtggatcaacgaggtcgacgcggaccgcttctacgcagcactcgtcgagcgcattgcgaagctgccctga

SEQ ID NO: 144091 - protein, 357 aa, Burkholderia sp. 383
MFSERQTMTHSIASRRTFLKLSAALAGTALLPETGAFAAGGDAARRTVIIDTDPGQDDAIAILFALGAQDRLDVRALTAVAGNVPLDLTERNARIIRDWAARTKTLPVYAGCPRPLVRDLVTAANVHGKTGLEGVELHEPRAPLAGGHAVSYLVDTLSRAAPGSVTLCALGPLTNIATALVEAPQIRGALREIVLMGGAFFERGNITPAAEFNIYVDPQAAEVVFGSGVPIVVLPRDVAVKAPITPARVAPFRALGNRCGTIVADIMDAELAYNKKRRGVEDAPMYDPTAVGYLVDPTLFGGRKVNVMVETTGQWTLGETVVDWNGRSGRTANATWINEVDADRFYAALVERIAKLP

SEQ ID NO: 144092 - DNA, 942 bp, Silicibacter sp. TM1040
  CDS (1)..(942): transl_table=11
atgcccgcccgcaagatcatcattgataccgaccccggacaggacgatgcggttgccatccttctggcccttgcctcgcccgagaacatcgaccttctgggcatcacggccgttgccggaaacgtgccgctggagctgacccagaaaaacgcccgcatcgtctgcgaggtcgccaaacgtcaggatgtcaaagtctttgcaggccgcgcggccccactcgaacgccctctggtgaccgcagagcatgtccacgggggcactggcctcgacggcccggagctgtttgatcccgagatgccgctgcaggatcaaaacggggtcgatttcattatcgagaccctgcgccgcgaaccggctggcacggtcaccctctgcccacttggcccgcttacaaatatcgcggccgcctttcgggctgcgccggatgtggtggagcgtgtgcaggaaatcgtccttatgggcggcgcctattttgaggtgggcaacatcacccccgccgccgagttcaatatctacgtcgaccccgaagctgcgcatgaggtgctctcttccgggatcaagatcacgatgatgccgcttgatgtgacccacaaggcgttgaccactcgcgcccgcgtcgaagcctttcgcgcgctgcaaagccccgtgggcgcgttcaccgccgatatgctcgatttctttgaacgcttcgacgtggagaaatacggctccgaaggcggcccgctgcacgacccttgcgtgattgcctacctcatcgaccctgctctcttcagtggtcgccatatcaacgtcgagatcgagaccgcttccgccctcacccttggcatgactgtggccgattggtggggcgtgaccgatcgaccggccaatgctcttttcatcggcgacatagatgccgatgggttcttttcgctcctcaccaacaggctggcccgcctatga

SEQ ID NO: 144093 - protein, 313 aa, Silicibacter sp. TM1040
MPARKIIIDTDPGQDDAVAILLALASPENIDLLGITAVAGNVPLELTQKNARIVCEVAKRQDVKVFAGRAAPLERPLVTAEHVHGGTGLDGPELFDPEMPLQDQNGVDFIIETLRREPAGTVTLCPLGPLTNIAAAFRAAPDVVERVQEIVLMGGAYFEVGNITPAAEFNIYVDPEAAHEVLSSGIKITMMPLDVTHKALTTRARVEAFRALQSPVGAFTADMLDFFERFDVEKYGSEGGPLHDPCVIAYLIDPALFSGRHINVEIETASALTLGMTVADWWGVTDRPANALFIGDIDADGFFSLLTNRLARL

SEQ ID NO: 144094 - DNA, 936 bp, Rubrobacter xylanophilus DSM 9941
  CDS (1)..(936): transl_table=11
gtgaagagatttctcgtcgataccgacacggccggcgacgatgtgacttctctgctgttcgcgctccggtggccgggcgtctctctcgaagggatcacggtggtggcgggcaacgtctatttgcacgaggccctagagaatgccctttacacggtagagatctccggaagagcgagggtgcccgtgtttccgggggccgacaggcccatgctgcgctccctggtcaccgcgcacgaggtgcatggcgaggacggcatgggaaactcgaactttcccaaagccaaccaacgtcccgagaaagttcatgcggtggacgcgatcgtcgataccgccgatcgatggtcgggggaactggagataatcgcccaagcgcccctgactaaccttgccctggcggtgatgaaggatcccgatttacccaagagggtgaggcgtctctggataatgggcgggagcaacaacagtctgggcaacatcacgccggcggccgaattcaacttctacgtggatccggaagccgcgcgtatcgtgctcggcgccggctttaacaccacggtcgtaccttgggacgtttgccttaaggatggggttcttaccaggccggagcttgcgccgatcctgaagatgaagaccaaacttagcgagttctacctagcggtcaaccgagcggcctgggagttcaatcggacccgcgttgggggagtggacgggattacccacccggactcaatcatgaccgccatggccatcgacgaggaggtgatcctcgaccgggaacgctacttcgtcgacgtcgaatgctgcggctcgctgacccggggttacagcttggtggacgaactgagggtgctcggcaaagaggcaaacgccgaggtcgttctgagggcagacaaggcgaagttcaaggagatgctcgcgcgcctgcttgaggattaa

SEQ ID NO: 144095 - protein, 311 aa, Rubrobacter xylanophilus DSM 9941
MKRFLVDTDTAGDDVTSLLFALRWPGVSLEGITVVAGNVYLHEALENALYTVEISGRARVPVFPGADRPMLRSLVTAHEVHGEDGMGNSNFPKANQRPEKVHAVDAIVDTADRWSGELEIIAQAPLTNLALAVMKDPDLPKRVRRLWIMGGSNNSLGNITPAAEFNFYVDPEAARIVLGAGFNTTVVPWDVCLKDGVLTRPELAPILKMKTKLSEFYLAVNRAAWEFNRTRVGGVDGITHPDSIMTAMAIDEEVILDRERYFVDVECCGSLTRGYSLVDELRVLGKEANAEVVLRADKAKFKEMLARLLED

SEQ ID NO: 144096 - DNA, 924 bp, Trichodesmium erythraeum IMS101
  CDS (1)..(924): transl_table=11
atgtccaaaaaacttgtactaatggatcatgacggtgcagtagatgattttctctccactcttttactcatgactatggaaaatattcaacccttaggagtaattgtaacaccagctgactgttatattgaacccgcaattagtgccactcgaaaaattttagatttaataggacgttctgatattccagtagcagaaagtacagtccgtggagttaatccttttccggttttatttagaagagattcttttgcagttgaccattttcccattttaaatcagaaggaaaatatcaatactattttaatttctgaacctggtcaaaattttatggtaaaagttttaaaatctgcaccagcacccgtaacattaatggtaacaggtcctttaacaactgttgctacagcattagatattgctccagaaattgagtcaaaaattcaagaaattgtctggatgggtggtgcattaaatgtaccaggaaatgtcagtaaagacatggaaccaggtcaagatatgtctgctgaatggaatgcctattgggacccgtttgctattgaaagagtttggcaaactcaaattcctattgtactttgctcattagatattactaataatgttcccctaacttctgaattttctcacaaattaagtaagcaaagaaagtatcctatttctgattttgccggacaatgttatgcattagcaatctctcaagactattatttttgggatgttttagcaacttcttacttagcacatccagaattttatcaacttcaagaatgggaaactgtagttattacaaaaggtctcagtcaaggccggataaaagtagaaaatggtgggcggaaaattatggcaatggaaacggtcgataaagagagattttacacttatattcttcaacaatgggcgcggtag

SEQ ID NO: 144097 - protein, 307 aa, Trichodesmium erythraeum IMS101
MSKKLVLMDHDGAVDDFLSTLLLMTMENIQPLGVIVTPADCYIEPAISATRKILDLIGRSDIPVAESTVRGVNPFPVLFRRDSFAVDHFPILNQKENINTILISEPGQNFMVKVLKSAPAPVTLMVTGPLTTVATALDIAPEIESKIQEIVWMGGALNVPGNVSKDMEPGQDMSAEWNAYWDPFAIERVWQTQIPIVLCSLDITNNVPLTSEFSHKLSKQRKYPISDFAGQCYALAISQDYYFWDVLATSYLAHPEFYQLQEWETVVITKGLSQGRIKVENGGRKIMAMETVDKERFYTYILQQWAR

SEQ ID NO: 144098 - DNA, 957 bp, Shewanella sp. MR-7
  CDS (1)..(957): transl_table=11
atgagtcgccccattattttagattgcgatcccggccacgacgatgccatcgcactcatcctagccctcgcccatccagagctaaacccactggccgtgaccaccagcgccggtaaccaaaccccagataaaaccctcaaaaatgctctgcggattttaaccctgctgaatcgcagcgatattcctgttgcggggggcgcggtaaaacccttaagccgtgagttgatgattgccgacaatgtacacggtgaaacgggactcgatggtccagctctgcctgcaccgagttttcaaccgcaagccgtgaatgcggtcgagttgatggccgagaaaatccgccaaagcgataagccagtaaccttggtgccaacggggccgctcactaatatcgcgctactactcgccagccatggcgaattgcacgccaagattgagcgcattgtgttgatgggcggcgctgcgggtgtgggtaactggacgcccgccgccgagtttaatatttttgtcgaccccgaggcggccgatatcgtctttaaatccggcattcccattaccatgtgcggcctcgatgtaacccatcaggcacaaatcatggatgaagatatcgaacgcattcgcgccattcccaaccctgtggctaagtgtgtcgccgaattgctagatttctttatgatttaccatagagctcccaagtggggatttgtcggtgcgccgctgcacgacccttgcactatcgcttggttactcaaccccgcattgtttgatgcccaggactgctgggtaggcattgaaactcaaagcgagttaacactgggaatgacagtggtcgatcgctatcagcttacgggtaaacccacgaatgccactgtgctatttggtattgatagacagggctttgttgacttgttagttgacagtttagcggtctacacaccaacctatctcaatcgcagatga

SEQ ID NO: 144099 - protein, 318 aa, Shewanella sp. MR-7
MSRPIILDCDPGHDDAIALILALAHPELNPLAVTTSAGNQTPDKTLKNALRILTLLNRSDIPVAGGAVKPLSRELMIADNVHGETGLDGPALPAPSFQPQAVNAVELMAEKIRQSDKPVTLVPTGPLTNIALLLASHGELHAKIERIVLMGGAAGVGNWTPAAEFNIFVDPEAADIVFKSGIPITMCGLDVTHQAQIMDEDIERIRAIPNPVAKCVAELLDFFMIYHRAPKWGFVGAPLHDPCTIAWLLNPALFDAQDCWVGIETQSELTLGMTVVDRYQLTGKPTNATVLFGIDRQGFVDLLVDSLAVYTPTYLNRR

SEQ ID NO: 144100 - DNA, 933 bp, Hyphomonas neptunium ATCC 15444
  CDS (1)..(933): transl_table=11
gtgaccgcccccctgcccctcatcatcgattgcgatcccggcatcgacgacgccgtcatgctgatgatggcgctcggctcgccccgctttgatgtccgcgcaattaccaccgtggcgggcaacgtccccctgcgcctcaccagccgcaatgcccgcatgatgggcgagctgatgggccggcccgacatccccgtctttgccggctgcccacgcccgatgctgcgcccgcccgtcacggccgaggacttccacggcgaaagcggcatctacggcatcgacgtgttcgaaccaaaagccccgctccagccatcccacgccgtcgacgccctcatccgtctgctgaaagccgccccgcataagggcatgaccctcgtcgtcaccggcccgatgaccaatctcgcctgcgccctcgtcatggcgccggagatcgccgctcatatccgcgagatcgtcatcatgggcggcgccgataccgaaggcggcaacatcacccccttcgccgagttcaacatcttcgccgatccccacgcggccgccatcgtgctcgaaaccggcctccccgccaccatcctcagccttgacgccacccaccaggtccgcgcgacgcaggcccgcatcgatcgcctcgcccagatccccggcccccgcgccgcgatgatggcctcgctgctgacggccgccaacaacctcgaaacccgcgcccgccccggcaccaaagtcccgatgcatgatccctccaccatcgcctggctgctcgccccggaaatgttcgagacggtcaacgcccgcgtcacggtcaccacaagacccggcaaggaatttggccgcacgaaagtccgccccatgaagacgggcccccatcgctgggtcacaaaagcgaatgccgatgccttctttgcacggatcgaagacatattgaggatcgcgccatga

SEQ ID NO: 144101 - protein, 310 aa, Hyphomonas neptunium ATCC 15444
MTAPLPLIIDCDPGIDDAVMLMMALGSPRFDVRAITTVAGNVPLRLTSRNARMMGELMGRPDIPVFAGCPRPMLRPPVTAEDFHGESGIYGIDVFEPKAPLQPSHAVDALIRLLKAAPHKGMTLVVTGPMTNLACALVMAPEIAAHIREIVIMGGADTEGGNITPFAEFNIFADPHAAAIVLETGLPATILSLDATHQVRATQARIDRLAQIPGPRAAMMASLLTAANNLETRARPGTKVPMHDPSTIAWLLAPEMFETVNARVTVTTRPGKEFGRTKVRPMKTGPHRWVTKANADAFFARIEDILRIAP

SEQ ID NO: 144102 - DNA, 999 bp, Rhizobium leguminosarum bv. viciae 3841
  CDS (1)..(999): transl_table=11
atggcacaaaaaatcatcatcgatacggatccggggcaagacgatgcgctggccatactcctggctctggcgagcccggaaatcgaagttctcggcatcgttggcgctgccggcaatgtgccgctattgctgacgtccaaaaatatccgcaagatctgcgaactcgccggccgtccagacatcaaggtgtttgccggctgcgatcggccgatgaccggaccgctagtgaccgccgagcacgtgcatggcgcgaccggcatggatggcgcggatcttcctgaaccgagcatgccgatgcaggaacagcacggcgtcgatttcatcatcgacaccctgcagagcgaaccggccggcgcagtcaccgtctgcacgcttgggccacttaccaatctcggcaaggcgctgacccgggcgccggagatcgccggccggatcaaacagctcgtgctgatgggcggcggactgttcgagggcggcaacattacgcccgccgccgaattcaatatctacgtcgatccgccggctgcagctgtcgtcttcggatcgggcgtgccgatcgtgatgatgccgctcgacgtcacgcacaagacgctgacgacacgggtacgtgtcgctgcaatccaggcgcttggaactccgctcagcgatgccgtggtcggatggcttcattatttcgaacgcttcgacgtcgctaaatatggaagcgatggtgggccgctgcacgatcccaacgtgattgcctatctcctgaagccggaactttattccggtcgtttctgcaatgtggagatcgagacggagtccgagctcaccaagggcatgaccgtcgccgactggtgggatgtctcggggcggccgaaaaatgcgctgttcatgcgcgacgtcgacgccgacggcttttatgcgctgctgacggaacggctctcctggctcggtcgcgcggatacggcagccgaagctgcgccgggtctgctcgtcacgtcttcgcgcgcgcgatga

SEQ ID NO: 144103 - protein, 332 aa, Rhizobium leguminosarum bv. viciae 3841
MAQKIIIDTDPGQDDALAILLALASPEIEVLGIVGAAGNVPLLLTSKNIRKICELAGRPDIKVFAGCDRPMTGPLVTAEHVHGATGMDGADLPEPSMPMQEQHGVDFIIDTLQSEPAGAVTVCTLGPLTNLGKALTRAPEIAGRIKQLVLMGGGLFEGGNITPAAEFNIYVDPPAAAVVFGSGVPIVMMPLDVTHKTLTTRVRVAAIQALGTPLSDAVVGWLHYFERFDVAKYGSDGGPLHDPNVIAYLLKPELYSGRFCNVEIETESELTKGMTVADWWDVSGRPKNALFMRDVDADGFYALLTERLSWLGRADTAAEAAPGLLVTSSRAR

SEQ ID NO: 144104 - DNA, 945 bp, Rhizobium leguminosarum bv. viciae 3841
  CDS (1)..(945): transl_table=11
atggcaagcgcaagaaagatcatcatcgacactgatcccggccaggacgacgcagccgccatcatgcttgccttcggcagccccgatgagctggaggtgctggggatcacgacggtcgccggcaatgtgccgctttcgctcaccagccgcaatgcgcgcatcgtctgcgagctctgcagccggacggagacgaaggttttcgccggcgccgacgcgccgatcgcccgcaagctggtgaccgccgaacatgtgcatggcaagaccggccttgacggtcccgaactcagcgaaccgacaatggcgctgcagcccggccatgccgtcgacttcatcatcgagacgctgcgccgcgagccggaaggcacggtgacgctgtgtacgctcgggccgctcaccaatatcggcttggccttccagaaagcgcccgacatcgtcccccgcatccgcgaactggtgatgatgggcggcggctttttcgagggcggcaacatcacgccggcggccgaattcaacatctatgtcgacccagaggcggccgatatcgtcttccgctcaggcgttcgggtcgtgatgatgccactagacgtgacgcatcaactgctgacccgcaaggaccgggtgaaacgcatggccgagatcggcacggcgccggcaaaggccatggtcgagatgctggaattcttcgaacgtttcgacatcgagaaatacggttccgacggcgggccgctgcacgacccgaccgtcgtcgcctatctgctgaagccggagcttttcaagggccgggactgcaatgtcgagatcgaggtccagtccgaacttaccgtcggcatgacggtcgtcgactggtggcatgtgaccgagcgcaagcgcaatgccaaagtcatgcgccatgtcgatgcggacggcttcttcgatctgctgatcgaacgcttcgcccgcatctaa

SEQ ID NO: 144105 - protein, 314 aa, Rhizobium leguminosarum bv. viciae 3841
MASARKIIIDTDPGQDDAAAIMLAFGSPDELEVLGITTVAGNVPLSLTSRNARIVCELCSRTETKVFAGADAPIARKLVTAEHVHGKTGLDGPELSEPTMALQPGHAVDFIIETLRREPEGTVTLCTLGPLTNIGLAFQKAPDIVPRIRELVMMGGGFFEGGNITPAAEFNIYVDPEAADIVFRSGVRVVMMPLDVTHQLLTRKDRVKRMAEIGTAPAKAMVEMLEFFERFDIEKYGSDGGPLHDPTVVAYLLKPELFKGRDCNVEIEVQSELTVGMTVVDWWHVTERKRNAKVMRHVDADGFFDLLIERFARI

SEQ ID NO: 144106 - DNA, 954 bp, Rhizobium leguminosarum bv. viciae 3841
  CDS (1)..(954): transl_table=11
atgcacaaggtcatttatgacaccgaccctggcgtcgacgacgccatggcgcttctcttcctgcatcgccatcccgaaatcgaccttctcggcatcaccacggtcttcggcaacgcctcggtcgagacgacgacgcgcaatgcgctcttcctcaagcgcgaatggaatattccggcacccgtttccaagggcgccagtgtcaccatcgattccgcgcgggcggagcggccatggccggccatggtgcatggtgataacggcctcggcgatatcgacgtaccggagacgatcgacctgccgctcgatccgcgcccggcgcatcgcttcatcatcgacacggtgcgcgcccatccgggcgaagtgcgactcgttgccgttggccgaatgaccaatctggcgctggcgctgaaggaagaccccgagattgcgacgctggccaaggacgtcgtcatcatgggcggcaatttctatgtgccgggcaatgtctcgccggtcgccgaggccaatattcatggcgatcccgaggccgctgacatcgtcatgaccgcgccgtggaaggtggccgtcatcggcctcgacgtcaccgcgatcaccacgatgagccgcagctatctcggcgaaatggcagctaggggtgacaaggcggtcaagcagctcgatgcactctcgcagtcctacatcgatttctacaagcatgcggtcgaagacggcatgatggtgcatgacagctgcgcctgcgtctatgccgtggcgccggagctgttctcgtcgatatcgggtgcggtgcgtgtcgtctgcggcggcatcgccgatggccagacgatcgtcaggcgagatgggcggcattttccgcctgatggcgcctgggatggcttgccgagccaggtcgtctgcaccggcatcgagtcggagagggtcctcgacctcattcgcaatacactgcttgcagcctga

SEQ ID NO: 144107 - protein, 317 aa, Rhizobium leguminosarum bv. viciae 3841
MHKVIYDTDPGVDDAMALLFLHRHPEIDLLGITTVFGNASVETTTRNALFLKREWNIPAPVSKGASVTIDSARAERPWPAMVHGDNGLGDIDVPETIDLPLDPRPAHRFIIDTVRAHPGEVRLVAVGRMTNLALALKEDPEIATLAKDVVIMGGNFYVPGNVSPVAEANIHGDPEAADIVMTAPWKVAVIGLDVTAITTMSRSYLGEMAARGDKAVKQLDALSQSYIDFYKHAVEDGMMVHDSCACVYAVAPELFSSISGAVRVVCGGIADGQTIVRRDGRHFPPDGAWDGLPSQVVCTGIESERVLDLIRNTLLAA

SEQ ID NO: 144108 - DNA, 990 bp, Pseudomonas aeruginosa UCBPP-PA14
  CDS (1)..(990): transl_table=11
atgcccgccagccttcctctgtccgctgccgaaacggcggcggcgcaatcgccgcggaccctgatcatcgacaccgacccgggcgccgacgacgtgatcgccctgctgttcgccatggcctcgccgaaggagctgaagatccaggcgctgaccaccgtcgccggcaacgtgccgctggaaaagaccgcgcgcaacgcccggctggcccgcgagtggggcaagcgcccggatatcccggtctacgccggcgccccgcggccgctgctgcgcacgccgatctacgccgccgacgtacacggcagcgaaggcatcaccggcgtcgaggtgcatgagccgaagcagccgctggccgaaggcaacgcggtggactacctgatccgtaccctgcgcgcggcgccggagaagagcgtgaccctggccatgctcggcccggagaccaacctcgcgctggccctgacccaggccccggacatcgtcaagggcatccgcgagatcgtgatcatgggcggcgcccacttcaacggtggcaacatcaccccggccgccgaattcaatatcttcgccgacccccacgcggcggaaatcgtgctcaagagcggggcgccgatcaccatgctgccgctcgacgtgacccacaagatcctcaccagccccgagcgcatcgccaagctgcgcaacctcggcaaccgagccggcaagaccgtcgccgacatcctcgacgcctacgtccagtacgacatcaagtactacggcctgaagggcggcccggtgcacgacgccacggtggtcgcctacctgctcaagccctcgctgttcaagggcaagcggatcaacgtgcaggtcgacagccgcgagggcatcaccttcggccagaccgtggccgactggtacggcggcctcaagcagccggccaacgtcgagtggatcaacgagggcgatgcccaggggttcttcgacctgctcaccgagcgtatcgcccgcctgccctga

SEQ ID NO: 144109 - protein, 329 aa, Pseudomonas aeruginosa UCBPP-PA14
MPASLPLSAAETAAAQSPRTLIIDTDPGADDVIALLFAMASPKELKIQALTTVAGNVPLEKTARNARLAREWGKRPDIPVYAGAPRPLLRTPIYAADVHGSEGITGVEVHEPKQPLAEGNAVDYLIRTLRAAPEKSVTLAMLGPETNLALALTQAPDIVKGIREIVIMGGAHFNGGNITPAAEFNIFADPHAAEIVLKSGAPITMLPLDVTHKILTSPERIAKLRNLGNRAGKTVADILDAYVQYDIKYYGLKGGPVHDATVVAYLLKPSLFKGKRINVQVDSREGITFGQTVADWYGGLKQPANVEWINEGDAQGFFDLLTERIARLP

SEQ ID NO: 144110 - DNA, 936 bp, Pediococcus pentosaceus ATCC 25745
  CDS (1)..(936): transl_table=11
atgttgatgaataatttaaaagcacaacctgttattatcagtactgatcctggtatcgatgatgcagttgcaatatctttggcactttttagtaacgatatagatgtcaaacttatatgtcctattgcgggtaatgtaagtttagaaaaaacaactcataatacacaaaagcttctaactttttttaacaaagaaatacctattgttccaggaagcccgtcacctctccttcgacaaaaacaaaatgctagtaacgttcatggtgaatctggcatggatggctttgattttcctatccctaaaatcacacctgatgtatcaaggaccgcggtacaagcaatgcatgaaactgtatcaaacagtactgttcctgtaactttaatgggacttggacctttaactgatattgcactttatcttcatctctatccacaggatagtaagaatatccacgaaattgtattaatgggaggagctttaggtagaggtaacttgggagtcttatctgagtttaactttggagttgaccctgaagcagcaaaaatagtatttaacagtaatatttcaatacgtattgtacccatggaaatagggagacaagctaaaataatgcccgccacttcagaaaaaataaaaaatcttggaaaaaccggtaaaatgttttattcacttttttctcattatcgtggaggtagttttgataagggattaaatatgtatgacgtcctcgctttagggttgattttaaaaccagaaatatttgagatgaaatcaacctatgttgctatagaaacccaaggagcatttacagcaggtgcttcattaattgatcttaagggataccttggggaaaattccaatgcagaggtggcaattaacgttgatactaaacaatttgaagactggttcactaaaatgatatcaaaaacaatatag

SEQ ID NO: 144111 - protein, 311 aa, Pediococcus pentosaceus ATCC 25745
MLMNNLKAQPVIISTDPGIDDAVAISLALFSNDIDVKLICPIAGNVSLEKTTHNTQKLLTFFNKEIPIVPGSPSPLLRQKQNASNVHGESGMDGFDFPIPKITPDVSRTAVQAMHETVSNSTVPVTLMGLGPLTDIALYLHLYPQDSKNIHEIVLMGGALGRGNLGVLSEFNFGVDPEAAKIVFNSNISIRIVPMEIGRQAKIMPATSEKIKNLGKTGKMFYSLFSHYRGGSFDKGLNMYDVLALGLILKPEIFEMKSTYVAIETQGAFTAGASLIDLKGYLGENSNAEVAINVDTKQFEDWFTKMISKTI

SEQ ID NO: 144112 - DNA, 915 bp, Pediococcus pentosaceus ATCC 25745
  CDS (1)..(915): transl_table=11
atgacaacaaaaattattatggatacagatccaggaattgatgatgcagctgcgatttccgtggccatcaataatcctgaaatcgaattagaattaattacgacggtggctgggaatgttacggttgataaaactactaagaacgcgatgaagttagtaaaattcttcaacgctgatattccggttgctggtggggcagaacaacctttgattaaaccatttgaagatgctgctcgagttcacggcgaatccgggatgcctggttacgattttggtgcagaacccactaacattccagttaacaatgcagtggatgttttatatcacactattatggctaacgatgaaccgatcgttttggtacccacgggatcgtatactaacattgcagtactacttactgaacatcccgatgtaaaaaccaagatcgaaaaaattgtggccatgggtggcgcaattggcatgggaaatatgacaagcgctgcagaattcaacgtctttactgatccccacgctgctgaaattttatataagagtggcattccagtagtaatggttggcctagatgtaacgatgaaagctcttctaacacaatctacgttagacacagtaaaatccttaggtaaagctggagaaatgctgggagccatttttaaccactattacgagggaaatgaaggtggtatcccaatgcatgatgttaatacgttggcatacttactaaaacccgaaatgtataagaccatcccatattggattgacgtagttactgaaggaccggcgaatggtgaaaccgttgcagatatccgaggtgcttatcacgatggaaagaccaacgctgaagtgtgtgttgatattgatgccgacgccttcaatgcctggtttattgaagaagttaaaaagatgaatgcttaa

SEQ ID NO: 144113 - protein, 304 aa, Pediococcus pentosaceus ATCC 25745
MTTKIIMDTDPGIDDAAAISVAINNPEIELELITTVAGNVTVDKTTKNAMKLVKFFNADIPVAGGAEQPLIKPFEDAARVHGESGMPGYDFGAEPTNIPVNNAVDVLYHTIMANDEPIVLVPTGSYTNIAVLLTEHPDVKTKIEKIVAMGGAIGMGNMTSAAEFNVFTDPHAAEILYKSGIPVVMVGLDVTMKALLTQSTLDTVKSLGKAGEMLGAIFNHYYEGNEGGIPMHDVNTLAYLLKPEMYKTIPYWIDVVTEGPANGETVADIRGAYHDGKTNAEVCVDIDADAFNAWFIEEVKKMNA

SEQ ID NO: 144114 - DNA, 948 bp, Leuconostoc mesenteroides subsp. mesenteroides ATCC 8293
  CDS (1)..(948): transl_table=11
atgacgattccacttatttttgatactgatcccggcattgatgatgcagcagcaatcgcaattttgttaactaatgatgactttgaagtacgtctgattacgtctgtttccggtaatgtttcggttgataagacaacaaacaatgttttgaaattaacacactattttaatcgaccagacgttaaggtggcccgtggtgctgagaaaccactagtcaaaccatttaaggatgcatcaaatattcatgggaagagcggaatgccaggttatgaatttggcgagctttctaccagaactataagtaaaaaagctgtagatgctattcatgaaacgctgaatagctatgatgatcaaacgacattagtagccgttggtgcattcactaatattgcaaacttaattcaaaagtatccacaagatttacaaaaaatagagcgattaatcgtaatgggtggttcgcttaccggtgggaatttaacatcggtggcagagtttaacgtatttacagatccggacgcagcgaaaattgtttttgaaagtgatttggatatcacaatgattgggcttgatgttactgaaaaagcgttgttaaccaaaaaatctatgtctgaattacttcagatgaatgagaccggaaaaatgctgatgggactgtttggacactatcaagatggttctaatgctggtggtaaaccaatgcacgatgtcaatacactttattacttactgcaccctgaaaaatacaaattagaagatttatgggttgatgtcgtgacagatggacctgcgattggtgccacggtagctgacattcttcatagtacgcatagccaaacgaatgttcatgttgctaaggatatcgatgtacctgcattcaatgcttggtatttactacaaatttctggtatttctgatggaaatattaatgctggaaggcttgaaaattaa

SEQ ID NO: 144115 - protein, 315 aa, Leuconostoc mesenteroides subsp. mesenteroides ATCC 8293
MTIPLIFDTDPGIDDAAAIAILLTNDDFEVRLITSVSGNVSVDKTTNNVLKLTHYFNRPDVKVARGAEKPLVKPFKDASNIHGKSGMPGYEFGELSTRTISKKAVDAIHETLNSYDDQTTLVAVGAFTNIANLIQKYPQDLQKIERLIVMGGSLTGGNLTSVAEFNVFTDPDAAKIVFESDLDITMIGLDVTEKALLTKKSMSELLQMNETGKMLMGLFGHYQDGSNAGGKPMHDVNTLYYLLHPEKYKLEDLWVDVVTDGPAIGATVADILHSTHSQTNVHVAKDIDVPAFNAWYLLQISGISDGNINAGRLEN

SEQ ID NO: 144116 - DNA, 933 bp, Leuconostoc mesenteroides subsp. mesenteroides ATCC 8293
  CDS (1)..(933): transl_table=11
atgatacctataattttagacatggatccagggattgatgatgcagttgctctatcgattgccctcagcaatcctagcattgatatcaagctactaacaagtgttgctggaaatgttagtgttgacaaaacaaccaataatttattaaagttgacaacattttttcatcaaacgcagattccggttgcaaaaggtgccgctgcaccattgaaaaaagatttctctgatgctgcttatattcatggcgaatcgggtatgcctggatatgattttcctcaagtgacaaaagaagcaattaaattagatgcaattactgcaatggccgaagaactggaggcatcgatcgtgccaatgactattgttgctactgggtcgtatacgaatattgcaatgttgatccaaaaatatccaagtctacttcacaagattgaaaaatttgttttgatgggtggctctttgtcaggagggaatgtgtcttcagttgcagaatttaacgtgtttactgatccagatgcagccgacattgttttcaaaagtggtgtgccaattgttatggttggccttgatgtaacgctcaaggcgctattaccttttgaaacaatagatgctattggtagtcaaggggaagcaggtgaaatgttacagaaagttatgacagcttatggtgatactgcagaaggtggtaagcctatgcatgatgtcaatacaatttgttatctattaaatcctgaattttatacagtaaaagattactgggttgatattattgtttctggaccggctgcgggcgccacgattgccgacacgcaaaatcgatggtcagaaggtcgattgaatgcacaggtggcggttgatattgacacaacagcgtttgaaaagtggtttgttgaacaagtaccgaaaatgaatcaatatcgtaaagaggaaaattaa

SEQ ID NO: 144117 - protein, 310 aa, Leuconostoc mesenteroides subsp. mesenteroides ATCC 8293
MIPIILDMDPGIDDAVALSIALSNPSIDIKLLTSVAGNVSVDKTTNNLLKLTTFFHQTQIPVAKGAAAPLKKDFSDAAYIHGESGMPGYDFPQVTKEAIKLDAITAMAEELEASIVPMTIVATGSYTNIAMLIQKYPSLLHKIEKFVLMGGSLSGGNVSSVAEFNVFTDPDAADIVFKSGVPIVMVGLDVTLKALLPFETIDAIGSQGEAGEMLQKVMTAYGDTAEGGKPMHDVNTICYLLNPEFYTVKDYWVDIIVSGPAAGATIADTQNRWSEGRLNAQVAVDIDTTAFEKWFVEQVPKMNQYRKEEN

SEQ ID NO: 144118 - DNA, 960 bp, Leuconostoc mesenteroides subsp. mesenteroides ATCC 8293
  CDS (1)..(960): transl_table=11
atggcatcaacaaaaatgattttggacttggatactggtgttgatgatgcgctagctttggctttagctgtgtgtgatccacgagtggatttaattggtgtgattgcttcttacggtaacacactaatgaaaactgcagcacaaaatacattagatttattacatttgttacatgctgacgaagtacctgtatacttaggcgaatcacaggcttccacagttaatgattttgaggtaatgcctatatcgaaagctattcatggtgacaatggtgtaggaaatattttattagaaaaatcgccgcgatcaattgaaaaagaaagtggcattcagttcttaataaatatggctcatcaataccaagatgaattagtatatgtacccactggaccattgacgaatttagccaaagcattacaaattgatccaaagattgcacagttgattgggaatactacattaatgggtggtgctttaacggttcctggcaatgttacaccatttacagaggcaaatattaaccaggacccgcaggccgcagatcaagtatttactgctcaagaacacttgacaatggtaggtttagacgtgacccttcgtacgctactgacaaaggcacacacaaaaaagtggcgtgacttaggaactaaagctggtcaaacatatgctgatttgatggactattatattgatgcatatgataatttaggtattgatcacaggggagcggccttacatgatcctttagccgttgcggtagcgatagatccaagttatgttatgacaatttcattaaatatgcgcgtgactcatgatcaaaaaacgaaagattatggccgaacgattggcgatcgggagcggctacttgaaccgacaacgacaaaagtggccgttggtgtaaagtctgagcgcttcgtacatgacttcatggattttatgattgcagttttaaaaaattaa

SEQ ID NO: 144119 - protein, 319 aa, Leuconostoc mesenteroides subsp. mesenteroides ATCC 8293
MASTKMILDLDTGVDDALALALAVCDPRVDLIGVIASYGNTLMKTAAQNTLDLLHLLHADEVPVYLGESQASTVNDFEVMPISKAIHGDNGVGNILLEKSPRSIEKESGIQFLINMAHQYQDELVYVPTGPLTNLAKALQIDPKIAQLIGNTTLMGGALTVPGNVTPFTEANINQDPQAADQVFTAQEHLTMVGLDVTLRTLLTKAHTKKWRDLGTKAGQTYADLMDYYIDAYDNLGIDHRGAALHDPLAVAVAIDPSYVMTISLNMRVTHDQKTKDYGRTIGDRERLLEPTTTKVAVGVKSERFVHDFMDFMIAVLKN

SEQ ID NO: 144120 - DNA, 939 bp, Solibacter usitatus Ellin6076
  CDS (1)..(939): transl_table=11
ttgatcgacacagatacagcgtctgacgatgcggtcgcgctgatcatggcgctgcgcaatccgagtgttttcgtacgtgccatcacgaccgtcgcaggaaatgtaccggttgcgcaggcaacgcgcaacgcgctctacgtcgcgcaactttgcggctccgacgtgcccgtgtaccagggtgccgcacggccgctgtggcgggagcacgcgcatgccgagtggtttcatggcaaggacggcctgggcgatcatggctacccggctccggcgcgagcggcggagcccggcaatgcggcggacgcgatcatcgccgcgatcgaacagcatcccggcatcgtggtggtgacgctcgggccgcttacaaacatggccgtggcactcgccaaggctccggacatcgcggcaaaggtcggccgctgcgtggtgatgggaggtaatccctgctgtgagggcaatgtaacaccggcggcggagtacaacatgtgggttgaccccgaggcggcgcgaatcgtcctgcgctctggcctgccggtggaactggcgggctggcatctctgccgcggcgaagcggtgctcggcgcggcggatatcgagcacgtgctttcgctcaacacgccgctcgccaggttcgccgtggaatgcaactcgcgcgcgatggatgcctaccgcattcagaccggcgagttgggaatctcgctgccggacccggtggcgatgtcgatcgcgctcgaccccgtggtgtgcacgcaactaagttcgcactatgtggatgtcgaagtgagcagtgagttgacgcgcgggatgactgtggtggaccggctcaacgtgtcgggcgacgaacgcaattcgccggtatggcgcggcacgctacaggcgcaggtagtgtggaccatcgacaatgagcgctggaagcaagcgttgtacgcggcgctcggttag

SEQ ID NO: 144121 - protein, 312 aa, Solibacter usitatus Ellin6076
MIDTDTASDDAVALIMALRNPSVFVRAITTVAGNVPVAQATRNALYVAQLCGSDVPVYQGAARPLWREHAHAEWFHGKDGLGDHGYPAPARAAEPGNAADAIIAAIEQHPGIVVVTLGPLTNMAVALAKAPDIAAKVGRCVVMGGNPCCEGNVTPAAEYNMWVDPEAARIVLRSGLPVELAGWHLCRGEAVLGAADIEHVLSLNTPLARFAVECNSRAMDAYRIQTGELGISLPDPVAMSIALDPVVCTQLSSHYVDVEVSSELTRGMTVVDRLNVSGDERNSPVWRGTLQAQVVWTIDNERWKQALYAALG

SEQ ID NO: 144122 - DNA, 957 bp, Shewanella sp. ANA-3
  CDS (1)..(957): transl_table=11
atgagtcgtccgattattttggattgcgatcccggccatgacgatgctatcgcgctcattttagccctcgcccatccagagctaaccccactggccgtaaccaccagcgccggcaaccaaaccccagataaaaccctcaataacgccctgcggatcttaaccctgctcaatcgcagcgatattccggtcgcgggcggcgcggttaaacccttaagccgtgagttgatgattgccgataacgttcacggtgaaacagggctcgatggcccggcattgcctgcaccgagttttcaaccacaggccgtgaatgcggtcgagctaatggccgagaaaatccgccaaagcgataaaccagtaacattagtgcctactgggccgctcaccaatatcgcgctgctactcgccagccatgccgagttacacgccaaaattgagcgcattgtgttgatgggtggtgccgccggggttggtaactggacacccgccgccgagtttaatatttttgtcgacccagaggcggccgacattgtctttaaatccggtattcccatcaccatgtgcggcctcgatgttacccatcaggcacagatcatggatgaagatatcgaacgtattcgcgctattgctaatcccgtggctaagtgtgtcgccgagttgttggatttctttatgatttaccatagagatcctaaatggggctttgtcggcgcgccgctgcatgacccttgcactatcgcttggttactcaatcccgcgctgtttgatgcccaagactgctgggtcggcattgaaacccaaagcgagttaacactggggatgacggtggtcgaccgctatcaactaacgggcaaacccgcgaatgcgacagtgctcttcggcattgatagacagggctttgttgacttgttagttgacagtttagcggtctacacaccaacctatctcaatcgcagatga

SEQ ID NO: 144123 - protein, 318 aa, Shewanella sp. ANA-3
MSRPIILDCDPGHDDAIALILALAHPELTPLAVTTSAGNQTPDKTLNNALRILTLLNRSDIPVAGGAVKPLSRELMIADNVHGETGLDGPALPAPSFQPQAVNAVELMAEKIRQSDKPVTLVPTGPLTNIALLLASHAELHAKIERIVLMGGAAGVGNWTPAAEFNIFVDPEAADIVFKSGIPITMCGLDVTHQAQIMDEDIERIRAIANPVAKCVAELLDFFMIYHRDPKWGFVGAPLHDPCTIAWLLNPALFDAQDCWVGIETQSELTLGMTVVDRYQLTGKPANATVLFGIDRQGFVDLLVDSLAVYTPTYLNRR

SEQ ID NO: 144124 - DNA, 1053 bp, Mycobacterium smegmatis str. MC2 155
  CDS (1)..(1053): transl_table=11
atgcccgtgttcgccgatgtcgacaccggtgtcgacgatgcgatggccctcgcctacctgctggccagctccgacgccgatctcgtcggcatcgcgtcgaccgcgggaaacattggggtgcatcaggtctgcatcaacaacctggggctgctcgagctgtgtggagcccccgacatcccggtgtcgcgcggcgccgagcaaccgctggcggccccgctgcgcaccgccgaggacacccacggccccgagggtctcggctacgcccggcttccggccaccgaccgcacactcaccacgcacgacgcggccgaggcctggatccgtgccgcacacgcacatcccggtgagctgatcggcctggccaccggcccgctgaccaacctggcgctggcgatgcgcgccgagcccgcactgcccaggctgatgcgccgactggtcatcatgggcggcgccttcgactacaagggcaacaccacaccggtcgccgagtggaacatcagcgtcgaccccgagtcggccgccgaggtgttcggcgggtgggacgccgcctggggcggccgtggcgacgatgccgccccggcacacgtcccgatcgtgctcggtctcaacctcaccgagaacgtcgcgatgaccccggcgctgctgaaccggttggcgacagcggccgggtccccgtcgacggcgatgagcgtgcgcgatgagcgcggcacccggtcgacggcggccaacccgctgatccgcgtgctcgaagatgcgatgcgcttctacttcgagttccacttcgacaccggcgacggctatctcgcgcacctgcacgatccactggcggccgcggtcgcattggaccccgagttggtgcggtgccgccagaccaccgtcgacgtcgaactcaccggcaccctgacccgcgggatgacggtggccgactggcgcgggcactggggacggcgacccaatgcgctgatcggcatggaggtggacccgacggtgttcttcgaccggttcatctcacgcgtcggcgctttcgcgcagcgtctcacgtctcactcatag

SEQ ID NO: 144125 - protein, 350 aa, Mycobacterium smegmatis str. MC2 155
MPVFADVDTGVDDAMALAYLLASSDADLVGIASTAGNIGVHQVCINNLGLLELCGAPDIPVSRGAEQPLAAPLRTAEDTHGPEGLGYARLPATDRTLTTHDAAEAWIRAAHAHPGELIGLATGPLTNLALAMRAEPALPRLMRRLVIMGGAFDYKGNTTPVAEWNISVDPESAAEVFGGWDAAWGGRGDDAAPAHVPIVLGLNLTENVAMTPALLNRLATAAGSPSTAMSVRDERGTRSTAANPLIRVLEDAMRFYFEFHFDTGDGYLAHLHDPLAAAVALDPELVRCRQTTVDVELTGTLTRGMTVADWRGHWGRRPNALIGMEVDPTVFFDRFISRVGAFAQRLTSHS

SEQ ID NO: 144126 - DNA, 990 bp, Nocardioides sp. JS614
  CDS (1)..(990): transl_table=11
gtgcccgtcccgttcatcctcgacaccgacaccgcgcaagacgactgcgtggccatcatcgccgggatcctcgaccccgaggccgacctgcgggcgctcacgatggtcgccggcaacgtcagcttcgaccagcaggtccgcaacgcccagctcaccttgaacgcgctcggccggctcggcgaggtgcccattcacctcggctgccggcagccgatggtcctgccgtgggtatcggccgagaacgtgcacagcgacggctccggcgggctggacatggacttcgcgggcaccacgacggaggacgagcacgcggtcgacgcgttgatccggatgaccgccgaggcgcccggcgagatctcggtggtggcgatcggtccgctcacgaacatcgcgatggccgcggtcaaggaccccgcgttcgtccgcaacgtccggcacctggtgatcatgggcggctccaacaacggccgcggcaacatcaccccggcggccgagttcaacctctacgtcgacccccacgccgccaaggtggtcttcgaggccggcttcgacatcaccgtcgtgccgtgggcaccgctgacactcaacgacgccgtgttcagccgcgagcagctcgcgggcatcgagtcgctcggtacgacactgtcccagttcttcctgcaggtgtgcgggcccacgctggccttcgacgaaagcgtgggcatcccgggcacgacccaccccgactcgctctcggtggccgtgctgctgcatcccgacctggtcctcgatgccgcggagtaccacgtcgcggtcgaggccgactcggagctgacccgcgggtactcgtcgatgtcgtggggcgtgcacggcctggctcccaacgcccgggtgatcgagcacatcgacgccgtggcgttccatcgctacctgactggactcctggccactcccaccgagcccaccgttccactccggttcggcgccccgttcacggctcgccagggctga

SEQ ID NO: 144127 - protein, 329 aa, Nocardioides sp. JS614
MPVPFILDTDTAQDDCVAIIAGILDPEADLRALTMVAGNVSFDQQVRNAQLTLNALGRLGEVPIHLGCRQPMVLPWVSAENVHSDGSGGLDMDFAGTTTEDEHAVDALIRMTAEAPGEISVVAIGPLTNIAMAAVKDPAFVRNVRHLVIMGGSNNGRGNITPAAEFNLYVDPHAAKVVFEAGFDITVVPWAPLTLNDAVFSREQLAGIESLGTTLSQFFLQVCGPTLAFDESVGIPGTTHPDSLSVAVLLHPDLVLDAAEYHVAVEADSELTRGYSSMSWGVHGLAPNARVIEHIDAVAFHRYLTGLLATPTEPTVPLRFGAPFTARQG

SEQ ID NO: 144128 - DNA, 942 bp, Sulfitobacter sp. EE-36
  CDS (1)..(942): transl_table=11
atgacaccgcgcaagatcattatcgacacggaccccggtcaggatgacgccgtagcgatccttgtcgctttggccagccccgaagagcttgatgttctggggatcacgtgcgtcgcgggcaatgtgccgttggacctcacctcgcgcaacgcccggatcgtgtgcgaattggcaggcaaacgggatgtcaaagtctttgccggatgtgaccgcccgctgggccgcgaactggtcacggcagagcatgtgcacggcaagaccgggctggacggccccgatttgcccgaacctaccatgccgatggccgaaggccatgcggtggatttcatcatcgacacgctgcgcgataacgcaccgggaaccgtcacgctatgcccgctgggaccgctgaccaatatcgccaccgcgttgcaaaaagcacccgatatcgccgatcgcatcgccaagatcgtgctgatgggcggtggctatttcgaagggggtaacatcaccccaacggcggagtttaacatctacgtcgacccgcaagcggctgatattgtgtttaaatccggagctcctatcgttgttatgccgctggacgttacccataaggcgctggtgaccaaagcgcgcaacgatgctttccgcgcccttggcacgcctgtgggcatcgccgtggctgaaatgaccgatttcttcgaacggttcgacaaagagaaatacggctctgacggcgcgccgctgcatgacccttgcgtcacggcctatctgatcaaccccgatctgttcaaaggccgccacatcaacgtcgagatcgagacagagtcagagctgaccatgggtatgaccgtcgccgattggtggggcgtgaccgaccgcgcccccaatgcgacctttatgggcgatctggattctgatggcttctttgccctgctgaccgaacggctggcccgtctatga

SEQ ID NO: 144129 - protein, 313 aa, Sulfitobacter sp. EE-36
MTPRKIIIDTDPGQDDAVAILVALASPEELDVLGITCVAGNVPLDLTSRNARIVCELAGKRDVKVFAGCDRPLGRELVTAEHVHGKTGLDGPDLPEPTMPMAEGHAVDFIIDTLRDNAPGTVTLCPLGPLTNIATALQKAPDIADRIAKIVLMGGGYFEGGNITPTAEFNIYVDPQAADIVFKSGAPIVVMPLDVTHKALVTKARNDAFRALGTPVGIAVAEMTDFFERFDKEKYGSDGAPLHDPCVTAYLINPDLFKGRHINVEIETESELTMGMTVADWWGVTDRAPNATFMGDLDSDGFFALLTERLARL

SEQ ID NO: 144130 - DNA, 942 bp, Roseovarius nubinhibens ISM
  CDS (1)..(942): transl_table=11
atgagcagagaaaagatcatcatcgacaccgaccccggccaggatgacgccgtggcgatcctgctggctctggccagcccggaggagattgatctgctggcgatcacctgtgtcgcgggcaatgtgccgctggcgctcaccgcgcgcaacgcgaggatggtctgcgaattggcgggccgccgcgacatcccggtcttcgcaggctgcgaccggcctctgggccgcgctctcgtcaccgccgaacatgtccatggcaagaccgggctcgacgggcccgacctgcccgaacccaccatgccgctgcaggacgcccacgccgtcgatcacatcatcgcctgcctgcgcgagcacgattccggcaccgtcacgctctgcccgctcgggccgctcaccaatatcgcgaccgccctgcaaaaagcccccgacatcgcgccccgcatccgccggatcgtgctcatgggtggcgcctatttcgccgtgggcaatgtcacccccgccgctgaattcaacattcatgtcgacccgcaagccgctggcatcgtgctgaaatccggcgttgatatcaccatggcgccgctcgatctcacccataaggcgctggtcaccgaaagccgcaacgccgccttccgagcgcttggcaccccggtgggcatcgccgtggcccagatgaccgagttctttgaacgctacgaccgcgagaaatacggctcgcccggcgcgccgctgcatgatccttgcgtcatcgcctatcttctgcgccccgatctcttttccggccgccacgtcaatgtcgcgatcgagaccacgtccgaactcaccatgggcatgagcgtcgccgactggtggggcgtgacctcccgcgcccccaatgccctgttcctcggcgatatcgacgccgatggcttcttctcgctcctgaccgaaaggctcgcccgcctatga

SEQ ID NO: 144131 - protein, 313 aa, Roseovarius nubinhibens ISM
MSREKIIIDTDPGQDDAVAILLALASPEEIDLLAITCVAGNVPLALTARNARMVCELAGRRDIPVFAGCDRPLGRALVTAEHVHGKTGLDGPDLPEPTMPLQDAHAVDHIIACLREHDSGTVTLCPLGPLTNIATALQKAPDIAPRIRRIVLMGGAYFAVGNVTPAAEFNIHVDPQAAGIVLKSGVDITMAPLDLTHKALVTESRNAAFRALGTPVGIAVAQMTEFFERYDREKYGSPGAPLHDPCVIAYLLRPDLFSGRHVNVAIETTSELTMGMSVADWWGVTSRAPNALFLGDIDADGFFSLLTERLARL

SEQ ID NO: 144132 - DNA, 939 bp, Oceanicola batsensis HTCC2597
  CDS (1)..(939): transl_table=11
atgccgcgccgcatcatcatcgacaccgaccccggccaggacgatgccgtggccatcctgctggccctcgccagccccgccgagatcgagatcctgggcatcaccgccgtcgccggcaacgtgcccctggagctgacggcgaagaatgcccggatcatctgcgaactggcccgcaagcccgagacgaaggtcttcgccggctgcgaccgcccgctggaccgcgcgctcgtcacggccgagcatgtgcacggccagaccgggctgaacggcccggaactgcccgacccgaccatgccgctgcaggacgggcacgcggtcgacttcatcatcgacacgctgcgcaccgagccggccggcaccgtgacgctgtgcccgctggggccgctgacgaatatcgccaccgccttccggcgcgcgcccgacatcgttgaaagggtgcaggaaatcgtcctgatgggcggggcctatttcgaggtgggcaacatcaccccgaccgccgaattcaacatctacgtggaccccgccgccgcgagcgaggtcttcgcggccggtgtgcccctcgtggtcatgccgctcgacgtgacgcacaaggcgctggtcacacccgacaggaacgactccttccgcgccatcggcagccgggtcgggatcgccgtggccgagatgaccgacttcttcgaacgtttcgacaaggagaaatacggctcggacggcgcgccgctccacgatccctgcgtcaccgcctatctgatccggcccgagctcttctccggccgccacgtcaatgtcgagatcgagacgcagtccgagctgacgatgggcatgaccgtggccgactggtggggcgtgaccgaccggccgaagaacgcgctcttcatgggcggcctcgacgcgcagggctatttcgatctgctgaccgaacggctggcccgcctgtga

SEQ ID NO: 144133 - protein, 312 aa, Oceanicola batsensis HTCC2597
MPRRIIIDTDPGQDDAVAILLALASPAEIEILGITAVAGNVPLELTAKNARIICELARKPETKVFAGCDRPLDRALVTAEHVHGQTGLNGPELPDPTMPLQDGHAVDFIIDTLRTEPAGTVTLCPLGPLTNIATAFRRAPDIVERVQEIVLMGGAYFEVGNITPTAEFNIYVDPAAASEVFAAGVPLVVMPLDVTHKALVTPDRNDSFRAIGSRVGIAVAEMTDFFERFDKEKYGSDGAPLHDPCVTAYLIRPELFSGRHVNVEIETQSELTMGMTVADWWGVTDRPKNALFMGGLDAQGYFDLLTERLARL

SEQ ID NO: 144134 - DNA, 1002 bp, Pseudomonas putida GB-1
  CDS (1)..(1002): transl_table=11
atgctcaaacccctgctacaaggaatcgccttcatggccactgcttccacccttcaggccgcccctatcgacctgatcatcgacactgaccctggcgccgatgatgtggtcgcgctgtttctggccatggcctcacccgacgaactcaacatccgcgccatcactacagtggctggcaacgtgcgtctggaaaaaacctcgcgcaacgcgcgcctggctcgcgaatgggcggggcgcgaagatatccccgtctacgccggtgccggtcgcccgttggtgcgcacacctatctatgctgccgacgtacacggcgaagaaggcctcactggcgtaccggtgcacgagccgaaaaaggcccaggcccagggcaatgccgtgcagtacctgatcgacaccctcggcgcggccacaccccacagcatcaccgtggccatgctcggcccgcagaccaacctggccctggcgttgattcagcgcccagacatcgtcaagggcatcaaagaggtggtcgtcatgggcggtgcccatttcaacggcggcaacatcaccccggcggcggagttcaacctttacgccgacccacacgccgccgaagtggtgttggccagcggcgtgcaactgacctacttgccgctggatgtcacccacaagctgctgaccagcgacgcccgcctgaagcaactggccgccgtgaataaccaggccagcaaacgcgtggtagatatcctcaatgcctacatcacccacgacatggacctgtacggcatgcccggcggcccggtgcacgacgccagcgtcatcgcctacctgttaaagcccgagcttttcagtggccggcgcattcacatgagcgtcgacagccgcgaaggcccaacgtttggccagacgattgccgactggtacggcgtgctcaagcagccggcgaatgtgctgtgggtggagcagggcgatgcccaggggctgttcgatctgctcagcgcccggttggcacgattggaataa

SEQ ID NO: 144135 - protein, 333 aa, Pseudomonas putida GB-1
MLKPLLQGIAFMATASTLQAAPIDLIIDTDPGADDVVALFLAMASPDELNIRAITTVAGNVRLEKTSRNARLAREWAGREDIPVYAGAGRPLVRTPIYAADVHGEEGLTGVPVHEPKKAQAQGNAVQYLIDTLGAATPHSITVAMLGPQTNLALALIQRPDIVKGIKEVVVMGGAHFNGGNITPAAEFNLYADPHAAEVVLASGVQLTYLPLDVTHKLLTSDARLKQLAAVNNQASKRVVDILNAYITHDMDLYGMPGGPVHDASVIAYLLKPELFSGRRIHMSVDSREGPTFGQTIADWYGVLKQPANVLWVEQGDAQGLFDLLSARLARLE

SEQ ID NO: 144136 - DNA, 1119 bp, Aspergillus oryzae
  CDS (1)..(1119)
atggctagactgcgatccggtatgctaacacagctgttctcaggccacgatgatgcatttgccattcttctcgctgcccaccatccctctctgaatttattgggcatcaccacagtccacggcaatgcctctctggagaacacaaccaacaatgctacaaggatattggaggccatagggcgaccagaaattcctgtatatccaggtcataaaaagcctttctgtaggcctgcaattcatgcgccgaatattcacggtgattctggtattgatggaaccgaacttctaccgaaggctacaaagtccccaattacagacaagaacccaattctggcaatgcgagatgccctcctagcacagccaaaagggacaccttgggttatagcaaccgggaccttaaccaacgtagctttgctctttgcgacgttccctgaagtagcagagcacattcaaggtctaagtattatgggtggcggagttggtggaggcttcacagatgcgcctatgagtcgacttgttggtgaagagtcaaggattgggaatatcacccctctggcagaatttaacatctactgcgatccagaagcatcacagtcaatcttcagcaatcctgtcctcgcttccaagacaactttgatcactcttgacttaacacaccaagtcctcgcctcgcactctgtgcaatcccgcgtcttgcatggtggtgatgacctttcggtgcctccaacagtcctccggcagatgctcttcgacctccttgttttctttgcgtcaacttatgaaaatgtttttggactgactagcgggcctcccttgcacgaccctcttgcggtcgcggttatcctgtcgaccctcaacccagagtatgcgaagcggcatcccgatcaggtcttgaagtttgacgatcggaacggagagcgatttgatgtcgacgtcgtcactgatggtctccacgggaccgatgtcgagctagtcggcgagctcggtcggtcaaaggttatatctggtactaccggagttgcgattccccggggggtagatctggatgcgttctggaatatgatacttgactgccttagacgtgcagatgaatgcaatgctgcgcggaagctggcgtga

SEQ ID NO: 144137 - protein, 372 aa, Aspergillus oryzae
MARLRSGMLTQLFSGHDDAFAILLAAHHPSLNLLGITTVHGNASLENTTNNATRILEAIGRPEIPVYPGHKKPFCRPAIHAPNIHGDSGIDGTELLPKATKSPITDKNPILAMRDALLAQPKGTPWVIATGTLTNVALLFATFPEVAEHIQGLSIMGGGVGGGFTDAPMSRLVGEESRIGNITPLAEFNIYCDPEASQSIFSNPVLASKTTLITLDLTHQVLASHSVQSRVLHGGDDLSVPPTVLRQMLFDLLVFFASTYENVFGLTSGPPLHDPLAVAVILSTLNPEYAKRHPDQVLKFDDRNGERFDVDVVTDGLHGTDVELVGELGRSKVISGTTGVAIPRGVDLDAFWNMILDCLRRADECNAARKLA

SEQ ID NO: 144138 - DNA, 1014 bp, Corynebacterium ammoniagenes
  CDS (1)..(1014): transl_table=11
atgaacgcagattccacctcaccggcacagaaaatcatcctcgattgcgacccgggccatgacgatgccattgccatgctcctggcacatggcaatcctaacctggagcttttagccgtaaccaccgtcgccggcaaccaaactctggaaaaagtcaccaccaatgcgcgcgcggtagcacgcgttgcgggtatcaccgacattccttttgccgctggtgcctcgcgtccgctggtgggcccgcaacttatccccgatgaaatccacggcgattctggcctcgacggcccacaactgcctgagcctagtgtcccgctagaagaaatccacgcggtcaacctcattgcccaggtcatctctgagaatgaacccggttccgtggtcattattcctaccggctctttgactaacatcgcacttttcgcgcgcatgtacccacagctggttgagcgcgttggcggaatcactttgatgggcggcgggcaccacaccggcaatatgactcctgcttctgagttcaatatcttggctgacccagaagccgcagcgattgtctttgaagaatcctggccagtaaccatggtcggactcgatgtcacccaccaggtactcgcggtacctgagcgcatggaacagctcaaggccattggcaccgatgttgcgcaatttatcgcagagctcgtggaattctttggtgcttcctacatgaaagagcgcaactacccgggcccacctatgcacgatccgttggctgtggcagcagttgccgatccatctatcctgcgaactgttcacgccccgatttatgtggaaactcaaggacagcacgcccgcgggcaaaccatcgtcgatttccgccgcacttggtctaataatgacccgagcggactaggggttaccgacgatcccgatttcgaggccccgaataccgccgtagccgtggacgtagatgccgagaaattctgggatctgctggtcgatgccctaactcgcattggcaacaccaacttttaa

SEQ ID NO: 144139 - protein, 337 aa, Corynebacterium ammoniagenes
MNADSTSPAQKIILDCDPGHDDAIAMLLAHGNPNLELLAVTTVAGNQTLEKVTTNARAVARVAGITDIPFAAGASRPLVGPQLIPDEIHGDSGLDGPQLPEPSVPLEEIHAVNLIAQVISENEPGSVVIIPTGSLTNIALFARMYPQLVERVGGITLMGGGHHTGNMTPASEFNILADPEAAAIVFEESWPVTMVGLDVTHQVLAVPERMEQLKAIGTDVAQFIAELVEFFGASYMKERNYPGPPMHDPLAVAAVADPSILRTVHAPIYVETQGQHARGQTIVDFRRTWSNNDPSGLGVTDDPDFEAPNTAVAVDVDAEKFWDLLVDALTRIGNTNF

SEQ ID NO: 144140 - DNA, 1458 bp, Zea mays
  CDS (169)..(1146)
agagaggttgcgtcccagccccacctgccatcgcctcttcttccgctccctcggcggctttccaagattcagattcagattgggggccttttgctgctgcgcggcaattctcgtcgctccagtccccacttcactgttcctgagcgggaggcaccggccggactcgcgatggggcaggacggccagcagatccgccgcgacaagctcatcatcgacacggatcccggcatcgatgatagcatgacgatcctaatggcgttcagagcacctagtgtggaaatcattgggctcacgaccatattcggcaacgtcgacacaaagggcgcaacacgtaacgcgctattgctgtgtgagagagcaggatgccccgaagttccagtagcagagggcagccatgagcccctaaagggaggaaagcggcgtgttgctgatttcgttcatgggtcagatggcattgggaatctgtttcttcctgcaccctctgctaagaaggttgaggaaagtgctgctgatttcctgattaataaggtctctgagtttccaggagaggtctctgtgcttgcgttgggacccctgacaaatgtagcattggccatcaaaagagacccttcctttgcaagcaaggttaagaaaatagttgtactgggtggagctttctttgcggctggaaatgtcaaccctgctgctgaagcaaatatccatggagacccagaagcagctgacatagtttttacttcaggagcagatatcgttgtggttggcattaacataacaacacaagtctgcctgacagatgaggatctcttggagctaagaaactcgaaagggaagcatgcagcgttcttatatgagatgtgcaagttctacagagattggcatgccaagtctgatggttttcatggaattttccttcatgatcctgtgagcttcactgccgtacttcatccagagtacttcacattcaagaagggtgtggtgagagtagagacccagggcatttgcactggccacactttgatggatcagggattgaaaaagtggaattcagagaacccatggtcagggtataaaccgatttcagttgcatggacggttgatgtgccaaaggtcatcagctttataaagaagctgctcatggcaccatgagcaaagtacgaccatttaacgacgtgtcgacatcagcgctctctgatgtccaagaaaatttgacgagtacagatgctctttctcagttgcactgtaattagttcctggacctaggatgattcctattcctccaatagtaagaggaacctttcattgtgaaaggtcatgcagcagtctcgaataccatgaagcaaattctggcatacgacatcatgtctcacacatttgtatcaatacatttcgaatcaataaagtttccctcactctttactgtgcaaaaaaaaaaataaaaaaaaaaaaaaaaaaaaaaaa

SEQ ID NO: 144141 - protein, 325 aa, Zea mays
MGQDGQQIRRDKLIIDTDPGIDDSMTILMAFRAPSVEIIGLTTIFGNVDTKGATRNALLLCERAGCPEVPVAEGSHEPLKGGKRRVADFVHGSDGIGNLFLPAPSAKKVEESAADFLINKVSEFPGEVSVLALGPLTNVALAIKRDPSFASKVKKIVVLGGAFFAAGNVNPAAEANIHGDPEAADIVFTSGADIVVVGINITTQVCLTDEDLLELRNSKGKHAAFLYEMCKFYRDWHAKSDGFHGIFLHDPVSFTAVLHPEYFTFKKGVVRVETQGICTGHTLMDQGLKKWNSENPWSGYKPISVAWTVDVPKVISFIKKLLMAP

SEQ ID NO: 144142 - DNA, 1053 bp, Culex quinquefasciatus
  CDS (1)..(1053)
atgggcaaaatttctgccattgttggcgtagctctggcggcctttatgattttcatcattgtagcagactctgctgaggccaatcaatcaattcgacgcgttattgtcgatgtcgatgctggccccgatgacgcgtgggcactttatcacctgcttagcagcccgcaggtcaaagttgaggccatcagctgtgtgcgaggtaacacgaacgtgaccatggtgggtcggaacgtgctgcggattctgaccgcaatgggaaaggagaatgagattccagtttttttggggtctgatgaacgcctgattacgcctgggccggttgtggaccccaaggatatgtactttggagcggacggattctcagacgtagattactcccatttgcctccgctgaatatggcgctacttcgaacgggtgccattggtgaacatgcaagactcattgaaaagtatccttcagaaatcacgtttatcaccttgggaccgctaacaaacctcgctctgctgctgaaagtccacccgagcacccgccaactgatcaaggaagttttcgtgatgggcggaaaccgacacggtgttggcaacactgaaagtgccgccgagtttaacttctacaacgaccccgagagcgccaatatcgtggtcaacaactatcccgggctgatcacggtatttccgtgggagacagtttcgctcgatcatctcgtgatgaatcaaacgtggcggttcgagacgattgtaagctccacgaatcctgtggtacaaattttgagccctgctgagcggaaatcgttaggggaaggtgacaactggatgccctgcgatctgttggtggcaatgggcttcactaatccggaactgatcacaaaaacgaaacaatatccgggaagtgtggaacttgccggatcgctgacacgtggtcagctcgtgctgaaccatcaaaaggagggaactggaaacattgtgattgtggatgacatggaccacgcggcggtggagcgaatgatcatgggattggccgcggaatgcaaggcatgtgctggttcaggatga

SEQ ID NO: 144143 - protein, 350 aa, Culex quinquefasciatus
MGKISAIVGVALAAFMIFIIVADSAEANQSIRRVIVDVDAGPDDAWALYHLLSSPQVKVEAISCVRGNTNVTMVGRNVLRILTAMGKENEIPVFLGSDERLITPGPVVDPKDMYFGADGFSDVDYSHLPPLNMALLRTGAIGEHARLIEKYPSEITFITLGPLTNLALLLKVHPSTRQLIKEVFVMGGNRHGVGNTESAAEFNFYNDPESANIVVNNYPGLITVFPWETVSLDHLVMNQTWRFETIVSSTNPVVQILSPAERKSLGEGDNWMPCDLLVAMGFTNPELITKTKQYPGSVELAGSLTRGQLVLNHQKEGTGNIVIVDDMDHAAVERMIMGLAAECKACAGSG

SEQ ID NO: 144144 - DNA, 1017 bp, Aedes aegypti
  CDS (1)..(1017)
atgctgcaccttgtgggcctacttctgctcacgtacgcagtagccgttcctcttccctgctccgaaaaaggaatccgccgggtaatcatcgatcaggatggtggcggtgacgatggatgggccctgttgatgatgctgatgaacgagaagaagtacaacgtggtggtggaagccatcacttgcacccatggtaataccgatttggagaactcggtcacaaatgctgctcggatcttggaaggattgggaagacgggatgtcccgctgtatcgaggggctagtgagcgcttgataactccagcgcctcgcagggatgtcaacaggtatttctggggagtggatggattcggcgacgtgcagttccagagtaagccggatttagggaatgttcctgacgaacatgcggttgttaagatgcatgagttgattcggaagtacccgaggcagatatcgattctatgcttgggacctttgaccaaccttgcgatgttgttcaaaatgttcccgagtgtgaaaagcgaaatagccggaatatatattttaggaggcaataggaacggtgttggtaatacggactttgcagcggaatttaatttcttcaccgatccagaagcagccaacattgtgatgaacaatgcgccagtgattttgaacattgttccttgggaaacagttctcgatttggaaacgatttttccaatggaatggaggaacagtgttttcaaggagccgaaaaacaaagccattgtggtgttgaaccaagtggaggaggtgatttatgcaaacatcagtaattggcagccttgcgatatgtatgctgcggcagttctgctcaacaactgcatgatagcggatgctaaacgatacaaggctgatgttgaattggctggaaaagtgactcgcggaatgatggcgattttgtaccacgataatgatgaaaaggatttcaacgtgaatgtcatcgacggaattgaagaggatacgctaagacagatggttgaagatctgaatcggtag

SEQ ID NO: 144145 - protein, 338 aa, Aedes aegypti
MLHLVGLLLLTYAVAVPLPCSEKGIRRVIIDQDGGGDDGWALLMMLMNEKKYNVVVEAITCTHGNTDLENSVTNAARILEGLGRRDVPLYRGASERLITPAPRRDVNRYFWGVDGFGDVQFQSKPDLGNVPDEHAVVKMHELIRKYPRQISILCLGPLTNLAMLFKMFPSVKSEIAGIYILGGNRNGVGNTDFAAEFNFFTDPEAANIVMNNAPVILNIVPWETVLDLETIFPMEWRNSVFKEPKNKAIVVLNQVEEVIYANISNWQPCDMYAAAVLLNNCMIADAKRYKADVELAGKVTRGMMAILYHDNDEKDFNVNVIDGIEEDTLRQMVEDLNR

SEQ ID NO: 144146 - DNA, 936 bp, Escherichia coli O157
  CDS (1)..(936): transl_table=11
atggcactgccaattctgttagattgcgacccaggtcatgatgacgctatcgcaatagttctcgccctcgcctcaccagagcttgatgtcaaagcaattacgtcttccgccggaaaccagacaccagaaaaaaccttacgcaatgttctgcgtatgctgaccttgcttaatcgcaccgatattccggtggcaggcggcgcggtaaaaccgttaatgcgtgagttgattatcgcggacaatgtgcacggcgaaagcggtctcgacggcccggcattaccggaaccgacgttcgcaccgcaaaactgtacggcggtagagctgatggcgaaaacgctgcgtgaaagtgcggaacctgtcacgattgtgtctaccggaccgcaaactaacgttgccttgctgctcaatagccatccggaactgcatagcaaaattgcccgtatcgtgattatgggtggcgctatgggactgggtaactggacgcctgcggctgaatttaatatttacgttgacccggaagcggcagaaattgtcttccagtcagggatcccggtggtgatggccggtctggatgttactcacaaagcacaaatccacgttgaagacactgagcgtttccgcgcgattggcaaccctgtttcaaccattgttgccgaactgctggatttcttcctcgaatatcataaagacgaaaaatggggctttgtcggcgcaccgctacatgacccatgcaccatcgcctggctgttaaaaccggagttgtttaccactgttgagcgctgggttggcgtggaaacacaggggaaatatacccagggtatgacggttgttgattattattatctgactggcaataaaccgaatgccactgtaatggtcgatgttgatcgtcagggctttgttgatttactggctgatcgtctgaaattttacgcttaa

SEQ ID NO: 144147 - protein, 311 aa, Escherichia coli O157
MALPILLDCDPGHDDAIAIVLALASPELDVKAITSSAGNQTPEKTLRNVLRMLTLLNRTDIPVAGGAVKPLMRELIIADNVHGESGLDGPALPEPTFAPQNCTAVELMAKTLRESAEPVTIVSTGPQTNVALLLNSHPELHSKIARIVIMGGAMGLGNWTPAAEFNIYVDPEAAEIVFQSGIPVVMAGLDVTHKAQIHVEDTERFRAIGNPVSTIVAELLDFFLEYHKDEKWGFVGAPLHDPCTIAWLLKPELFTTVERWVGVETQGKYTQGMTVVDYYYLTGNKPNATVMVDVDRQGFVDLLADRLKFYA

SEQ ID NO: 144148 - DNA, 933 bp, Photobacterium profundum
  CDS (1)..(933): transl_table=11
atgtctcgccctatcattatcgattgtgatcctggtcatgacgatgcaatcgcacttattcttgcttgtgctagcccagagcttgatataaaagcggttactaccagtgccggtaatcaaacccccgaaaaaaccctgcataatgcattacgcattcttacgttagtgggcagaacagacattcccgtcgcaggtggtgctctacagcccctttctcgtgaattgatcattgcagataacgtacacggtgaaacaggattagatgggcctgtactacccgaacctgcgtttgaaccacagccttgccatgctgttgaactaatggctaaaatactgacagaagcgacagaacccgtcacgcttgtaccgacaggtcctcttactaatattgccttattattggcgacccatcgtgaactgcacagtcaaattgatagcattgtattgatgggtggctcagcggaagccggtaattggaccccagcagctgaatttaatatttacgttgatcctgaagcggccgatatcgtttttaaatcgggcattcctatcactatgtgcggtttagatgttacccatagagcacaaatcatggatgaagatatcgagaaaattcgtaagataaacaatccagtcgctcaagtgactgctgaattacttgatttctttatgatttatcatcgcgatccaaaatggggctttgaaggggcgcctttgcacgatccttgtaccattgcttggttattagaaccagaactgtttgcatctatcaattgctgggtaggtatcgaaacacaaggaagccatacattaggtatgacagtcgtcgatcgctatcagctaaccgataacccaatcaatacaacggtgctgtttgatgtgaatcgccaaggttttgtcgacttattagcagaacgtcttgctaattactga

SEQ ID NO: 144149 - protein, 310 aa, Photobacterium profundum
MSRPIIIDCDPGHDDAIALILACASPELDIKAVTTSAGNQTPEKTLHNALRILTLVGRTDIPVAGGALQPLSRELIIADNVHGETGLDGPVLPEPAFEPQPCHAVELMAKILTEATEPVTLVPTGPLTNIALLLATHRELHSQIDSIVLMGGSAEAGNWTPAAEFNIYVDPEAADIVFKSGIPITMCGLDVTHRAQIMDEDIEKIRKINNPVAQVTAELLDFFMIYHRDPKWGFEGAPLHDPCTIAWLLEPELFASINCWVGIETQGSHTLGMTVVDRYQLTDNPINTTVLFDVNRQGFVDLLAERLANY

SEQ ID NO: 144150 - DNA, 936 bp, Salmonella paratyphi
  CDS (1)..(936): transl_table=11
atggcactgcccattattattgattgcgatccgggtcatgatgacgcgatcgccctcgttctcgccctcgcctcccctgaactggaagtgaaagcgatcacctcttccgccggcaaccagacgccggagaagaccctgcgcaacgtgctgcggatgctgacactgctcaaacgcccggatattccggtggcgggcggcgcggtgaaacctctcatgcgcgaactgattatcgccgataacgttcacggcgaaagcggcctcgacggcccggcgctgcccgaaccgtcattcgccccgcaaagcggcactgccgttgagctgatggcaaaaacactgcgtgagagctcacagccagtcaccatcgtctccactggcccacagaccaacgtggcgctgctgctgaatagccatccggaactgcacgcgaaaattgcgcgtattgtgatcatgggcggcgcaatgggattggggaactggacgcccgctgcggaatttaatatttacgtcgacccggaagcggcagaaattgtcttccagtcaggtattccggtggtgatggccgggctgaacgtcacccataaggcgcagattcacgccgccgatatcgaacgctttcgcgccattggcaacccgatttccaccatcgtcgccgaactgctggacttctttatggagtaccacaaagacgaaaaatggggatttgtcggcgcgccgctgcacgacccgtgcaccatcgcctggctgctgaaacccgagattttcaccaccgttgagcgttgggttggcgtggaaacccaggggaaatacacccaggggatgacggtggtggattattatttcctgacggggaataagccgaatgcgacggtgatggtcgatgtagaccgccagggatttgtcgatttgctggcggaacggctgcaatactacgcataa

SEQ ID NO: 144151 - protein, 311 aa, Salmonella paratyphi
MALPIIIDCDPGHDDAIALVLALASPELEVKAITSSAGNQTPEKTLRNVLRMLTLLKRPDIPVAGGAVKPLMRELIIADNVHGESGLDGPALPEPSFAPQSGTAVELMAKTLRESSQPVTIVSTGPQTNVALLLNSHPELHAKIARIVIMGGAMGLGNWTPAAEFNIYVDPEAAEIVFQSGIPVVMAGLNVTHKAQIHAADIERFRAIGNPISTIVAELLDFFMEYHKDEKWGFVGAPLHDPCTIAWLLKPEIFTTVERWVGVETQGKYTQGMTVVDYYFLTGNKPNATVMVDVDRQGFVDLLAERLQYYA

SEQ ID NO: 144152 - DNA, 936 bp, Salmonella typhimurium
  CDS (1)..(936): transl_table=11
atggcactgcccattattattgattgcgatccgggtcatgatgacgcgatcgccctcgttctcgccctcgcctcccctgaactggaagtgaaagcgatcacctcttccgccggtaaccagacgccggagaagaccctgcgcaacgtgctgcggatgctgacactgctcaaacgcctggatattccggtggcgggcggcgcggtgaaacctctcatgcgcgaactgattatcgccgataacgttcacggcgaaagcggcctcgacggcccggcgctgcccgagccgtcattcgccccgcaaagcggcactgccgttgagctgatggcaaaaacgctgcgcgagagcgcacaaccggtcaccatcgtctccactggcccacagaccaacgtggcgctgctgctgaatagccatccggaactgcatacgaaaatcgcccgcattgtgatcatgggcggcgcgatggcgctgggtaactggacgcccgctgcggaatttaatatttacgtcgacccggaagcggcagaaattgtcttccagtcaggcattccggtggtgatggccgggctggacgtcactcataaggcacagattcacgccgccgatatcgaacgctttcgcgccatcggtaacccgatttccaccatcgtcgccgaactgctggacttctttatggagtaccacaaagacgaaaaatggggatttgtcggcgcaccgctgcacgacccgtgcaccatcgcctggctgctcaagcccgagattttcaccaccgttgagcgttgggtcggcgtggaaacccaggggaaatacacccaggggatgacggtggtggattattatttcctgacggggaataagccgaatgcgacggtgatggtcgatgtagaccgccagggatttgtcgatttgctggcggaacggctgcaatactacgcataa

SEQ ID NO: 144153 - protein, 311 aa, Salmonella typhimurium
MALPIIIDCDPGHDDAIALVLALASPELEVKAITSSAGNQTPEKTLRNVLRMLTLLKRLDIPVAGGAVKPLMRELIIADNVHGESGLDGPALPEPSFAPQSGTAVELMAKTLRESAQPVTIVSTGPQTNVALLLNSHPELHTKIARIVIMGGAMALGNWTPAAEFNIYVDPEAAEIVFQSGIPVVMAGLDVTHKAQIHAADIERFRAIGNPISTIVAELLDFFMEYHKDEKWGFVGAPLHDPCTIAWLLKPEIFTTVERWVGVETQGKYTQGMTVVDYYFLTGNKPNATVMVDVDRQGFVDLLAERLQYYA

SEQ ID NO: 144154 - DNA, 936 bp, Shigella flexneri
  CDS (1)..(936): transl_table=11
atggcactgccaattctgttagattgcgacccaggtcatgatgacgctatcgcaatagttctcgcactcgcctcaccagagcttgatgtcaaagcaattacgtcttccgccggaaaccagacaccagaaaaaaccttacgcaatgttctgcgtatgctgaccttgcttaatcgcaccgatattccggtggcaggcggcgcggtaaaaccgttaatgcgtgagttgattatcgcggacaatgtgcacggcgaaagcggtctcgacggcccggcattaccggaaccgacgttcgcaccgcaaaactgtacggcggtggagctgatggcgaaaacgctgcgcgaaagtgcggaacctgtcacgattgtttctaccggaccgcaaactaacgttgccttgctgctcaatagccatccggaactgcatagcaaaattgcccgtatcgtgattatgggcggcgcaatggggcttggtaactggacgcctgcggctgaatttaatatttacgttgacccggaagcggcagaaattgtcttccagtcagggatcccggtggtgatggccggtctggatgttactcataaagcgcaaatccacgttgaagacaccgagcgtttccgcgcgattggcaaccctgtttcaaccattgttgccgaactgctggatttcttcctcgaatatcataaagacgaaaaatggggctttgtcggcgcaccgctgcatgacccatgcaccatcgcctggctgttgaaacccgagttgtttaccactgttgagcgctgggttggcgtggaaacacaggggaaatatacccagggtatgacggttgttgattattattatctgactggcaataaaccgaatgccactgtaattgtcgatgttgatcgtcagggctttgttgatttactggctgatcgtctgaaattttacgcttaa

SEQ ID NO: 144155 - protein, 311 aa, Shigella flexneri
MALPILLDCDPGHDDAIAIVLALASPELDVKAITSSAGNQTPEKTLRNVLRMLTLLNRTDIPVAGGAVKPLMRELIIADNVHGESGLDGPALPEPTFAPQNCTAVELMAKTLRESAEPVTIVSTGPQTNVALLLNSHPELHSKIARIVIMGGAMGLGNWTPAAEFNIYVDPEAAEIVFQSGIPVVMAGLDVTHKAQIHVEDTERFRAIGNPVSTIVAELLDFFLEYHKDEKWGFVGAPLHDPCTIAWLLKPELFTTVERWVGVETQGKYTQGMTVVDYYYLTGNKPNATVIVDVDRQGFVDLLADRLKFYA

SEQ ID NO: 144156 - DNA, 942 bp, Escherichia coli O157
  CDS (1)..(942): transl_table=11
atggaaaagagaaaaattattctggattgtgatccgggtcatgatgatgctattgctataatgatggcggcgaaacatccggcaatagatttattaggcatcactattgtagcgggtaatcagacgcttgataaaacattaattaatggcctgaatgtttgccagaaactggagattaatgttccggtttatgcggggatgccacaacccattatgcggcaacaaatcgttgccgataatattcacggtgataccggactggatggcccggtattcgagccgctgacccgccaggcagaaagcactcatgcggtgaaatacatcattgataccctgatggcaagcgatggcgatatcactctggtgccggttggtccgctttcaaatatcgcggtggcaatgcgtatgcaacccgcgatcctgcccaaaatccgtgaaattgtgctaatgggcggcgcttacggtacaggcaacttcacgccatctgccgagttcaacatctttgctgacccggaagccgcacgcgtggtgttcacctctggcgttccattagtgatgatgggcctcgatctcaccaaccagaccgtttgcaccccggacgtgattgcacgaatggaaagggcaggcggccctgccggagagctgttcagcgacatcatgaacttcactctcaaaacccagttcgaaaactacggcctggctggcggcccggtgcacgacgccacctgcatcggttatctgattaaccctgatggcattaaaacccaggagatgtacgtcgaagtggacgtcaacagtggcccttgttatgggcgtaccgtctgcgacgagctgggcgttcttggcaagcccgctaataccaaagtcggcatcactattgatagcgactggttctggggcttagtcgaagagtgcgtgcgcggctacatcaaaacccattaa

SEQ ID NO: 144157 - protein, 313 aa, Escherichia coli O157
MEKRKIILDCDPGHDDAIAIMMAAKHPAIDLLGITIVAGNQTLDKTLINGLNVCQKLEINVPVYAGMPQPIMRQQIVADNIHGDTGLDGPVFEPLTRQAESTHAVKYIIDTLMASDGDITLVPVGPLSNIAVAMRMQPAILPKIREIVLMGGAYGTGNFTPSAEFNIFADPEAARVVFTSGVPLVMMGLDLTNQTVCTPDVIARMERAGGPAGELFSDIMNFTLKTQFENYGLAGGPVHDATCIGYLINPDGIKTQEMYVEVDVNSGPCYGRTVCDELGVLGKPANTKVGITIDSDWFWGLVEECVRGYIKTH

SEQ ID NO: 144158 - DNA, 942 bp, Escherichia coli
  CDS (1)..(942): transl_table=11
atggaaaagagaaaaattattctggattgtgatccgggtcatgatgatgctattgctataatgatggcggcgaaacatccggcaatagatttattaggcatcactattgtagcgggtaatcagacgcttgataaaacattaattaatggcctgaatgtttgccagaaactggagattaatgttccggtttatgcggggatgccgcagcccattatgcgtcaacaaatcgttgccgataatattcacggtgaaaccggactggatggcccggtattcgagccgctgacccgccaggcagaaagcactcatgcggtgaaatatatcattgataccctgatggcaagcgatggcgatatcactctggtgccggttggtccgctttcaaatatcgcggtggcaatgcgtatgcaacccgcgatcctgcccaaaatccgtgaaattgtgctaatgggcggcgcttacggtacaggcaacttcacgccatctgccgagttcaacatctttgccgacccggaagccgcacgcgtagtgttcacctccggcgttccattagtgatgatgggcctcgatctcaccaaccagaccgtttgcaccccggacgtgattgctcggatggaaagggcaggcggccccgccggagagctgttcagcgacatcatgaacttcactctcaaaacgcagttcgaaaactacggccttgctggcggcccggtgcacgacgccacctgcatcggttatctgattaaccctgatggcattaaaacccaggagatgtacgtcgaagtggacgtcaacagtggcccttgctatgggcgtaccgtctgcgacgagctgggcgttcttggcaagcccgccaataccaaagtcggcatcactattgatacagactggttctggggattagtcgaagagtgcgtgcgcggctacatcaaaacccattaa

SEQ ID NO: 144159 - protein, 313 aa, Escherichia coli
MEKRKIILDCDPGHDDAIAIMMAAKHPAIDLLGITIVAGNQTLDKTLINGLNVCQKLEINVPVYAGMPQPIMRQQIVADNIHGETGLDGPVFEPLTRQAESTHAVKYIIDTLMASDGDITLVPVGPLSNIAVAMRMQPAILPKIREIVLMGGAYGTGNFTPSAEFNIFADPEAARVVFTSGVPLVMMGLDLTNQTVCTPDVIARMERAGGPAGELFSDIMNFTLKTQFENYGLAGGPVHDATCIGYLINPDGIKTQEMYVEVDVNSGPCYGRTVCDELGVLGKPANTKVGITIDTDWFWGLVEECVRGYIKTH

SEQ ID NO: 144160 - DNA, 942 bp, Shigella flexneri
  CDS (1)..(942): transl_table=11
atggaaaagagaaaaattattctggattgtgagccgggtcatgatgatgctattgcaatgatgatggcagcgaaacatccggcaatagatttattaggcatcactattgtagcgggtaatcagacgcttgataaaacattaattaatggcctgaatgtttgccagaaactggagattaatgttccggtttatgcggggatgccgcaacccattatgcgtaaacaaatcgttgccgataatattcacggtgaaaccggactggatggcccggtattcgagccgctgacccgccaggcagaaagtacccatgcggtgaaatatatcatcgataccctgatggcaagcgatggcgatatcactctggtgccggttggtccgctttcaaatatcgcggtggcaatgcgtatgcaacccgcaatcctgcccaaaatccgtgaaattgtgctaatgggcggcgcttacggtacaggcaacttcaccccatctgccgagttcaatatctttgccgacccggaagccgcccgcgtggtgttcacctccggcgttccattagtgatgatgggcctcgatcttaccaaccagaccgtttgcaccccggatgtaattgctcggatggaaagggtaggcggccctgccggagagctgttcagcgacatcatgaacttcactctcaaaacgcagttcgaatactacggcctggctggcggcccggtgcatgacgccacctgcattggttatctgatcaaccctgatggcattaaaacccaggatatgtacgtcgaagtggacgtcaacagcggcccttgctacgggcgtacggtctgcgacgaactgggcgttcttggcaagcccgctaataccaaagtcggcatcactattgataccgactggttctggggcttagtcgaagagtgcgtgcgcggctacatcaaaacccattaa

SEQ ID NO: 144161 - protein, 313 aa, Shigella flexneri
MEKRKIILDCEPGHDDAIAMMMAAKHPAIDLLGITIVAGNQTLDKTLINGLNVCQKLEINVPVYAGMPQPIMRKQIVADNIHGETGLDGPVFEPLTRQAESTHAVKYIIDTLMASDGDITLVPVGPLSNIAVAMRMQPAILPKIREIVLMGGAYGTGNFTPSAEFNIFADPEAARVVFTSGVPLVMMGLDLTNQTVCTPDVIARMERVGGPAGELFSDIMNFTLKTQFEYYGLAGGPVHDATCIGYLINPDGIKTQDMYVEVDVNSGPCYGRTVCDELGVLGKPANTKVGITIDTDWFWGLVEECVRGYIKTH

SEQ ID NO: 144162 - DNA, 915 bp, Escherichia coli
  CDS (1)..(915): transl_table=11
atgcgtttacctatcttcctcgatactgaccccggcattgacgatgccgtcgccattgccgccgcgatttttgcacccgaactcgacctgcaactgatgaccaccgtcgcgggtaatgtctcggttgagaaaactacccgcaatgccctgcaactgctgcatttctggaatgcggagattccgctcgcccaaggggccgctgtgccactggtacgcgcaccgcgtgatgcggcatctgtgcacggcgaatcgggaatggctggctacgactttgttgagcacaaccgaaagccgctcgggataccggcgtttctggcgattcgggatgccctgatgcgtgcaccagagcctgttaccctggtggccatcggcccgttaaccaatattgcgctgttactttcacaatgcccggaatgcaagccgtatattcgccgtctggtgatcatgggtggttctgccggacgcggcaactgtacgccaaacgccgagtttaatattgctgccgatccagaagctgctgcctgtgtcttccgcagtggtattgaaatcgtcatgtgcggtttggatgtcaccaatcaggcaatattaactcctgactatctctctacactgccgcagttaaaccgtaccgggaaaatgcttcacgccctgtttagccactaccgtagcggcagtatgcaaagcggcttgcgaatgcacgatctctgcgccatcgcctggctggtgcgcccggacctgttcactctcaaaccctgttttgtggcagtggaaactcagggcgaatttacctcaggcacgacggtggttgatatcgacggttgcctgggcaagccagccaatgtacaggtggcattggatctggatgtgaaaggcttccagcagtgggtggctgaggtgctggctctggcgtcgtaa

SEQ ID NO: 144163 - protein, 304 aa, Escherichia coli
MRLPIFLDTDPGIDDAVAIAAAIFAPELDLQLMTTVAGNVSVEKTTRNALQLLHFWNAEIPLAQGAAVPLVRAPRDAASVHGESGMAGYDFVEHNRKPLGIPAFLAIRDALMRAPEPVTLVAIGPLTNIALLLSQCPECKPYIRRLVIMGGSAGRGNCTPNAEFNIAADPEAAACVFRSGIEIVMCGLDVTNQAILTPDYLSTLPQLNRTGKMLHALFSHYRSGSMQSGLRMHDLCAIAWLVRPDLFTLKPCFVAVETQGEFTSGTTVVDIDGCLGKPANVQVALDLDVKGFQQWVAEVLALAS

SEQ ID NO: 144164 - DNA, 915 bp, Salmonella paratyphi
  CDS (1)..(915): transl_table=11
atgacagcatccctacacattattcttgataccgatccgggcattgatgacgcggctgcgattgccgctgcgctgttcgccccccagcttgatctgcaactaataaccaccgtcgcaggcaatgtttccgttgaaaaaacgacccgtaatgcgttgcagcttctgcatttctggaacagcgatatcccacttgcccagggggccgcgacaccgctgctgcgtccgttacgcgatgcggcatacgtccacggcgaatccggtatggaaggctatgattttgtcgaccatcagcgtcaaccgttggcgaagcctgcgtttatctctatccgtgatgtgctgatgaacgccccggagcccatgacattagtggcgattgggccattgaccaatattgcgttgctactgatgcactatccggagtgtgcgtgtaacattcgccgtctggtgttgatgggcggttccgcagggcgcggcaattttacgcctaatgctgaatttaacattgctgtcgatccggaagccgccgcccacgtatttcgtagcggcattgagattgtgatgtgtgggcttgacgtcacgaatcaggcaatgctctcgccagattttctgaataaactgcccgcgctgaatcgcaccggtaagatgttgcacagcctgttcaaccattatcgcagcggtagtatgcgcactggcgtccggatgcacgatctctgcgctatcgcctggctggtgcgtccggagctttttaccctgcaatcctgttttgtggctgtagaaacgcagggggaatataccgcaggcacgacggtcgttgatattgaagggcgtctggggcagcccgccaacgcgcagatggcgctggatgtggacggttttcgtcagtgggtggctgaggtgtttgcctatgcaccgtaa

SEQ ID NO: 144165 - protein, 304 aa, Salmonella paratyphi
MTASLHIILDTDPGIDDAAAIAAALFAPQLDLQLITTVAGNVSVEKTTRNALQLLHFWNSDIPLAQGAATPLLRPLRDAAYVHGESGMEGYDFVDHQRQPLAKPAFISIRDVLMNAPEPMTLVAIGPLTNIALLLMHYPECACNIRRLVLMGGSAGRGNFTPNAEFNIAVDPEAAAHVFRSGIEIVMCGLDVTNQAMLSPDFLNKLPALNRTGKMLHSLFNHYRSGSMRTGVRMHDLCAIAWLVRPELFTLQSCFVAVETQGEYTAGTTVVDIEGRLGQPANAQMALDVDGFRQWVAEVFAYAP

SEQ ID NO: 144166 - DNA, 921 bp, Salmonella typhimurium
  CDS (1)..(921): transl_table=11
atgacagcatccctacacattattcttgataccgatccgggcattgatgacgcggctgcgattgccgctgcgctgttcgccccccagcttgatctgcaactaataaccaccgtcgcaggtaatgtttccgttgaaaaaacgacccgtaatgcgttgcagcttctgcatttctggaacagcgatatcccacttgcccagggggccgcgacaccgctgctgcgtccgttacgcgatgcggcatacgtccacggcgaatccggtatggaaggctatgattttgtcgaccatcagcgccaaccgttggcgaagcctgcgtttatcgctatccgggatgtgctgatgaacgccccggagcccatgacattagtggcgattgggccattgaccaatattgcgttgctactgatgcactatccggagtgtgcgtgtaacattcgccgtctggtgttgatgggcggttccgcagggcgcggcaattttacgcctaatgctgaatttaacattgctgtcgatccggaggccgcggcgctggtgttccgcagcggtctggagattgtgatgtgtgggctggacgttacaaatcaggcaatgctctcgccagattttctgaataaactgcccgcgctgaatcgcaccggtaagatgttgcacagcctgttcaaccattatcgcagcggtagtatgcgcactggcgtccggatgcacgatctctgcgctatcgcctggctggtgcgtccggagctttttaccctgcaatcctgttttgtggccgtagaaacgcaggggcaatataccgccggtaccacggtggtggatattgaagggcgtctggggcagcccgccaacgcgcaggtggcgctggcgctggatgtggacggttttcgtcagtgggtggctgaggtgtttgcctatgcgccgtaa

SEQ ID NO: 144167 - protein, 306 aa, Salmonella typhimurium
MTASLHIILDTDPGIDDAAAIAAALFAPQLDLQLITTVAGNVSVEKTTRNALQLLHFWNSDIPLAQGAATPLLRPLRDAAYVHGESGMEGYDFVDHQRQPLAKPAFIAIRDVLMNAPEPMTLVAIGPLTNIALLLMHYPECACNIRRLVLMGGSAGRGNFTPNAEFNIAVDPEAAALVFRSGLEIVMCGLDVTNQAMLSPDFLNKLPALNRTGKMLHSLFNHYRSGSMRTGVRMHDLCAIAWLVRPELFTLQSCFVAVETQGQYTAGTTVVDIEGRLGQPANAQVALALDVDGFRQWVAEVFAYAP

SEQ ID NO: 144168 - DNA, 915 bp, Shigella flexneri
  CDS (1)..(915): transl_table=11
atgcgtttacctatcttcctcgatactgaccccggcattgacgatgccgtcgccattgccgccgcgatttttgcccccgaactcgacctgcaactgatgaccaccgtcgcgggtaatgtctcggttgagaaaactacccgcaatgccctgcaactgctgcatttctggaatgcggagattccgctcgcccagggagccgctgtgccgctggtacgcgcaccgcgtgatgcagcatctgtgcacggcgaatcgggaatggctggctacgactttgttgagcacaaccgaaagccactcgggataccggcgtttctggcgattcgggatgccctgatgcgtgcaccagagcccgttaccctggtggccatcggcccgttaaccaatattgcgctgttacttttacaatgcccggaatgtaaaccgtatattcgtcgtctggtgatcatgggcggttctgctggtcgcggcaactgtacaccaaatgccgagtttaatatcgctgccgatccagaagcggctgcctgtgtcttccgtagcggcatcgaaattgtcatgtgcggtctggatgtcaccaatcaggcaatattaacccctgactatctcgctactttaccggagttgaatcgcaccggaaaaatgctccacgccctgtttagccactaccgtagcggcagtatgcaaagcggtctgcgaatgcacgatctctgcgccatcgcctggctggtgcgcccggacttattcaccctcaagccgtgttttgtcgcggtagaaactcaaggcgaatttacctcaggcacgacggtggttgatatcgacggttgcctgggcaaaccagccaatgtacaggtggcattggatctgaatgtaaaaggcttccaacagtgggtggctgaggtgctggctctggtgccgtaa

SEQ ID NO: 144169 - protein, 304 aa, Shigella flexneri
MRLPIFLDTDPGIDDAVAIAAAIFAPELDLQLMTTVAGNVSVEKTTRNALQLLHFWNAEIPLAQGAAVPLVRAPRDAASVHGESGMAGYDFVEHNRKPLGIPAFLAIRDALMRAPEPVTLVAIGPLTNIALLLLQCPECKPYIRRLVIMGGSAGRGNCTPNAEFNIAADPEAAACVFRSGIEIVMCGLDVTNQAILTPDYLATLPELNRTGKMLHALFSHYRSGSMQSGLRMHDLCAIAWLVRPDLFTLKPCFVAVETQGEFTSGTTVVDIDGCLGKPANVQVALDLNVKGFQQWVAEVLALVP

SEQ ID NO: 144170 - DNA, 1137 bp, Saccharomyces cerevisiae
  CDS (115)..(1137)
atggaatctgctgatttttttacctcacgaaacttattaaaacagataatttccctcatctgcaaggttggggaagggttggacagcaataaccagcgactgtttgaagaaaagatgactgttagtaaaatacccatatggctagattgtgatcctggtcatgatgatgccatagccattttattaggctgtttccatccagctttcaatcttctaggaatcagcacgtgttttggtaacgcaccgccagagaatactgactacaacgcccgttctcttttgactgcgatgggcaaagcacaagcgattccagtttataaaggcgcacagagaccttggaaaagggaacctcattatgctcctgacattcatggtatatcaggtttagacggcacttctttgctacctaagccaacatttgaggcaagaactgataaaacgtatattgaggccattgaagaggcgattctagctaacaatggagagatatcctttgtgtctactggtgcacttaccacattagcaacagtttttaggtgtaaaccatacctaaaaaaatctgtcaaatatattagcattatggggggtggactccatggtctaggaaactgtaacccaaatctttctgctgaattcaacgtttggattgatcctgacgcagcgaattacatattccgtgatcccgatgtaaaggacaaatgtatagtagttcctctaaatttaactcacaaggccatagctacttacaaggttaacgaaatgatatacaacgaaaagaataacagcaagttacgagaattgtttttggagctttttcaattttttgctcatacctacaaggatatgcaaggatttgaatcgggcccacctatacatgatccggtagctttgatgccgcttttggaattttatgggtgggatccatcgtctgcggttggatttcgctacaagagaatggacatatcctgcattgatgatgttttcaacgaaaactcagggaaaattatcattgaaaaagaatatccaaatgacagtgatgttggtacaataattggtctcgatttgaatatccagtacttttgggatcagatttttgaagcattaaatagagcagacaaaatgtcaacgattggataa

SEQ ID NO: 144171 - protein, 340 aa, Saccharomyces cerevisiae
MTVSKIPIWLDCDPGHDDAIAILLGCFHPAFNLLGISTCFGNAPPENTDYNARSLLTAMGKAQAIPVYKGAQRPWKREPHYAPDIHGISGLDGTSLLPKPTFEARTDKTYIEAIEEAILANNGEISFVSTGALTTLATVFRCKPYLKKSVKYISIMGGGLHGLGNCNPNLSAEFNVWIDPDAANYIFRDPDVKDKCIVVPLNLTHKAIATYKVNEMIYNEKNNSKLRELFLELFQFFAHTYKDMQGFESGPPIHDPVALMPLLEFYGWDPSSAVGFRYKRMDISCIDDVFNENSGKIIIEKEYPNDSDVGTIIGLDLNIQYFWDQIFEALNRADKMSTIG

SEQ ID NO: 144172 - DNA, 993 bp, Schizosaccharomyces pombe
  CDS (1)..(993)
atgactaacacaattgattcattccaaaaaggctccgcattagaaaactataacatatggatcgattgcgatcctggacatgacgatgttgtcgccttaacattggctgcttgcgctggacattgtaaaattttgggtgttagtaccgtacatggtaatacaacgctagaatttactaccaaaaatgctttagcggtaatggagcttttaaatcaagatgttgatgttcatgctggcgcagcgaagcccttgatgcgcgagtccgcgttcgctactcacatacatggtacgaatgggcttgcagggatttcattgcttcctgattatcccaaaaagaaggctactcctgatgcggtgttcgctatgtataccactatttctaattatccagagcctgtcactctcgtagctaccggtcctttgacaaacattgcattgttattggcaacgtacccaagcgttaccgacaacatagaaaggtttatatttatgggtggtagcacaggcattggaaatattacttctcaagcagaattcaacgtgtatgctgatcctgaggcagctaggctcgttttagagactaaatcacttatcggcaaactatttatggtgccgctagatgtcactcataaagtacttttagatgcaaacattattcagttactgcgtcaacatagcaacccatttagttccacactggtagaattgatgactgtctttcaacaaacttatgaaaatgtctacggaattcgaaacggtgttcccgttcatgacgtttgtgctgttgctttggcgctgtggccatctctgtggacctcgcgttctatgtatgtgactgtaagcttagattctctcactcttggtcgcactgtctgtgatgtatggtcgcaacaaaatcagtatccggctaatgttcatgttgttttggaagctgatgtttcattattttgggagacgtttattggagttatagacaggctcaattatttgtag

SEQ ID NO: 144173 - protein, 330 aa, Schizosaccharomyces pombe
MTNTIDSFQKGSALENYNIWIDCDPGHDDVVALTLAACAGHCKILGVSTVHGNTTLEFTTKNALAVMELLNQDVDVHAGAAKPLMRESAFATHIHGTNGLAGISLLPDYPKKKATPDAVFAMYTTISNYPEPVTLVATGPLTNIALLLATYPSVTDNIERFIFMGGSTGIGNITSQAEFNVYADPEAARLVLETKSLIGKLFMVPLDVTHKVLLDANIIQLLRQHSNPFSSTLVELMTVFQQTYENVYGIRNGVPVHDVCAVALALWPSLWTSRSMYVTVSLDSLTLGRTVCDVWSQQNQYPANVHVVLEADVSLFWETFIGVIDRLNYL

SEQ ID NO: 144174 - DNA, 975 bp, Oryza sativa
  CDS (1)..(975)
atggggtcgaacgagcagatccaccgggacaagctcatcatcgacacggatcccggcatcgatgatagcatgacaatccttatggcgttcagagctccaactgtggagatcatagggctcacaaccatatttggcaacaccaccacaaagaatgcgactcagaatgcgctcttgctgtgtgagagagcaggacatcctgaggttccagtagcagagggcagcgcagagcctctcaagggaggagagccacgtgttgctgactttgttcatgggtctgatggcctggggaatttgtttcttcctgcacccactagtaagaaggttgatgaaaatgctgctgagttcatggttaataaggtctctcaatttcctggagaagtttctatactcgcattgggacccctgacaaacgtggcgctggccatcaaaagggacccttcctttgcaagtaaggtgaagaaaatagttgtactgggtggtgctttctttgcggctggaaatgtcagcccagctgctgaagcaaatatatatggagatccagaagcagctgacatagtttttacctcaggagcagatgttgacgtggttggcattaacataacaactcaagtctgttttacagatgaggatctcctggagctaagaaactcaaaagggaagcatgcacagttcttatgtgacatgtgccagttctatagagactggcatgccgaatccgatggctttcatggaattttcctccatgatcctgtgagcttcactgccctagttcaccctgagtacttcacgttcaagaagggtgttgtgagagtagaaacccagggcatttgcactggtcacactttaatggaccaaggattgaaaaagtggaattcagagaatccatggtctggctacaagccaatctcagttgcatggacagttgatgtgccaaatgttctcgcattcgtgaaggaactcctcatggctccatga

SEQ ID NO: 144175 - protein, 324 aa, Oryza sativa
MGSNEQIHRDKLIIDTDPGIDDSMTILMAFRAPTVEIIGLTTIFGNTTTKNATQNALLLCERAGHPEVPVAEGSAEPLKGGEPRVADFVHGSDGLGNLFLPAPTSKKVDENAAEFMVNKVSQFPGEVSILALGPLTNVALAIKRDPSFASKVKKIVVLGGAFFAAGNVSPAAEANIYGDPEAADIVFTSGADVDVVGINITTQVCFTDEDLLELRNSKGKHAQFLCDMCQFYRDWHAESDGFHGIFLHDPVSFTALVHPEYFTFKKGVVRVETQGICTGHTLMDQGLKKWNSENPWSGYKPISVAWTVDVPNVLAFVKELLMAP

SEQ ID NO: 144176 - DNA, 1014 bp, Oryza sativa
  CDS (1)..(1014)
atggatctgcaggaggcggcgatggaagccaggaacggccatcggatcccgccgacggaggagaaggtcatcatcgacacggatccagggatcgatgacagcgtggcgatcatgatggcgttcgaagctcccggcgtgaaggtcgtcggactcaccaccatcttcggcaactgcactacctcccacgccacccgcaatgccctcatcctgtgcgacagagcaggccgtcctgaggtgccggtagcagagggcagcgctgagcctctcaagggagggaaacctcacgttgctgattttgttcatggatcggatggacttggtaacacgtcctttcctgatcctaccaccaccaacaaagttgagcagtcagctgcagagtttctggttgataaggtatcagaatctccaggagagatctctgtactcgccttgggccctctcactaatatcgcattggccatgaagaaagactcctcctttgcaagcaaggttaagaggatagttgtgctgggtggagctttctttgcagctgggaatgccaccccttcagctgaagcaaatatccatagcgacccagaagcagctgacatagttttcacttctggggcagatatctacgtagttggccttaacataacaacccaagtctacttcacagacaaggatatgttggagctaaggaactcgaaagggaagcacgcacaattcctttgtgacatctgcaagttctacagagactggcatgtccactcctacggcgtcgatgctctttttctccatgatcctgtgagtttcaccgcgctagttcaccccgagtacttcacgttcaagaagggcgtggtgagggttgagacccagggcatctgcaaggggcatacttccatggacatgggactgaagaagtggaattcagacaacccgtggactggttactctccgatctcggttgcttggactgttgatgttcctaaggttctggcatatgccaaggagctactcttcaacgcacaatga

SEQ ID NO: 144177 - protein, 337 aa, Oryza sativa
MDLQEAAMEARNGHRIPPTEEKVIIDTDPGIDDSVAIMMAFEAPGVKVVGLTTIFGNCTTSHATRNALILCDRAGRPEVPVAEGSAEPLKGGKPHVADFVHGSDGLGNTSFPDPTTTNKVEQSAAEFLVDKVSESPGEISVLALGPLTNIALAMKKDSSFASKVKRIVVLGGAFFAAGNATPSAEANIHSDPEAADIVFTSGADIYVVGLNITTQVYFTDKDMLELRNSKGKHAQFLCDICKFYRDWHVHSYGVDALFLHDPVSFTALVHPEYFTFKKGVVRVETQGICKGHTSMDMGLKKWNSDNPWTGYSPISVAWTVDVPKVLAYAKELLFNAQ

SEQ ID NO: 144178 - DNA, 1005 bp, Linum usitatissimum
  CDS (1)..(1005)
atggcgcaaaccaatggtgtagttcccgacggcctatttgcttcttctgctaagcctgggaagcttattatcgatacagaccctgggatcgatgatagcatggcaattttgatggcttttcaaactcctgaagtagaaatcttaggcttcacaacagtatttggtaatgttgccacagaagatgccactcgcaatgctttgcttctgtgtgagattgctggccgtcctgatattccggttgcagagggctctcatgaacctctaaagggagggaagccccgtgttgctgactttgtccatggctctgatggtctgggaaacacatacttgtctcccccaaacgcagagaaaagtccaaagactgctgctcaatttttagttgacaaggtgtcagagttccctggtgaagtatcggtccttgcgcttgggccattgacaaatgtggccttggcaatcaaaagggactcctcatttgcaagcaaagtaaaaaagattgtagttcttggcggagccttctttgctttgggaaatgtaaaccctgctgctgaagcaaatatctatggagatccagaagcagcagatgtcgtgtttacatctggagcagacattgttgtcgtgggaataaacattacaactcaagtaaaactaacggatgctgaccttcttgagttgaggcagtcgaaagggaagtatgctcaggtaatatgcaatatgtgcaagttctacagggattggcatgtgaagtctgatggaatccacggcatttttcttcatgatccggtgagctttgtggcggtagttcggcctgatctgttcacatataggaagggagttgtgagggtggagactcagggaatctgtgtagggcacaccctaatggaccaagggctcaaaaactggaattcaagcaacccgtggtctggatactcgccggtgtcagtagcgtggacggttgacgtggacaaagttcttgcatatgtgaagaagcagctgacaaaagcatga

SEQ ID NO: 144179 - protein, 334 aa, Linum usitatissimum
MAQTNGVVPDGLFASSAKPGKLIIDTDPGIDDSMAILMAFQTPEVEILGFTTVFGNVATEDATRNALLLCEIAGRPDIPVAEGSHEPLKGGKPRVADFVHGSDGLGNTYLSPPNAEKSPKTAAQFLVDKVSEFPGEVSVLALGPLTNVALAIKRDSSFASKVKKIVVLGGAFFALGNVNPAAEANIYGDPEAADVVFTSGADIVVVGINITTQVKLTDADLLELRQSKGKYAQVICNMCKFYRDWHVKSDGIHGIFLHDPVSFVAVVRPDLFTYRKGVVRVETQGICVGHTLMDQGLKNWNSSNPWSGYSPVSVAWTVDVDKVLAYVKKQLTKA

SEQ ID NO: 144180 - DNA, 960 bp, Helianthus annuus
  CDS (1)..(960)
atggcggaaccgaagaagataataattgacacggatcctggcatcgatgatgctatggcaatatttctggctttgaggtcacctgaagttaatgtgattgggcttacaactatttatggcaatgtttacaccactcttgccactagaaatgcattacatttgttggaggttgctggtagaacagatatccctgttgcagaaggatctcatgttagttatgtgaaagcaacgaagcttcgagttgcagactttgttcacggggtagacgggctcggaaaccagaacttcccgcagccgaagtcaaaaccaatagaaaagtcagcagcagaatatttggtggagcaagctcgtctttaccccggagaaatcactttggtcgcattgggtccccttaccaacatcgccttggccattgaactcgaccccgccttcaccaaaaacattggacagattgttcttcttggtggtgcgtttttagtaaacgggaatgtgaatccagctagcgaggctaatatttttggtgatccggaagctgcagatattgtgtttacttgcggtgctgatgtgttggctattgggctcaatgttactcatcaagttattcttacagatcatgatcgtgacatcttggcagaatcagatggaatatttgccaagtatttgagcaagatcctggaattttacttttcttatcatcgcgatgcatacaacatgaaaggtgtataccttcatgacccgacaacgattcttgcagctgtgaatccttcattaatgacatacacggaaggtgttgtcagagtccagacaactggtatcacaaggggcttatcgttgtttttcaacaaacagaaaaggtttaacgaagagactgaatggtgcaacaaaccgacagtgaaggtggcagttactgtggacgctcccgaggtagttaaattggttatggaacgtcttatgtattga

SEQ ID NO: 144181 - protein, 319 aa, Helianthus annuus
MAEPKKIIIDTDPGIDDAMAIFLALRSPEVNVIGLTTIYGNVYTTLATRNALHLLEVAGRTDIPVAEGSHVSYVKATKLRVADFVHGVDGLGNQNFPQPKSKPIEKSAAEYLVEQARLYPGEITLVALGPLTNIALAIELDPAFTKNIGQIVLLGGAFLVNGNVNPASEANIFGDPEAADIVFTCGADVLAIGLNVTHQVILTDHDRDILAESDGIFAKYLSKILEFYFSYHRDAYNMKGVYLHDPTTILAAVNPSLMTYTEGVVRVQTTGITRGLSLFFNKQKRFNEETEWCNKPTVKVAVTVDAPEVVKLVMERLMY

SEQ ID NO: 144182 - DNA, 1020 bp, Brassica napus
  CDS (1)..(1020)
atggattctactatggagttttgcaacggtgggatctcaaacggcgacgttttgggtctctcttctaagcgggagaagctcattatcgatacagacccaggcatcgatgatagcatggcgataatgatggcgtttcaaactccagagctggagatattaggactcactactgtctttggtaatgtttccacacaagatgctacccgcaacgccttactcctgtgtgagattgctggattccctgatgttcctgtggcagaaggaagctccgaacccttaaagggtgggattccacgtgttgctgattttgtgcacggtaaaaacggactaggagaggtctctgttcctcttcctagtagaaagaaatgtgagaaaagtgcagctgagtttctagttgagaaggtctctgagcatcctggtgaagtcactattctcgcccttggacctctaaccaatcttgcaatagccatcaagcgagatagttcatttgcgagtaaggtgaagaaaattgttgtactcggtggagctttctttgctttgggaaatgtcaatcctgcagctgaggccaatatatatggtgacccggaagcagctgatgttgtgttcacgtgtggtgctgatatcactgttgttgggataaacatcacaacacaacttaaactaacagacgatgacctcttagccctgcgtgactccaaggggaaacacgctaagttgttaagtgacatgtgcaagttttatagagattggcatgtcaaatctgatggtgtttatggagtgtaccttcatgacccggtcagctttgtggctgtagtacggcctgatctattcacatacaagaaaggcgttgttagggtggagactcaaggaatatgtgttggccacacactcatggatcaaggcctcaagagatggaatgggagcaatccatgggtgggatactcaccagtatcagtggcatggacggtagatgtagatggagttttggaatacatcaaaggcatgctgatgaagccataa

SEQ ID NO: 144183 - protein, 339 aa, Brassica napus
MDSTMEFCNGGISNGDVLGLSSKREKLIIDTDPGIDDSMAIMMAFQTPELEILGLTTVFGNVSTQDATRNALLLCEIAGFPDVPVAEGSSEPLKGGIPRVADFVHGKNGLGEVSVPLPSRKKCEKSAAEFLVEKVSEHPGEVTILALGPLTNLAIAIKRDSSFASKVKKIVVLGGAFFALGNVNPAAEANIYGDPEAADVVFTCGADITVVGINITTQLKLTDDDLLALRDSKGKHAKLLSDMCKFYRDWHVKSDGVYGVYLHDPVSFVAVVRPDLFTYKKGVVRVETQGICVGHTLMDQGLKRWNGSNPWVGYSPVSVAWTVDVDGVLEYIKGMLMKP

SEQ ID NO: 144184 - DNA, 1005 bp, Glycine max
  CDS (1)..(1005)
atggcctcgcttgtcaacaacgctaacggcgccgtcaatggttttcctggaatatcccagaagctcattatcgataccgaccctgggatcgatgatagcatggccattcttatggcttttcaaagtccagatgtggaggttctgggtttgacaaccatttttggtaatacaactaccgaactttcaacactcaatgctttgcttttgtgtgagatggcaggccgtgaagatattccagttgcacagggaagccatgagccattgaagggtggaaagcctcgtgttgctgattttgttcatggtaaagatggactagggaacacattcctacccccacctaaaggtgagaaaattgagaaaagtgctagtgagtttttggtagagaaagtctctgaatatcccggtgaagtatctgtgctagcacttggaccactaacaaatgttgctttggcaatcaaaagagattctgcgtttgcaagcaaagtgaagagaatagttattcttggtggtgcattctttgccttggggaatgtgaatcctgctgcagaagcaaatatccatggagacccggaagccgcagatattgtgtttacctctggggcagatattgttgttattggaataaacattacaacccaagtccaattcacagatgctgatctcctcgaactgaaggaatccaaaggaaagtatgctcccttcttgagtgacatatgcaaattctatagggactttcatgtaaaatctgaccgtgtccacggaattttcctccacgatcctgtaagttttgtggcagttgtgcgtccagatcttttcacatacaagaagggggtagtgagggtagaaacacaaggcatctgtgttgggcacacacttatggaccaaggattgaaaaagtggaatacgagtaacccatggacgggttattctcctgttgcagttgcttggactgtgaatgtcaagggagttcttgattatatcagggagctattgatgaaaccctga

SEQ ID NO: 144185 - protein, 334 aa, Glycine max
MASLVNNANGAVNGFPGISQKLIIDTDPGIDDSMAILMAFQSPDVEVLGLTTIFGNTTTELSTLNALLLCEMAGREDIPVAQGSHEPLKGGKPRVADFVHGKDGLGNTFLPPPKGEKIEKSASEFLVEKVSEYPGEVSVLALGPLTNVALAIKRDSAFASKVKRIVILGGAFFALGNVNPAAEANIHGDPEAADIVFTSGADIVVIGINITTQVQFTDADLLELKESKGKYAPFLSDICKFYRDFHVKSDRVHGIFLHDPVSFVAVVRPDLFTYKKGVVRVETQGICVGHTLMDQGLKKWNTSNPWTGYSPVAVAWTVNVKGVLDYIRELLMKP

SEQ ID NO: 144186 - DNA, 972 bp, Glycine max
  CDS (1)..(972)
atggcagccgaaacggaaccaaagaagatcataattgataccgaccctggcatcgatgatgctatggcaatattccttgctctacaatcacccgaggttgaagttattggactcacaaccatctttggaaatgtgtacaccactctggcaaccagaaatgccttgcatttgttggaggttgctgggagaacggatataccggtggcagaaggatctcatgtaacttcaactaatggaacaaaactccgtgttgcagattttgtccatggtgtagatggacttggcaaccagaattttcctccaccaaaggggaagcccattgaagaatcagctgcttcttttttggttcatcaagcaaaagttaaccctggcaaagtcactgtggtcgcattgggcccgcttacaaatattgccttggctatacagctggatccggaatttgctaagaacattgggcagattctgattcttggtggtgcttttgcagtaaatggcaatgtgaatccagctgctgaagccaatatatttggtgatccagaggctgcagatgttgtatttacaagtggggcagatgtacttgcagtggggataaatgttacccaccaagttgtactgactgaatctgatcgagaaaaattggcaagctcaaatggaaaatttgtgcaatacttgaacaaaatcttggatgtatatttctcttaccatcgggaggcatacaatgtcaaaggggtttaccttcatgacccaactgtggttcttgcagctgttgatccttcacttgtaacttgcatagagggtattgtcagagtccaaacgagtggcattacaaggggaatcacaatactctacaacaaacaaaaaaggtttgctgaaatcaatgaatggtccaataagccaaccgtaaaggtagctgtgacagttgatgctcctagagttatgaaattggtaatggatcgtcttgtggactcttga

SEQ ID NO: 144187 - protein, 323 aa, Glycine max
MAAETEPKKIIIDTDPGIDDAMAIFLALQSPEVEVIGLTTIFGNVYTTLATRNALHLLEVAGRTDIPVAEGSHVTSTNGTKLRVADFVHGVDGLGNQNFPPPKGKPIEESAASFLVHQAKVNPGKVTVVALGPLTNIALAIQLDPEFAKNIGQILILGGAFAVNGNVNPAAEANIFGDPEAADVVFTSGADVLAVGINVTHQVVLTESDREKLASSNGKFVQYLNKILDVYFSYHREAYNVKGVYLHDPTVVLAAVDPSLVTCIEGIVRVQTSGITRGITILYNKQKRFAEINEWSNKPTVKVAVTVDAPRVMKLVMDRLVDS

SEQ ID NO: 144188 - DNA, 1005 bp, Glycine max
  CDS (1)..(1005)
atggcctcgcttgtcaacaacgctaacggcgccgtcaatggttttcctggaatatcccagaagctcattatcgataccgaccctgggatcgatgatagcatggccattcttatggcttttcaaagtccagatgtggaggttctgggtttgacaaccatttttggtaatacaactaccgaactttcaacactcaatgctttgcttttgtgtgagatggcaggccgtgaagatattccagttgcacagggaagccatgagccattgaagggtggaaagcctcgtgttgctgattttgttcatggtaaagatggactagggaacacattcctacccccacctaaaggtgagaaaattgagaaaagtgctagtgagtttttggtagagaaagtctctgaatatcctggtgaagtatctgtgctagcacttggaccactaacaaatttggctttggcaatcaaaagggattcttcctttgcaagcaaagtgaagagaatagttatacttggtggtgcattctttgccttggggaatgtgaatcctgctgcagaagccaatatccatggagacccggaagccgcagatattgtgtttacctctggggcagatattgttgttattggaataaacattacaacccaagtccaattcacagatgctgatctcctcgaactgaaggaatctaaaggaaagtatgctcccttcttgagtgacatatgcaaattctatagggactttcatgtaaaatctgatggtgtccacggaattttcctccacgatcctgtaagttttgtggcagttgtgcgtccagatcttttcacatacaagaagggggtagtgagggtagaaacacaaggcatctgtgttgggcatacacttatggaccaaggattgaaaaactggaatacgagcaacccatggacgggttattctcctgttgcagttgcttggacagtgaatctcgaggaagttcttgattatatcagggagctggtgatgaaaccctga

SEQ ID NO: 144189 - protein, 334 aa, Glycine max
MASLVNNANGAVNGFPGISQKLIIDTDPGIDDSMAILMAFQSPDVEVLGLTTIFGNTTTELSTLNALLLCEMAGREDIPVAQGSHEPLKGGKPRVADFVHGKDGLGNTFLPPPKGEKIEKSASEFLVEKVSEYPGEVSVLALGPLTNLALAIKRDSSFASKVKRIVILGGAFFALGNVNPAAEANIHGDPEAADIVFTSGADIVVIGINITTQVQFTDADLLELKESKGKYAPFLSDICKFYRDFHVKSDGVHGIFLHDPVSFVAVVRPDLFTYKKGVVRVETQGICVGHTLMDQGLKNWNTSNPWTGYSPVAVAWTVNLEEVLDYIRELVMKP

SEQ ID NO: 144190 - DNA, 981 bp, Zea mays
  CDS (1)..(981)
atggcggcggtcgaggggacgacgaagaagaaggtaatcatcgacaccgaccccggaattgacgacgcgatggccatcttcgtggcactgcggtcgccggagctggaggtgctgggcctcaccactaccttcggcaacgtccacaccgccctcgccacgcgcaatgcgctccacctgttggaggctgttggaaggactgacatccccgtcgcagagggatcccatgtaacaatcaagaaagccaccaagctgaggatcgcaagctttgtccacggttctgacggcctgggaaaccaggatttccctccaccggctaccaagcctatagatcagtcggctgctgccttcctagttgagcaagcaaatctgtaccctggacaagttaccattgtcgccctcggtccactaaccaaccttgctctggcagtggagcttgacccttcgttcccgaagaagatagggcagattattattcttggaggtgcgtattcagttaatggaaatgtgaaccctgcagctgaggcaaatatctttggggatcctgatgcggcagatattgtgttcacctgcggtgctgatattttggccgtgggactaaatgtaacccaccaagtagttctaaccgatgctgacagggagaagcttgaacagtgtgatagcaaatatgcccgctacttatgcaagataatgggcatttattttgattaccacaaggatgcctacttcattaaaggagtgtatcttcatgatccaacaacggttattgctgctgtgaatccatcgctgctgacttacacagaaggtgttgtgagggtacagacggttggaatcacaaagggccttactgtttttgataacaccaagaaaaggtacggagagatcacagcctggagtggcatgcccaccgtgaaggttgctgtcaccgtcgatgcccctgccgtggtagagctgatgatgcagaggttgatgactgatgactag

SEQ ID NO: 144191 - protein, 326 aa, Zea mays
MAAVEGTTKKKVIIDTDPGIDDAMAIFVALRSPELEVLGLTTTFGNVHTALATRNALHLLEAVGRTDIPVAEGSHVTIKKATKLRIASFVHGSDGLGNQDFPPPATKPIDQSAAAFLVEQANLYPGQVTIVALGPLTNLALAVELDPSFPKKIGQIIILGGAYSVNGNVNPAAEANIFGDPDAADIVFTCGADILAVGLNVTHQVVLTDADREKLEQCDSKYARYLCKIMGIYFDYHKDAYFIKGVYLHDPTTVIAAVNPSLLTYTEGVVRVQTVGITKGLTVFDNTKKRYGEITAWSGMPTVKVAVTVDAPAVVELMMQRLMTDD

SEQ ID NO: 144192 - DNA, 948 bp, Zea mays
  CDS (1)..(948)
atgaagatcatcattgacacggatcccggcatcgatgacagcgtggccatcctgatggcattccagatgccgggcgtccaggtcctagggctcaccaccatcttcggaaactgcaccacagagcatgccacacgcaacgccttgatcctgtgcgagaaggcaagccatctagaggtcccagtagctgagggcagccatgagcctctcaagggaggaaagccgcacgttgctgacttcgttcatggacctgatggcctcgggaacgtagatcttcctgatcccactatcaagaaagtggaggaaagtgctaccgacttcttggttgataaggtctcgcgatttcctggagaggtctctgtgctcgccttgggtcctctgacaaacatagcattggccatcaagaaggatccctcattcgtgaaaaacgttaagaagatcgttgtgctgggtggagcgttctttgcggctggaaatgccactccttccgctgaagcaaatatccacagtgatccggaggcagccgacatggttttcacttctggggcggacatctacgtcgttggcctcaacatcacaacgcaagtcagcttcacagataaggatctcctggagctaagaaactcgcaagggaagtacgcacagttcctatgtgatgtatgcaagttctacttggactggcacaccgagtcttatggtgctcctgtgattttcctccacgatccggtcagctttgccgcgctagttcgtccggagctgttcacgttcaagaagggcgtggtgagggtggagacgcagggcatctgcgtcgggcatacttccatggacatgttgctgaagaagtggaactcagagaacccgtggactggctactcaccgatttcggtcgcatggacggtcgatgtgcccaaggtggtcgcgtttgtgaaggagctcgtcaccaagccgtga

SEQ ID NO: 144193 - protein, 315 aa, Zea mays
MKIIIDTDPGIDDSVAILMAFQMPGVQVLGLTTIFGNCTTEHATRNALILCEKASHLEVPVAEGSHEPLKGGKPHVADFVHGPDGLGNVDLPDPTIKKVEESATDFLVDKVSRFPGEVSVLALGPLTNIALAIKKDPSFVKNVKKIVVLGGAFFAAGNATPSAEANIHSDPEAADMVFTSGADIYVVGLNITTQVSFTDKDLLELRNSQGKYAQFLCDVCKFYLDWHTESYGAPVIFLHDPVSFAALVRPELFTFKKGVVRVETQGICVGHTSMDMLLKKWNSENPWTGYSPISVAWTVDVPKVVAFVKELVTKP

SEQ ID NO: 144194 - DNA, 978 bp, Zea mays
  CDS (1)..(978)
atggctgcggtcgaggggacgaagaagaaggtaatcatcgacaccgaccccggaattgatgacgcgatggccatcttcttggcgctgcggtcgccggagctggaggtgctgggcctcaccactaccttcggcaacgtccacaccgccctcgccacgcgcaacgcgctccacctgctggaggctgttggcaggactgacatccccgtggcagagggatcccatgtaacgatcaagaaagccaccaagctgaggatcgcaagcttcgtccacggttcagacggcctgggaaaccaggacttccctccaccagctaccaagcctgtagatcagtctgctgctgccttcctggttgagcaggcaaatctgtaccctggtcaagttagcgttgtcgccctcggcccacttaccaaccttgctctggcagtcgagcttgaccctgcgttcccggagaagatagggcagattattattcttggcggtgcgtattcagttaatggaaacgtgaaccctgcagctgaggcgaatatctttggggatcccgacgctgcagatatcgtgttcacctgcggcgctgatattttggccgtgggactaaatgtaacccaccaagtggttctaaccgatgctgaccgggaaaagcttgagcagtgtgacagcaaatacgcccgctacttgtgcaagctaatgggcgtttattttgattaccacagggacgcttacttcataaaaggagcgtatcttcacgatccaacgacggttattgctgcggtgaacccatcgctgctgacttacacagaaggcgttgtgagggtacagacagtcgggatcaccaagggccttactgttttcgacaacaccaagaaaaggtacggagagatcacagcctggagtggcatgcccaccgtgaaggtcgctgtcaccgtcgatgcccctgccgtggtagagctgatagtgcagaggctgatgaccgatgactag

SEQ ID NO: 144195 - protein, 325 aa, Zea mays
MAAVEGTKKKVIIDTDPGIDDAMAIFLALRSPELEVLGLTTTFGNVHTALATRNALHLLEAVGRTDIPVAEGSHVTIKKATKLRIASFVHGSDGLGNQDFPPPATKPVDQSAAAFLVEQANLYPGQVSVVALGPLTNLALAVELDPAFPEKIGQIIILGGAYSVNGNVNPAAEANIFGDPDAADIVFTCGADILAVGLNVTHQVVLTDADREKLEQCDSKYARYLCKLMGVYFDYHRDAYFIKGAYLHDPTTVIAAVNPSLLTYTEGVVRVQTVGITKGLTVFDNTKKRYGEITAWSGMPTVKVAVTVDAPAVVELIVQRLMTDD

SEQ ID NO: 144196 - DNA, 978 bp, Zea mays
  CDS (1)..(978)
atggctgcggtcgaggggacgaagaagaaggtaatcatcgacaccgaccccggaattgatgacgcgatggccatcttcttggcgctgcggtcgccggagctggaggtgctgggcctcaccactaccttcggcaacgtccacaccgccctcgccacgcgcaacgcgctccacctgctggaggctgttggcaggactgacatccccgtggcagagggatcccatgtaacgatcaagaaagccaccaagctgaggatcgcaagcttcgtccacggttcagacggcctgggaaaccaggacttccctccaccagctaccaagcctgtagatcagtctgctgctgccttcctggttgagcaggcaaatctgtaccctggtcaagttagcgttgtcgccctcggcccacttaccaaccttgctctggcagtcgagcttgaccctgcgttcccggagaagatagggcagattattattcttggcggtgcgtattcagttaatggaaacgtgaaccctgcagctgaggcgaatatctttggggatcccgacgctgcagatatcgtgttcacctgcggcgctgatattttggccgtgggactaaatgtaacccaccaagtggttctaaccgatgctgaccgggaaaagcttgagcagtgtgacagcaaatacgcccgctacttgtgcaagctaatgggcgtttattttgattaccacagggacggttacttcataaaaggagcgtatcttcacgatccaacgacggttattgctgcggtgaacccatcgctgctgacttacacagaaggcgttgtgagggtacagacagtcgggatcaccaagggccttactgttttcgacaacaccaagaaaaggtacggagagatcacagcctggagtggcatgcccaccgtgaaggtcgctgtcaccgtcgatgcccctgccgtggtagagctgatagtgcagaggctgatgaccgatgactag

SEQ ID NO: 144197 - protein, 325 aa, Zea mays
MAAVEGTKKKVIIDTDPGIDDAMAIFLALRSPELEVLGLTTTFGNVHTALATRNALHLLEAVGRTDIPVAEGSHVTIKKATKLRIASFVHGSDGLGNQDFPPPATKPVDQSAAAFLVEQANLYPGQVSVVALGPLTNLALAVELDPAFPEKIGQIIILGGAYSVNGNVNPAAEANIFGDPDAADIVFTCGADILAVGLNVTHQVVLTDADREKLEQCDSKYARYLCKLMGVYFDYHRDGYFIKGAYLHDPTTVIAAVNPSLLTYTEGVVRVQTVGITKGLTVFDNTKKRYGEITAWSGMPTVKVAVTVDAPAVVELIVQRLMTDD

SEQ ID NO: 144198 - DNA, 978 bp, Zea mays
  CDS (1)..(978)
atggagcgggacggccagcagacccgccgcgacaagctcatcatcgatacggatcccggcatcgatgatagcatggctatcctaatggcgttcagagcacatactctggaaatcattgggctcacgaccatattcggcaacgtcgacacagaaggcgcaacatgtaatgcactattgctgtgtgagagagcaggacatcctgaggttccagtagcagagggcagccacgagcccctaaagggaggaaagccccgtattgctgattttgttcatgggtcagatggcattgggaatctgtttcttcctgcaccctctgctaagaaggttgaggaaagtgctgctgatttcatggttaataaggtctctgagtttccaggagaggtctctgtgcttgctttgggacccctgacaaatgtagcattggccatcaaacgagacccttcctttgcaagcaaggtgaataaaatagttgtactgggtggagctttcttcgtggctggaaatgtcaaccctgctgctgaagcaaatattcttggagacccagaagcagctgacatagtttttacttcaggagcagatgtcattgtggttggcattaacataacaacacaagtctgtttgacagatgagggtctcttggagctaagaaactcaaaagggaagcatgcaccgttcttatctgagacgtgcaagttctacagagattggcatgtcaagtctgatggcttccatggaattttccttcatgatcctgtgagcttcactgccgtgcttcatcccgagtacttcacattcaagaagggtgtggtgagagtggagacccagggcatttgcactggccacactttgatggatcagggattgaaaaagtggaattcagagaacccttggtcagggtataaaccgatttcagttgcatggacggttgatgtgccaaaggttattggctttgtaaagaagctgctcatggcaccatga

SEQ ID NO: 144199 - protein, 325 aa, Zea mays
MERDGQQTRRDKLIIDTDPGIDDSMAILMAFRAHTLEIIGLTTIFGNVDTEGATCNALLLCERAGHPEVPVAEGSHEPLKGGKPRIADFVHGSDGIGNLFLPAPSAKKVEESAADFMVNKVSEFPGEVSVLALGPLTNVALAIKRDPSFASKVNKIVVLGGAFFVAGNVNPAAEANILGDPEAADIVFTSGADVIVVGINITTQVCLTDEGLLELRNSKGKHAPFLSETCKFYRDWHVKSDGFHGIFLHDPVSFTAVLHPEYFTFKKGVVRVETQGICTGHTLMDQGLKKWNSENPWSGYKPISVAWTVDVPKVIGFVKKLLMAP

SEQ ID NO: 144200 - DNA, 978 bp, Zea mays
  CDS (1)..(978)
atggggcaggacggccagcagatccgccgcgacaagctcatcatcgacacggatcccggcatcgatgatagcatgacgatcctaatggcgttcagagcacctagtgtggaaatcattgggctcacgaccatattcggcaacgtcgacacaaagggcgcaacacgtaacgcgctattgctgtgtgagagagcaggatgccctgaagttccagtagcagagggcagccatgagcccctaaagggaggaaagccccgtgttgctgatttcgttcatgggtcagatggcattgggaatctgtttcttcctgcaccctctgctaagaaggttgaggaaagtgctgctgatttcctgattaataaggtctctgagtttccaggagaggtctctgtgcttgcgttgggacccctgacaaatgtagcattggccatcaaaagagacccttcctttgcaagcaaggttaagaaaatagttgtactgggtggagctttctttgcggctggaaatgtcaaccctgctgctgaagcaaatatccatggagacccagaagcagctgacatagtttttacttcaggagcagatatcgttgtggttggcattaacataacaacacaagtctgcctgacagatgaggatctcttggagctaagaaactcgaaagggaagcatgcagcgttcttatatgagatgtgcaagttctacagagattggcatgccaagtctgatggttttcatggaattttccttcatgatcctgtgagcttcactgccgtacttcatccagagtacttcacattcaagaagggtgtggtgagagtagagacccagggcatttgcactggccacactttgatggatcagggattgaaaaagtggaattcagagaacccatggtcagggtataaaccgatttcagttgcatggacggttgatgtgccaaaggtcatcagctttataaagaagctgctcatggcaccatga

SEQ ID NO: 144201 - protein, 325 aa, Zea mays
MGQDGQQIRRDKLIIDTDPGIDDSMTILMAFRAPSVEIIGLTTIFGNVDTKGATRNALLLCERAGCPEVPVAEGSHEPLKGGKPRVADFVHGSDGIGNLFLPAPSAKKVEESAADFLINKVSEFPGEVSVLALGPLTNVALAIKRDPSFASKVKKIVVLGGAFFAAGNVNPAAEANIHGDPEAADIVFTSGADIVVVGINITTQVCLTDEDLLELRNSKGKHAAFLYEMCKFYRDWHAKSDGFHGIFLHDPVSFTAVLHPEYFTFKKGVVRVETQGICTGHTLMDQGLKKWNSENPWSGYKPISVAWTVDVPKVISFIKKLLMAP

SEQ ID NO: 144202 - DNA, 24 bp, Artificial sequence
  primer
atggcactgccaattctgttagat

SEQ ID NO: 144203 - DNA, 24 bp, Artificial sequence
  primer
ttaagcgtaaaatttcagacgatc

SEQ ID NO: 144204 - protein, 395 aa, Artificial sequence
  consensus sequence
  Variant (2)..(2): Xaa in position 2 is any amino acid
  Variant (4)..(4): Xaa in position 4 is any amino acid
  Variant (6)..(6): Xaa in position 6 is any amino acid
  Variant (9)..(10): Xaa in position 9 to 10 is any amino acid
  Variant (12)..(14): Xaa in position 12 to 14 is any amino acid
  Variant (16)..(28): Xaa in position 16 to 28 is any amino acid
  Variant (29)..(38): Xaa in position 29 to 38 is any or no amino acid
  Variant (41)..(48): Xaa in position 41 to 48 is any amino acid
  Variant (50)..(61): Xaa in position 50 to 61 is any amino acid
  Variant (62)..(80): Xaa in position 62 to 80 is any or no amino acid
  Variant (83)..(84): Xaa in position 83 to 84 is any amino acid
  Variant (86)..(99): Xaa in position 86 to 99 is any amino acid
  Variant (100)..(105): Xaa in position 100 to 105 is any or no amino acid
  Variant (108)..(108): Xaa in position 108 is any amino acid
  Variant (109)..(109): Xaa in position 109 is any or no amino acid
  Variant (111)..(126): Xaa in position 111 to 126 is any amino acid
  Variant (127)..(141): Xaa in position 127 to 141 is any or no amino acid
  Variant (143)..(161): Xaa in position 143 to 161 is any amino acid
  Variant (162)..(165): Xaa in position 162 to 165 is any or no amino acid
  Variant (171)..(171): Xaa in position 171 is any amino acid
  Variant (173)..(178): Xaa in position 173 to 178 is any amino acid
  Variant (179)..(179): Xaa in position 179 is any or no amino acid
  Variant (181)..(191): Xaa in position 181 to 191 is any amino acid
  Variant (192)..(192): Xaa in position 192 is any or no amino acid
  Variant (195)..(197): Xaa in position 195 to 197 is any amino acid
  Variant (198)..(215): Xaa in position 198 to 215 is any or no amino acid
  Variant (218)..(221): Xaa in position 218 to 221 is any amino acid
  Variant (222)..(229): Xaa in position 222 to 229 is any or no amino acid
  Variant (232)..(232): Xaa in position 232 is any amino acid
  Variant (234)..(236): Xaa in position 234 to 236 is any amino acid
  Variant (239)..(239): Xaa in position 239 is any amino acid
  Variant (242)..(243): Xaa in position 242 to 243 is any amino acid
  Variant (245)..(298): Xaa in position 245 to 298 is any amino acid
  Variant (299)..(337): Xaa in position 299 to 337 is any or no amino acid
  Variant (340)..(348): Xaa in position 340 to 348 is any amino acid
  Variant (350)..(368): Xaa in position 350 to 368 is any amino acid
  Variant (369)..(389): Xaa in position 369 to 389 is any or no amino acid
  Variant (391)..(393): Xaa in position 391 to 393 is any amino acid
  Variant (394)..(394): Xaa in position 394 is any or no amino acid
DXDXGXDDXXAXXXAXXXXXXXXXXXXXXXXXXXXXXXGNXXXXXXXXNXXXXXXXXXXXXXXXXXXXXXXXXXXXXXXXPVXXGXXXXXXXXXXXXXXXXXXXXHGXXGXXXXXXXXXXXXXXXXXXXXXXXXXXXXXXXAXXXXXXXXXXXXXXXXXXXXXXXGPLTNXAXXXXXXXPXXXXXXXXXXXXGGXXXXXXXXXXXXXXXXXXXXXGNXXXXXXXXXXXXAEXNXXXDPXAAXXVXXXXXXXXXXXXXXXXXXXXXXXXXXXXXXXXXXXXXXXXXXXXXXXXXXXXXXXXXXXXXXXXXXXXXXXXXXXXXXXXXXXXXXXXXXXXXHDXXXXXXXXXPXXXXXXXXXXXXXXXXXXXXXXXXXXXXXXXXXXXXXXXXGXXXXD

SEQ ID NO: 144205 - protein, 21 aa, Artificial sequence
  protein pattern
  Variant (3)..(3): Xaa in position 3 is any amino acid
  Variant (4)..(4): Xaa in position 4 is Asn, Ser or Thr
  Variant (5)..(6): Xaa in position 5 to 6 is any amino acid
  Variant (9)..(9): Xaa in position 9 is any amino acid
  Variant (11)..(13): Xaa in position 11 to 13 is any amino acid
  Variant (16)..(16): Xaa in position 16 is any amino acid
  Variant (17)..(17): Xaa in position 17 is any or no amino acid
  Variant (19)..(20): Xaa in position 19 to 20 is any amino acid
  Variant (21)..(21): Xaa in position 21 is Ile or Val
GNXXXXAEXNXXXDPXXAXXX

SEQ ID NO: 144206 - protein, 12 aa, Artificial sequence
  protein pattern
  Variant (2)..(2): Xaa in position 2 is any amino acid
  Variant (4)..(4): Xaa in position 4 is Ala, Pro or Thr
  Variant (6)..(6): Xaa in position 6 is any amino acid
  Variant (9)..(9): Xaa in position 9 is Ala, Ser or Val
  Variant (10)..(10): Xaa in position 10 is any amino acid
  Variant (12)..(12): Xaa in position 12 is Ile, Leu or Met
DXDXGXDDXXAX

SEQ ID NO: 144207 - DNA, 1665 bp, Escherichia coli
  CDS (1)..(1665): transl_table=11
atgtgttcaatttttggcgtattcgatatcaaaacagacgcagttgagctgcgtaagaaagccctcgagctgtcacgcctgatgcgtcatcgtggcccggactggtccggtatttatgccagcgataacgccattctcgcccacgaacgtctgtcaattgttgacgttaacgcgggggcgcaacctctctacaaccaacaaaaaacccacgtactggcggtaaacggtgaaatctacaaccaccaggcattgcgcgccgaatatggcgatcgttaccagttccagaccgggtctgactgtgaagtgatcctcgcgctgtatcaggaaaaagggccggaatttctcgacgacttgcagggcatgtttgcctttgcactgtacgacagcgaaaaagatgcctacctgattggtcgcgaccatctggggatcatcccactgtatatggggtatgacgaacacggtcagctgtatgtggcctcagaaatgaaagcgctggtgccagtttgccgcacgattaaagagttcccggcggggagctatttgtggagccaggacggcgaaatccgttcttactatcatcgcgactggttcgactacgatgcggtgaaagataacgtgaccgacaaaaacgagctgcgtcaggcactggaagattcagttaaaagccatctgatgtctgatgtgccttacggtgtgctgctttctggtggtctggattcctcaattatttccgctatcaccaagaaatacgcagcccgtcgcgtggaagatcaggaacgctctgaagcctggtggccgcagttacactcctttgctgtaggtctgccgggttcaccggatctgaaagcagcccaggaagtggcaaaccatctgggcacggtgcatcacgaaattcacttcactgtacaggaaggtctggatgccatccgcgacgtgatttaccacatcgaaacttatgatgtgaccactattcgcgcttcaacaccgatgtatttaatgtcgcgtaagatcaaggcgatgggcattaaaatggtgctgtccggtgaaggttctgatgaagtgttcggcggttatctttacttccacaaagcaccgaatgccaaagaactgcatgaagagacggtgcgtaaactgctggccctgcatatgtatgactgcgcgcgtgccaacaaagcgatgtcagcctggggcgtggaagcacgcgttccgttcctcgacaaaaaattccttgatgtggcgatgcgtattaacccacaggataaaatgtgcggtaacggcaaaatggaaaaacacatcctgcgtgaatgttttgaagcgtatctgcctgcaagcgtggcctggcggcagaaagagcagttctccgatggcgtcggttacagttggatcgacaccctgaaagaagtggctgcgcagcaggtttctgatcagcaactggaaactgcccgcttccgcttcccgtacaacacgccaacctctaaagaagcgtacttgtatcgggagatctttgaagaactattcccgcttccgagcgccgctgagtgcgtgccgggcggtccttccgtcgcttgttcttccgctaaagcgatcgaatgggatgaagcgttcaagaaaatggacgatccgtctggtcgcgcggttggtgttcaccagtcggcgtataagtaa

SEQ ID NO: 144208 - protein, 554 aa, Escherichia coli
MCSIFGVFDIKTDAVELRKKALELSRLMRHRGPDWSGIYASDNAILAHERLSIVDVNAGAQPLYNQQKTHVLAVNGEIYNHQALRAEYGDRYQFQTGSDCEVILALYQEKGPEFLDDLQGMFAFALYDSEKDAYLIGRDHLGIIPLYMGYDEHGQLYVASEMKALVPVCRTIKEFPAGSYLWSQDGEIRSYYHRDWFDYDAVKDNVTDKNELRQALEDSVKSHLMSDVPYGVLLSGGLDSSIISAITKKYAARRVEDQERSEAWWPQLHSFAVGLPGSPDLKAAQEVANHLGTVHHEIHFTVQEGLDAIRDVIYHIETYDVTTIRASTPMYLMSRKIKAMGIKMVLSGEGSDEVFGGYLYFHKAPNAKELHEETVRKLLALHMYDCARANKAMSAWGVEARVPFLDKKFLDVAMRINPQDKMCGNGKMEKHILRECFEAYLPASVAWRQKEQFSDGVGYSWIDTLKEVAAQQVSDQQLETARFRFPYNTPTSKEAYLYREIFEELFPLPSAAECVPGGPSVACSSAKAIEWDEAFKKMDDPSGRAVGVHQSAYK

SEQ ID NO: 144209 - DNA, 2164 bp, Arabidopsis thaliana
  CDS (196)..(1950)
  misc_feature (1598)..(1598): v is a, g or c
atcaaaaacacgaatatcgatagtacacttctacgtgcaattttctcctttctcttcctggacatctgtctgtttattacattttcttgtaatctttcttttggggatttgaaatatctatcccctaaagtttcggaaaattctgtttttctgttctcattcttcgtgatctttttcactttcttctaaaaaaacatgtgtggaatacttgccgtgttaggatgttccgatgattctcaggccaagagagttcgtgttctcgagctttctcgcagattgaggcacagaggacctgactggagtggattatatcagaacggagataattacttggcccatcaacgtcttgccgtcatcgatcctgcttccggtgatcaacctcttttcaacgaggacaagaccattgttgtcacggtgaacggagagatttataaccatgaggagctgagaaaacgtctgaagaatcacaagttccgtactggtagtgattgtgaagtcattgctcacttgtacgaggagtatggtgtggattttgttgatatgttggatggaatcttctcctttgtgttgctcgacacacgagataactccttcatggtggctcgtgatgcgattggtgtcacttcgctctacattggttggggactagacggatctgtgtggatatcttcagagatgaaaggcttaaacgatgattgtgagcatttcgaaacgtttcctccaggtcatttttattcaagcaagttaggagggtttaagcaatggtataatcctccttggttcaatgaatctgttccttcaacgccttatgagcctcttgcgataagacgcgcctttgaaaacgctgtgattaagcggttgatgactgatgttccatttggagttttgctctctggtggtcttgattcttcccttgttgcctccatcactgcacgtcacttggccggtactaaggcggctaagcaatggggtcctcagctccattccttttgcgttggtcttgagggctcaccggacttgaaggcagggaaagaggtggcggaatatttggggacggtgcaccacgagttccacttctcggtgcaggacgggattgatgcgattgaggatgtgatttaccatgttgagacctatgatgtgacgactatcagagcgagcacaccgatgttcttgatgtcccggaaaatcaagtctctaggggtcaagatggttctctccggcgaaggtgcggacgagatctttggagggtacctctatttccacaaggcacctaacaagaaagagtttcaccaagaaacttgtcgcaagatcaaggctcttcacaagtatgactgtctaagagccaacaaatctacctctgcctttggactagaggcacgtgttcctttccttgacaaagacttcatcaacacagctatgtctctcgaccctgaatccaagatgatcaagccagaggaaggaaggatcgagaaatgggttctaaggagagcctttgacgacgaagaacgtccttatctaccaaaacacattctctacagacagaaagaacagttcagtgatggtgttggctacagttggatcgatggcctgaaagatcvcgctgctcaaaatgtcaatgacaagatgatgtcgaacgcggggcatatcttccctcacaacactccaaacactaaagaagcttactactacagaatgatctttgaaaggttcttcccgcagaactctgcgagactaacggttcctggaggtgccaccgtggcttgttcgactgcaaaggcagtggagtgggatgcaagctggtccaacaatatggatccatcaggaagagccgctatcggagttcacctttcggcctacgatggcaagaacgtggcattgaccataccaccacttaaggcaattgacaacatgccgatgatgatgggtcaaggagttgtgattcagtcataacttcgaaggagaaatggatgaaatatgtgttatatcttcccaatgggtgaagtgttttgtatgattttaataataagaatgtgatcctttttttttcctatgaagatctgaatgtattatctatcttgtaaaaatttgtttctttgtaagatttgaatgtaccgcttttacgtagatcgatgtacatcaatcttataagtttcaattatgtatc

SEQ ID NO: 144210 - protein, 584 aa, Arabidopsis thaliana
  misc_feature (468)..(468): The Xaa at location 468 stands for Arg, His, or Pro.
MCGILAVLGCSDDSQAKRVRVLELSRRLRHRGPDWSGLYQNGDNYLAHQRLAVIDPASGDQPLFNEDKTIVVTVNGEIYNHEELRKRLKNHKFRTGSDCEVIAHLYEEYGVDFVDMLDGIFSFVLLDTRDNSFMVARDAIGVTSLYIGWGLDGSVWISSEMKGLNDDCEHFETFPPGHFYSSKLGGFKQWYNPPWFNESVPSTPYEPLAIRRAFENAVIKRLMTDVPFGVLLSGGLDSSLVASITARHLAGTKAAKQWGPQLHSFCVGLEGSPDLKAGKEVAEYLGTVHHEFHFSVQDGIDAIEDVIYHVETYDVTTIRASTPMFLMSRKIKSLGVKMVLSGEGADEIFGGYLYFHKAPNKKEFHQETCRKIKALHKYDCLRANKSTSAFGLEARVPFLDKDFINTAMSLDPESKMIKPEEGRIEKWVLRRAFDDEERPYLPKHILYRQKEQFSDGVGYSWIDGLKDXAAQNVNDKMMSNAGHIFPHNTPNTKEAYYYRMIFERFFPQNSARLTVPGGATVACSTAKAVEWDASWSNNMDPSGRAAIGVHLSAYDGKNVALTIPPLKAIDNMPMMMGQGVVIQS

SEQ ID NO: 144211 - DNA, 2183 bp, Glycine max
  CDS (111)..(1958)
tacggctgcctcttcacctctgtggcggcctgagagccaataaatccaccgtaccacccgctctgcgggcaaccctcgcactcttggactaacaagtcatcaatctagccatgcgtgtagatccggaggggaaatcgctaaggcctgagcctatggcattggctccaccctctgtttttgctctgtatattgttattgacctgaagattgagatctatatgactatacattttttatttgcagccgccatgtgcggaatcctcgcagtgttgggttgcgtcgacaactctcagaccaagcgcgctcgcatcatcgaattgtctcgcaggttgcggcatagaggtcctgattggagtggcatacattgctatgaggattgttaccttgctcatcaacgccttgctattgttgaccctacttcgggggatcaacctttgtacaacgaagacaaaactgttattgtcactgtaaatggggagatatacaatcacaagcaattgaggcagaaactgagttcccatcaatttcgaactggtagtgattgtgaagtgattgcccatctttatgaagaacatggagaagaatttgttaatatgctggatgggatgtttgcctttattcttcttgatactagggataaaagttttattgctgctcgtgatgctattggcattacccctctatacttgggctggggtcatgatggatcaacatggtttgcatctgaaatgaaagctctgagtgatgattgtgagagattcatatcttttcctccagggcatatctattccagcaaacagggaggattaagaaggtggtacaatccaccatggttttcagaggatattccatcaactccctatgatccaacccttttgcgtgagaccttcgagagggctgtagttaagagaatgatgactgatgtaccttttggagttcttttgtctggaggattggactcatcacttgttgctgcagtggtcaatcgttatttggctgaatctgaatctgctcgtcaatggggatcacagttacatactttctgcattggtttaaagggctctcctgacttgaaagctgcaaaagaggtagcagattaccttggtactcgtcaccatgaactttatttcacggttcaggaaggtatagatgcacttgaagaagtcatttaccatattgaaacatatgatgtaacgactatcagagcaagtactgcaatgtttcttatgtccagaaaaattaaagccttgggagtgaaaatggtactttctggagaaggttcagatgaaatatttggaggttacctgtattttcacaaggcacctaacaagaaagagtttcatgaagaaacatgtcgaaaaattaaagctcttcatctttatgactgcctgagagccaataaatcaactgcagcatggggtgtagaggcacgtgtaccattcttggataaagaatttatcaacgtagccatgagtatagatccggaatggaaaatgataaggcctgatcttggaaggatagagaagtgggtattacgcaatgcatttgatgacgataagaatccatatttaccaaagcacatattgtacaggcagaaggaacaattcagtgatggggttggttacagctggattgatggcttgaaggatcacgcaaacaaacaagtcacagatgcgacgatgatggctgccaattttatttaccctgaaaacactcctaccacaaaagaaggatacctctacaggacaatttttgagaagttctttccaaagaatgcagcaaaggcaacagtgccaggaggtcctagtgtggcatgcagtactgcaaaagctgtggaatgggatgcagcatggtcaaaaaatcttgatccttctggtcgtgccgcacttggtattcatgatgctgcatatgatgcagtggataccaaaattgacgagcccaaaaatggaaccctttaaggcccataatcgattgtcaagagaaaaaaatgtatgcaacaactgtctagtggggatttaaacttcaagtagacaaaactaatgagaagtgggattgtttttattttcaggtcaaattaatatgtaggttttgaactgtttgtgggttattttaaataaattatatttaaattttgtaattaagtcattaaatttttaaatcattagttggaccttttgatcccc

SEQ ID NO: 144212 - protein, 615 aa, Glycine max
MRVDPEGKSLRPEPMALAPPSVFALYIVIDLKIEIYMTIHFLFAAAMCGILAVLGCVDNSQTKRARIIELSRRLRHRGPDWSGIHCYEDCYLAHQRLAIVDPTSGDQPLYNEDKTVIVTVNGEIYNHKQLRQKLSSHQFRTGSDCEVIAHLYEEHGEEFVNMLDGMFAFILLDTRDKSFIAARDAIGITPLYLGWGHDGSTWFASEMKALSDDCERFISFPPGHIYSSKQGGLRRWYNPPWFSEDIPSTPYDPTLLRETFERAVVKRMMTDVPFGVLLSGGLDSSLVAAVVNRYLAESESARQWGSQLHTFCIGLKGSPDLKAAKEVADYLGTRHHELYFTVQEGIDALEEVIYHIETYDVTTIRASTAMFLMSRKIKALGVKMVLSGEGSDEIFGGYLYFHKAPNKKEFHEETCRKIKALHLYDCLRANKSTAAWGVEARVPFLDKEFINVAMSIDPEWKMIRPDLGRIEKWVLRNAFDDDKNPYLPKHILYRQKEQFSDGVGYSWIDGLKDHANKQVTDATMMAANFIYPENTPTTKEGYLYRTIFEKFFPKNAAKATVPGGPSVACSTAKAVEWDAAWSKNLDPSGRAALGIHDAAYDAVDTKIDEPKNGTL

SEQ ID NO: 144213 - DNA, 2357 bp, Zea mays
  CDS (199)..(1974)
cctcgaggccggccgggattccctgcctaaaactcccatttcgccgtccgtgacgcgagagacctcttcgcatcccgaggcggcgcttttggggtcggaagcgacacgggcgcccggcgggtccgcgggtggtggtgctactgctagcaagcagcagcaggcgacgctaggcgagagccccagtcggagcaggccaccatgtgcggcatcctcgctgtcctcggcgtcgctgaggtctccctcgccaagcgctcccgcatcattgagctctcgcgcaggttacggcaccgagggcctgattggagtggtttgcactgtcatgaggattgttaccttgcacaccagcggttggctattatcgatcctacatctggagaccagcctttgtacaatgaggataaaacagttgttgtaacggtgaacggagagatctataaccatgaagaattgaaagctaagttgaaaactcatgagttccaaactggcagtgattgtgaagttatagcccatctttacgaagaatatggcgaagaatttgtggatatgttggatggaatgttctcctttgttcttcttgatacacgtgataaaagcttcatcgcagctcgtgatgctattggcatctgccctttatacatgggatggggtcttgatggatcagtctggttttcttcagagatgaaggcattgagtgatgattgtgaacgcttcataacatttcccccagggcatctctactccagcaagacaggtggtctaaggagatggtacaacccaccatggttttcagagactgtcccttcaaccccttacaatgctctcttcctccgggagatgtttgagaaggctgttattaagaggctgatgactgatgtgccatttggtgtgcttttatctggtggactcgactcttctttggttgcatctgttgcttcgcggcacttaaacgaaacaaaggttgacaggcagtggggaaataaattgcatactttctgtataggcttgaagggttctcctgatcttaaagctgctagagaagttgctgattacctcagcactgtacatcatgagttccacttcacagtgcaggaggggattgatgccttggaagaagtcatctaccatattgagacatatgatgttacaacaatcagagcaagtaccccaatgtttttgatgtcacgcaaaatcaaatctttgggtgtgaagatggttatttctggcgaaggttcagatgaaatttttggtggttacctttattttcacaaggcaccaaacaagaaagaattccatgaggaaacatgtcggaagataaaagcactacatctgtatgactgcttgagagctaacaaagcaacttctgcctggggtgttgaggctcgtgttccattccttgacaaaagtttcatcagtgtagcaatggacattgatcctgaatggaagatgataaaacgtgacctcggtcgaattgagaaatgggttatccgtaatgcatttgatgatgatgagaggccctatttacctaagcacattctctacaggcaaaaggaacagttcagtgatggtgttgggtatagttggatcgatggattgaaggaccatgccagccaacatgtctccgattccatgatgatgaatgctggctttgtttacccagagaacacacccacaacaaaagaagggtactactacagaatgatattcgagaaattctttcccaagcctgcagcaaggtcaactgttcctggaggtcctagtgtggcctgcagcactgccaaagctgttgaatgggacgcatcctggtccaagaaccttgatccttctggccgtgctgctttgggtgttcacgatgctgcgtatgaagacactgcagggaaaactcctgcctctgctgatcctgtctcagacaagggccttcgtccagctattggcgaaagcctagggacacccgttgcttcagccacagctgtctaaccttatgtttatcacccagcaatgcttgaaacagcaaaggttgtccattgcttgtttcagtttccttccgatcatgtttttagttccatcaatcaagcaatggagacatgcttgtgcttcatacttggcagcatcgtgtttgggttttcactgggcagtactgtttaatttttatggactgaaaagactcagttttgtaaatattcgtcactgtgaccaattcctgtggtggtttatgtgatttgcagattgcagtggttagtgtatcttcccaattttcactcctttaacacttgtggttgtttgtgacgtgtgtgcagatttatcttttcatttttcaatcaaggttttcatttcttaaaaaaaaaaaaaaaaaagcggcc

SEQ ID NO: 144214 - protein, 591 aa, Zea mays
MCGILAVLGVAEVSLAKRSRIIELSRRLRHRGPDWSGLHCHEDCYLAHQRLAIIDPTSGDQPLYNEDKTVVVTVNGEIYNHEELKAKLKTHEFQTGSDCEVIAHLYEEYGEEFVDMLDGMFSFVLLDTRDKSFIAARDAIGICPLYMGWGLDGSVWFSSEMKALSDDCERFITFPPGHLYSSKTGGLRRWYNPPWFSETVPSTPYNALFLREMFEKAVIKRLMTDVPFGVLLSGGLDSSLVASVASRHLNETKVDRQWGNKLHTFCIGLKGSPDLKAAREVADYLSTVHHEFHFTVQEGIDALEEVIYHIETYDVTTIRASTPMFLMSRKIKSLGVKMVISGEGSDEIFGGYLYFHKAPNKKEFHEETCRKIKALHLYDCLRANKATSAWGVEARVPFLDKSFISVAMDIDPEWKMIKRDLGRIEKWVIRNAFDDDERPYLPKHILYRQKEQFSDGVGYSWIDGLKDHASQHVSDSMMMNAGFVYPENTPTTKEGYYYRMIFEKFFPKPAARSTVPGGPSVACSTAKAVEWDASWSKNLDPSGRAALGVHDAAYEDTAGKTPASADPVSDKGLRPAIGESLGTPVASATAV

SEQ ID NO: 144215 - DNA, 2117 bp, Zea mays
  CDS (64)..(1884)
aacgaacggaggctcccgagcccggccgagcagagcaagaagctttacagtgaacgagtgagtatgtgcggcatacttgctgtgctcgggtgcgccgacgaggccaagggcagcagcaagaggtcccgggtgctggagctgtcgcggcggctgaagcaccggggccccgactggagcggcctccggcaggtgggcgactgctacctctctcaccagcgcctcgccatcatcgacccggcctctggcgaccagcccctctacaacgaggaccagtcggtggtcgtcgccgtcaacggcgagatctacaaccacctggacctcaggagccgcctcgccggcgcaggccacagcttcaggaccggcagcgactgcgaggtcatcgcgcacctgtacgaggagcatggagaagagttcgtggacatgctggacggcgtcttctccttcgtgctgctggacactcgccatggcgaccgcgcgggcagcagcttcttcatggctgctcgcgacgccatcggtgtgacgcccctctacatcggatggggagtcgatgggtcggtgtggatttcgtcggagatgaaggccctgcacgacgagtgtgagcacttcgagatcttccctccggggcatctctactccagcaacaccggcggattcagcaggtggtacaaccctccttggtacgacgacgacgacgacgaggaggccgtcgtcaccccctccgtcccctacgacccgctggcgctaaggaaggcgttcgagaaggccgtggtgaagcggctgatgacagacgtcccgttcggcgtcctgctctccggcgggctggactcgtcgctggtggcgaccgtcgccgtgcgccacctcgcccggacagaggccgccaggcgctggggcaccaagctccactccttctgcgtgggcctggaggggtcccctgacctcaaggcggccagggaggtggcggagtacctgggcaccctgcaccatgagttccacttcactgttcaggacggcatcgacgccatcgaggacgtgatctaccacacggagacgtacgacgtcaccacgatcagggcgagcacgcccatgttcctcatgtcgcgcaagatcaagtcgctcggggtcaagatggtcatctccggcgagggctccgacgagctcttcggaggctacctctacttccacaaggcgcccaacaaggaggagttgcaccgagagacgtgtaggaaggttaaggctctgcatcagtacgactgcctgagagccaacaaggcgacatcagcttggggcctggaggctcgcgtcccgttcctggacaaggagttcatcaatgcggccatgagcatcgatcctgagtggaagatggtccagcctgatcttggaaggattgagaagtgggtgctgaggaaggcattcgacgacgaggagcagccattcctgcccaagcatatcctctacagacagaaggagcagttcagtgacggcgttgggtacagctggatcgatggcctgaaggctcatgcaacatcaaatgtgactgacaagatgctgtcaaatgcaaagttcatcttcccacacaacactccgaccaccaaggaggcctactactacaggatggtcttcgagaggttcttcccacagaaatctgctatcctgacggtacctggtgggccaagtgtggcgtgcagcacagccaaggccatcgagtgggacgcacaatggtcaggaaatctggacccctcgggaagggcggcactgggcgtccatctcgccgcctacgaacaccaacatgatcccgagcatgtcccggcggccattgcagcaggaagcggcaagaagccaaggacgattagggtggcaccgcctggcgttgccatcgagggatagacgacgacgcatatataagcttcctacttttgtttcaatgcatgcatgctatgtatctgtgtccaccggctgtctagccttatcatcatcactgtctgcaacaaattaataatcaagtggtatggggtacctacgtttaatgtaaaaaaaaaaaaaaaaaaaaaaaaaaaaaaaaaaaaaaaaaaaaaaaaaaaaaaaaaaaaaaaaaaaaaaaaaaaaaaaagggcggccgc

SEQ ID NO: 144216 - protein, 606 aa, Zea mays
MCGILAVLGCADEAKGSSKRSRVLELSRRLKHRGPDWSGLRQVGDCYLSHQRLAIIDPASGDQPLYNEDQSVVVAVNGEIYNHLDLRSRLAGAGHSFRTGSDCEVIAHLYEEHGEEFVDMLDGVFSFVLLDTRHGDRAGSSFFMAARDAIGVTPLYIGWGVDGSVWISSEMKALHDECEHFEIFPPGHLYSSNTGGFSRWYNPPWYDDDDDEEAVVTPSVPYDPLALRKAFEKAVVKRLMTDVPFGVLLSGGLDSSLVATVAVRHLARTEAARRWGTKLHSFCVGLEGSPDLKAAREVAEYLGTLHHEFHFTVQDGIDAIEDVIYHTETYDVTTIRASTPMFLMSRKIKSLGVKMVISGEGSDELFGGYLYFHKAPNKEELHRETCRKVKALHQYDCLRANKATSAWGLEARVPFLDKEFINAAMSIDPEWKMVQPDLGRIEKWVLRKAFDDEEQPFLPKHILYRQKEQFSDGVGYSWIDGLKAHATSNVTDKMLSNAKFIFPHNTPTTKEAYYYRMVFERFFPQKSAILTVPGGPSVACSTAKAIEWDAQWSGNLDPSGRAALGVHLAAYEHQHDPEHVPAAIAAGSGKKPRTIRVAPPGVAIEG

SEQ ID NO: 144217 - DNA, 2082 bp, Glycine max
  CDS (126)..(1874)
ggctcgagcaatttcacccttcacacgtggtggtggtgttgttcttcttctcttcccctttctttttcttcttctgagcttgtttaagctctttctatttgattccattaacatatattatcacaatgtgtggtattcttgctgttcttggttgttctgatgactctcgagccaaaagggtccgcgtgcttgagctctctcgcagattgaagcaccgtggccctgactggagtgggctccatcaacatggtgactgctttttagcacatcaacggttagccatagttgatcctgcttctggggatcaacctctctttaacgaggacaaatccgtcattgtcacggtgaatggagagatttacaaccatgaagagctcaggaaacagctgcctaatcacaagttccgtactggatgtgattgtgatgttattgcacacctgtacgaggaacatggagaagactttgtggacatgctggatggtatcttctcatttgttctactggacacccgtgacaacagttttatagtggctcgggatgctattggggtcacttccttgtacattggatggggattagatggctctgtttggatttcatcagaaatgaaaggcctgaatgatgattgtgaacactttgagtgttttccacctggtcacttgtactctagcaaagaaagagggtttcgcagatggtacaatcctccttggttctctgaggctactccatccaccccttatgatcctctcgttttaagacacacctttgagcaggcagtcataaaaagattgatgactgatgtgccttttggtgttctactctctggaggtttggactcttcattggttgcatccgtcacttctcgctacttggccaacacaaaggctgctgagcagtggggatcaaagttacattcattctgtgtaggccttgagggctcaccagatttgaaggctgcaaaagaagttgctgactatctaggcactgtccaccatgagtttaccttcactgttcaggatggaatagatgccattgaagatgttatctaccatgttgaaacatatgatgtgactacaattagagctagcacacccatgtttctcatgtctcggaagattaaatcacttggtgtcaaatgggttatctccggagaaggatctgatgagatctttggagggtatctgtacttccacaaggcacccaacaaggaggagtttcacagagaaacatgccgcaagatcaaagcactccaccaatatgattgcttgcgagccaataaatcaacatttgcttggggtctagaagcccgtgtaccatttttggacaaggcatttatcaatactgcaatgagtattgaccctgagtcgaaaatgataaaaagagatgaaggacgaattgagaagtggattctgaggagagcctttgatgatgaagagcatccttatctgccaaagcacattttatacaggcagaaagagcaattcagtgatggagttggctatagctggattgatggccttaaggcccatgctgcaaaacatgtgactgacaaaatgatgcttaatgctggtaacatctaccctcacaacaccccaacaaccaaggaagcatattactacagaatgatctttgagaggttcttccctcagaactcagctaggctcaccgttcctggaggagcaagtgttgcatgtagcacagccaaagctgttgagtgggatgctgcttggtctaacaaccttgatccttctggtagagcagcacttggagtgcacatttcagcctatgaaaaccagaacaacaacaagggtgtagaaattgagaagattatacctatggatgctgctcctcttggtgttgcaatccagggataatataaagctgtgacaaagaataattgggggagaatgaactatgctaaacgtgtatgaaaaatttgcctgcagtgtacttttatcttggcaaagctttgtagtgtatagatatagatataaggctttctaaaagtgtagcgtattgtattatcttgaatgctgtgatttgaagtcttaataaaagtgtttctattatcagttcatgatg

SEQ ID NO: 144218 - protein, 582 aa, Glycine max
MCGILAVLGCSDDSRAKRVRVLELSRRLKHRGPDWSGLHQHGDCFLAHQRLAIVDPASGDQPLFNEDKSVIVTVNGEIYNHEELRKQLPNHKFRTGCDCDVIAHLYEEHGEDFVDMLDGIFSFVLLDTRDNSFIVARDAIGVTSLYIGWGLDGSVWISSEMKGLNDDCEHFECFPPGHLYSSKERGFRRWYNPPWFSEATPSTPYDPLVLRHTFEQAVIKRLMTDVPFGVLLSGGLDSSLVASVTSRYLANTKAAEQWGSKLHSFCVGLEGSPDLKAAKEVADYLGTVHHEFTFTVQDGIDAIEDVIYHVETYDVTTIRASTPMFLMSRKIKSLGVKWVISGEGSDEIFGGYLYFHKAPNKEEFHRETCRKIKALHQYDCLRANKSTFAWGLEARVPFLDKAFINTAMSIDPESKMIKRDEGRIEKWILRRAFDDEEHPYLPKHILYRQKEQFSDGVGYSWIDGLKAHAAKHVTDKMMLNAGNIYPHNTPTTKEAYYYRMIFERFFPQNSARLTVPGGASVACSTAKAVEWDAAWSNNLDPSGRAALGVHISAYENQNNNKGVEIEKIIPMDAAPLGVAIQG

SEQ ID NO: 144219 - DNA, 1836 bp, Arabidopsis thaliana
  CDS (1)..(1764)
atgtgtgggattctcgctgttcttggttgcatcgacaactctcaagctaaacgttctcgtatcatcgaactctctcgcagattgaggcacagaggtcctgattggagtggactccattgttatgaagattgttatcttgcccatgagcgtttagccatcattgaccctacttcaggagaccaacctctctataacgaagacaagaccgtcgctgtcactgtaaatggagagatatacaaccacaagattttgcgtgaaaagcttaagtctcatcagttccgtactggtagtgactgtgaagtgattgcacatctttacgaagaacatggagaggaatttatcgacatgttggatggaatgttcgcgtttgtccttcttgatactcgcgacaaaagttttattgctgcaagggacgctattggtatcactccactttacattggatggggtcttgatggttctgtctggtttgcttcggagatgaaagcgcttagtgatgattgtgaacagtttatgtcttttcctcctggccacatctactcaagtaaacaaggagggcttaggaggtggtacaatcctccgtggtacaatgagcaggttccttcaaccccatatgatcctttagttctgcgcaatgctttcgagaaggctgtaataaagagacttatgactgatgtgccttttggagttctcctatctggaggattggactcgtctctcgttgctgcagtagcattacgccatttggaaaaatcagaagctgctcgtcaatggggttcacaattgcacacgttttgcatcggtttgcaggtcttaaaacttcaagctcaatatcagggatcgccagatcttaaagctggcagagaagttgctgactatcttggaacacgccaccacgagtttcagtttacagttcaggacgggatagacgcgatagaggaagtcatttaccatattgagacttatgacgttactacaataagagctagcaccccaatgtttcttatgtccagaaaaattaaatctttaggtgtaaagatggttctttctggggaaggttctgatgaaatactggggggatacttgtacttccataaggctcccaacaagaaagaatttcatgaagaaacatgccgaaagatcaaagctctccaccaatttgattgtttgagagctaacaaatcaacttctgcgtggggtgtcgaagctcgtgtgcctttcctagataaagaatttttaaatgttgcaatgagcatcgatccagagtggaagttgatcaagcctgatctcggaaggatcgagaagtgggtgctacgcaatgcctttgatgatgaagaacgaccttatctaccaaagcacattctatatagacagaaagaacagtttagtgatggagttgggtatagctggatagatggtctgaaagatcatgcaaataaacatgtctctgatactatgctgtcaaacgcaagctttgtcttcccggataacacacctctgacaaaagaagcgtactactacagaaccatcttcgagaagttcttcccgaagagtgctgctagagcgactgtaccaggaggtccaagtatagcttgcagtaccgcgaaagctgtagaatgggatgcaacttggtcaaagaatcttgatccgtcaggccgtgcggctcttggagttcatgttgcagcttatgaagaggataaagcagctgctgctgctaaggctggatcggatttagtagatcctcttcctaagaatggaacataagagaacaacactacaggcattgaggatataagcaaatgttttattcttctacacagagagatcgttatcttc

SEQ ID NO: 144220 - protein, 587 aa, Arabidopsis thaliana
MCGILAVLGCIDNSQAKRSRIIELSRRLRHRGPDWSGLHCYEDCYLAHERLAIIDPTSGDQPLYNEDKTVAVTVNGEIYNHKILREKLKSHQFRTGSDCEVIAHLYEEHGEEFIDMLDGMFAFVLLDTRDKSFIAARDAIGITPLYIGWGLDGSVWFASEMKALSDDCEQFMSFPPGHIYSSKQGGLRRWYNPPWYNEQVPSTPYDPLVLRNAFEKAVIKRLMTDVPFGVLLSGGLDSSLVAAVALRHLEKSEAARQWGSQLHTFCIGLQVLKLQAQYQGSPDLKAGREVADYLGTRHHEFQFTVQDGIDAIEEVIYHIETYDVTTIRASTPMFLMSRKIKSLGVKMVLSGEGSDEILGGYLYFHKAPNKKEFHEETCRKIKALHQFDCLRANKSTSAWGVEARVPFLDKEFLNVAMSIDPEWKLIKPDLGRIEKWVLRNAFDDEERPYLPKHILYRQKEQFSDGVGYSWIDGLKDHANKHVSDTMLSNASFVFPDNTPLTKEAYYYRTIFEKFFPKSAARATVPGGPSIACSTAKAVEWDATWSKNLDPSGRAALGVHVAAYEEDKAAAAAKAGSDLVDPLPKNGT

SEQ ID NO: 144221 - DNA, 2200 bp, Pisum sativum
  CDS (94)..(1854)
ctacgtgttgcttcttccacactctttgctcctagtttttcgtgtcttgttttctttatcctcttctcattctctttggttcttcaaatcataatgtgtggcatacttgctgtacttggttgctctgatgattcacaagctaaacgagttcgcatactcgagctttctcgcagattgaagcaccgtgggccagactggagtgggctccaccaacatggtgataactatttggctcatcaaaggttagccattgttgatcctgcttctggtgatcaacctctcttcaatgaagacaaatcaattattgtcacggtgaatggagaaatctacaatcatgaagagctcagaaaacaattgcccaatcacaagttttttacacaatgtgactgtgatgttattgcacacctgtacgaggaacatggagaaaattttgtggatatgttagacggtatattttcgtttgttctgctggatactcgtgacaacagtttcatagttgcgagggatgctataggtgttacttccttgtacattggttggggactagatggttctgtttggattgcatcagaattgaaaggactgaatgatgaatgtgaacatttcgaagtttttccgcccggtcacttatactcgagcaaagaaagagagtttcgtcgatggtataatcctccatggttcaatgaggctaatattccgtcaacaccttatgatcctctagttttgaggaacgcgtttgagaaggctgtgataaagaggttgatgaccgatgtgcctttcggggttttactatcgggaggtttggattcatcgttggtcgcgtctgtcactgctagataccttgctggtacaaaagctgctaagcagtggggagcaaaattgccctctttctgtgtaggccttaagggcgcacctgacctaaaggctggaaaggaggtagcagatttcttaggaactgtccatcatgaatttgagtttactatccaggacggtatagatgcaattgaagatgtcatctatcacacagaaacatatgatgttactacgataagggctgcaacacctatgtttctgatgtctcgtaagatcaaatcatccggagtcaaatgggtgatttctggagaaggatctgatgagatctttggagggtatttgtatttccataaggcgccaaacagggaagagtttcaccaagaaacatgccgcaagatcaaagctcttcatagatatgattgtttgagagccaataaatcaacatatgcatggggtctagaagctagagtaccatttttggacaaggactttatcaaggttgcaatggacattgatcctgagtttaaaatgataaaacatgatgaaggaagaattgagaaatggattctaagaaaggcctttgatgatgaagagaatccatatctgcctaagcacattttatataggcagaaggaacaattcagtgatggagttggatatggctggatagatggcatcaaggaccatgctgcaaaacatgtcactgacagaatgatgttcaatgcttctcacatctttcctttcaacactccaaataccaaagaagcatattactatagaatgatctttgaaaggtttttccctcagaactcggcaaggcttacagttcctggaggacctagtgttgcatgcagcacagagaaagctattgaatgggatgcttcatggtcaaacaacctggatccttctggtagagcagcacttggagtgcatgtttcggcttatgaacaccaaatcaacccagttacaaaaggtgtagagccagagaagattataccaaagataggagtttctcctcttggagttgccattcaaacctagtatgagacatagcaagtattacttgcttaaaaaaccaagatattattatactattagtattcaataaaaagaataacataaagggaaaatttgcctgttatgtattttatccaggtacaggtacatttgtatgtataagcctttctacttagctgtatttatgtgttttgatgttgtgtaatccacatcttgtctttgctttaaattgatgtggtgatatgaacactttcagattgtaatttggctttttaagaagagttgtgtattatgttaaatttgagtgcaagtttcactatttgaatactacttataaatatatgtctttacattaaaaaaaaaaaaaaaa

SEQ ID NO: 144222 - protein, 586 aa, Pisum sativum
MCGILAVLGCSDDSQAKRVRILELSRRLKHRGPDWSGLHQHGDNYLAHQRLAIVDPASGDQPLFNEDKSIIVTVNGEIYNHEELRKQLPNHKFFTQCDCDVIAHLYEEHGENFVDMLDGIFSFVLLDTRDNSFIVARDAIGVTSLYIGWGLDGSVWIASELKGLNDECEHFEVFPPGHLYSSKEREFRRWYNPPWFNEANIPSTPYDPLVLRNAFEKAVIKRLMTDVPFGVLLSGGLDSSLVASVTARYLAGTKAAKQWGAKLPSFCVGLKGAPDLKAGKEVADFLGTVHHEFEFTIQDGIDAIEDVIYHTETYDVTTIRAATPMFLMSRKIKSSGVKWVISGEGSDEIFGGYLYFHKAPNREEFHQETCRKIKALHRYDCLRANKSTYAWGLEARVPFLDKDFIKVAMDIDPEFKMIKHDEGRIEKWILRKAFDDEENPYLPKHILYRQKEQFSDGVGYGWIDGIKDHAAKHVTDRMMFNASHIFPFNTPNTKEAYYYRMIFERFFPQNSARLTVPGGPSVACSTEKAIEWDASWSNNLDPSGRAALGVHVSAYEHQINPVTKGVEPEKIIPKIGVSPLGVAIQT

SEQ ID NO: 144223 - DNA, 1734 bp, Arabidopsis thaliana
  CDS (1)..(1734)
atgtgtgggattctcgctgtgttaggctgcgtcgataactctcaagctaaacgttcccgtatcatcgaactctctcgcagattgaggcatagaggtcctgactggagtggtctacattgttatgaggattgttatttggctcatgagcgtttggctatcgttgaccccacttctggagatcaaccactctataacgaagataagaccattgctgtcacggtcaatggagagatttacaaccacaaggctttgcgtgaaaatttgaagtctcaccaattccgtactgggagtgattgtgaagtgattgcccatcttgtaaaacatggagaggaatttgtcgacatgttggatggcatgtttgcatttgtgcttcttgatacccgagacaaaagctttattgctgcaagggatgccattggtatcactccactctacatcgggtggggtctcgatggttctgtttggtttgcttccgagatgaaagcacttagtgatgattgtgagcagtttatgtgcttccccccaggccacatctattcaagtaaacaaggtgggcttaggaggtggtacaaccccccgtggttctctgaggttgttccttcaaccccatatgatcccctagtggtgcgcaatacttttgagaaggctgttataaaacgactaatgactgatgtgccttttggtgtcctcctatctggtggattagattcatcccttgttgcttcagtagcattacgccatctggaaaaatcagaagctgcttgtcagtggggttcaaagttgcacacattttgtatcggtttgaagggatccccggatcttaaagctggcagagaagtcgctgactatttaggaactcgccaccacgagttacactttacagttcaggacggaatagatgccatagaagaagtcatctaccatgttgagacctatgatgtgactactattagagccagcactccaatgtttcttatgtcgcgaaaaatcaaatcgcttggtgtaaagatggttctttctggggaaggctctgatgaaatttttggaggatatttgtacttccataaagctcccaacaagaaggaatttcatgaggaaacatgtcgaaagatcaaagctcttcatcaatatgactgcttgagggctaacaaatcaacttctgcatggggtgttgaggctcgtgtacctttcctcgataaagaatttataaatgtcgcaatgagcatcgatccagagtggaagatgattaggcctgatttgggaaggatcgagaaatgggtgttacgcaatgcctttgatgatgagaaaaatccttacctaccaaagcacattctatataggcagaaagaacagttcagtgatggagttggatacagctggattgatggtctaaaagatcatgcaaacaaacatgtctctgagacaatgctgatgaacgcaagctttgtcttccctgataacacacctttgacaaaagaagcttactactacagaaccatctttgaaaagttcttccctaagagtgctgctagagcaactgtaccaggaggtccaagtgtggcatgtagcacagcaaaagctgtggaatgggacgcagcttggtcacagaatcttgacccatcaggtcgtgcggctcttggagttcatgtttcagcttatggggaagataaaaccgaagattctcgtcccgagaagctacagaaactagcagagaagactccagccattgtttga

SEQ ID NO: 144224 - protein, 577 aa, Arabidopsis thaliana
MCGILAVLGCVDNSQAKRSRIIELSRRLRHRGPDWSGLHCYEDCYLAHERLAIVDPTSGDQPLYNEDKTIAVTVNGEIYNHKALRENLKSHQFRTGSDCEVIAHLVKHGEEFVDMLDGMFAFVLLDTRDKSFIAARDAIGITPLYIGWGLDGSVWFASEMKALSDDCEQFMCFPPGHIYSSKQGGLRRWYNPPWFSEVVPSTPYDPLVVRNTFEKAVIKRLMTDVPFGVLLSGGLDSSLVASVALRHLEKSEAACQWGSKLHTFCIGLKGSPDLKAGREVADYLGTRHHELHFTVQDGIDAIEEVIYHVETYDVTTIRASTPMFLMSRKIKSLGVKMVLSGEGSDEIFGGYLYFHKAPNKKEFHEETCRKIKALHQYDCLRANKSTSAWGVEARVPFLDKEFINVAMSIDPEWKMIRPDLGRIEKWVLRNAFDDEKNPYLPKHILYRQKEQFSDGVGYSWIDGLKDHANKHVSETMLMNASFVFPDNTPLTKEAYYYRTIFEKFFPKSAARATVPGGPSVACSTAKAVEWDAAWSQNLDPSGRAALGVHVSAYGEDKTEDSRPEKLQKLAEKTPAIV

SEQ ID NO: 144225 - DNA, 1656 bp, Bombyx mori
  CDS (1)..(1656)
atgtgcggtatttgggcaacattcggtgtaactggtggcctcactcctacctgcgtaaaatgtttttcaaacattcgccaccgaggtccggacgcgtggcgaattgagcaagatgctagagagccgttggctattctcggatttcaacgtctcgctatcgtggacggtcggcacggtatgcaaccgatgcgcctacactgttaccctcgcactacgttaatctgtaatggtgagatttacaactgtaaacgcctacagaaacagcatgagtttcaatatgaaacaaactgtgatgtcgaagccatcatacatttgtatcaaagattcggcatagaagaagccgtcactaaccttgacggggttttttcgttttgccttgtcgacggtgagaagaacaaagtttatatcgcccgtgatccttatggcgttagacctctgtttagttttcatgaccctgaaaacgatgttctcgctatttgttctgaagctaaaggcttgctcggcttaaagcaaaatggcagcccaaactcgacactcggtcaattctctccgggtaacttacaagtgtggagtatacttgaaagtggtaaagtcaaacttgattacacacatcaatatttcacacctgggaaggcacccaaatttgagccttacgtaccggaaaataaattaatcgatatgaacgtcaatgaaaagattgcgtatttattggaggccgcttgccgaaaacgacttatgtccgatcgacgaataggctgtttacttagtggtggattagattcctcgttaatcaccgccattgtagtgaaacttgcaaaggaatacaaattgccttacaaaatacaaactttcgcaatcgggatgggcgattctccagatcttgcagccgccagaaccgtggcggattatttaggaacggaacatcacgaagttcaattcgatgaaaacgatataagaaaagatctggataacgttatttaccatttagaatcttatgatataacaactattcgagcgagtttgccaatgtaccttttgtcaaagtatattaaagaaaaaacagacacaacagtggtatttagcggagaaggagccgatgaactagcgcaaggctatatctacttcagagacgcaccgtctgaaaaggacgcacataaagagagcgtacgtttgctttctgatatttatctctatgatggactgcgagcagatagaacgacgagtgcctttagtttagaattacgagtaccgtttttagatatccaattcactcatcactatctttcaatacctcctaaactacgacaaccccaaaacggcgttgagaaacatctgttaagaagtagttttgcaaaaagtggattattgccagactgtgtgctgtggcgacacaaagaagcatttagtgatggtgtgtcttcagttaaaaaatcgttgttctcggtcataaaagagatcacaactgaaagattacaagaagacgatatacaatatccaggactgcagccgaaaacgaatgaatccaaatattaccgctacgtatttgagaaatcatttccaggacaacataattttactccgtactattggatgccaaaatgggttcaggtttcagacccttcggcaaggtttattaaacattatgcggcaaaatga

SEQ ID NO: 144226 - protein, 551 aa, Bombyx mori
MCGIWATFGVTGGLTPTCVKCFSNIRHRGPDAWRIEQDAREPLAILGFQRLAIVDGRHGMQPMRLHCYPRTTLICNGEIYNCKRLQKQHEFQYETNCDVEAIIHLYQRFGIEEAVTNLDGVFSFCLVDGEKNKVYIARDPYGVRPLFSFHDPENDVLAICSEAKGLLGLKQNGSPNSTLGQFSPGNLQVWSILESGKVKLDYTHQYFTPGKAPKFEPYVPENKLIDMNVNEKIAYLLEAACRKRLMSDRRIGCLLSGGLDSSLITAIVVKLAKEYKLPYKIQTFAIGMGDSPDLAAARTVADYLGTEHHEVQFDENDIRKDLDNVIYHLESYDITTIRASLPMYLLSKYIKEKTDTTVVFSGEGADELAQGYIYFRDAPSEKDAHKESVRLLSDIYLYDGLRADRTTSAFSLELRVPFLDIQFTHHYLSIPPKLRQPQNGVEKHLLRSSFAKSGLLPDCVLWRHKEAFSDGVSSVKKSLFSVIKEITTERLQEDDIQYPGLQPKTNESKYYRYVFEKSFPGQHNFTPYYWMPKWVQVSDPSARFIKHYAAK

SEQ ID NO: 144227 - DNA, 1737 bp, Arabidopsis thaliana
  CDS (1)..(1737)
atgtgtgggattctcgctgtgttaggctgcgtcgataactctcaagctaaacgttcccgtatcatcgaactctctcgcagattgaggcatagaggtcctgactggagtggtctacattgttatgaggattgttatttggctcatgagcgtttggctatcgttgaccccacttctggagatcaaccactctataacgaagataagaccattgctgtcacggtcaatggagagatttacaaccacaaggctttgcgtgaaaatttgaagtctcaccaattccgtactgggagtgattgtgaagtgattgcccatctttacgaagaacatggagaggaatttgtcgacatgttggatggcatgtttgcatttgtgcttcttgatacccgagacaaaagctttattgctgcaagggatgccattggtatcactccactctacatcgggtggggtctcgatggttctgtttggtttgcttccgagatgaaagcacttagtgatgattgtgagcagtttatgtgcttccccccaggccacatctattcaagtaaacaaggtgggcttaggaggtggtacaaccccccgtggttctctgaggttgttccttcaaccccatatgatcccctagtggtgcgcaatacttttgagaaggctgttataaaacgactaatgactgatgtgccttttggtgtcctcctatctggtggattagattcatcccttgttgcttcagtagcattacgccatctggaaaaatcagaagctgcttgtcagtggggttcaaagttgcacacattttgtatcggtttgaagggatccccggatcttaaagctggcagagaagtcgctgactatttaggaactcgccaccacgagttacactttacagttcaggacggaatagatgccatagaagaagtcatctaccatgttgagacctatgatgtgactactattagagccagcactccaatgtttcttatgtcgcgaaaaatcaaatcgcttggtgtaaagatggttctttctggggaaggctctgatgaaatttttggaggatatttgtacttccataaagctcccaacaagaaggaatttcatgaggaaacatgtcgaaagatcaaagctcttcatcaatatgactgcttgagggctaacaaatcaacttctgcatggggtgttgaggctcgtgtacctttcctcgataaagaatttataaatgtcgcaatgagcatcgatccagagtggaagatgattaggcctgatttgggaaggatcgagaaatgggtgttacgcaatgcctttgatgatgagaaaaatccttacctaccaaagcacattctatataggcagaaagaacagttcagtgatggagttggatacagctggattgatggtctaaaagatcatgcaaacaaacatgtctctgagacaatgctgatgaacgcaagctttgtcttccctgataacacacctttgacaaaagaagcttactactacagaaccatctttgaaaagttcttccctaagagtgctgctagagcaactgtaccaggaggtccaagtgtggcatgtagcacagcaaaagctgtggaatgggacgcagcttggtcacagaatcttgacccatcaggtcgtgcggctcttggagttcatgtttcagcttatggggaagataaaaccgaagattctcgtcccgagaagctacagaaactagcagagaagactccagccattgtttga

SEQ ID NO: 144228 - protein, 578 aa, Arabidopsis thaliana
MCGILAVLGCVDNSQAKRSRIIELSRRLRHRGPDWSGLHCYEDCYLAHERLAIVDPTSGDQPLYNEDKTIAVTVNGEIYNHKALRENLKSHQFRTGSDCEVIAHLYEEHGEEFVDMLDGMFAFVLLDTRDKSFIAARDAIGITPLYIGWGLDGSVWFASEMKALSDDCEQFMCFPPGHIYSSKQGGLRRWYNPPWFSEVVPSTPYDPLVVRNTFEKAVIKRLMTDVPFGVLLSGGLDSSLVASVALRHLEKSEAACQWGSKLHTFCIGLKGSPDLKAGREVADYLGTRHHELHFTVQDGIDAIEEVIYHVETYDVTTIRASTPMFLMSRKIKSLGVKMVLSGEGSDEIFGGYLYFHKAPNKKEFHEETCRKIKALHQYDCLRANKSTSAWGVEARVPFLDKEFINVAMSIDPEWKMIRPDLGRIEKWVLRNAFDDEKNPYLPKHILYRQKEQFSDGVGYSWIDGLKDHANKHVSETMLMNASFVFPDNTPLTKEAYYYRTIFEKFFPKSAARATVPGGPSVACSTAKAVEWDAAWSQNLDPSGRAALGVHVSAYGEDKTEDSRPEKLQKLAEKTPAIV

SEQ ID NO: 144229 - DNA, 1740 bp, Arabidopsis thaliana
  CDS (1)..(1740)
atgtgtgggattctcgctgttcttggttgcatcgacaactctcaagctaaacgttctcgtatcatcgaactctctcgcagattgaggcacagaggtcctgattggagtggactccattgttatgaagattgttatcttgcccatgagcgtttagccatcattgaccctacttcaggagaccaacctctctataacgaagacaagaccgtcgctgtcactgtaaatggagagatatacaaccacaagattttgcgtgaaaagcttaagtctcatcagttccgtactggtagtgactgtgaagtgattgcacatctttacgaagaacatggagaggaatttatcgacatgttggatggaatgttcgcgtttgtccttcttgatactcgcgacaaaagttttattgctgcaagggacgctattggtatcactccactttacattggatggggtcttgatggttctgtctggtttgcttcggagatgaaagcgcttagtgatgattgtgaacagtttatgtcttttcctcctggccacatctactcaagtaaacaaggagggcttaggaggtggtacaatcctccgtggtacaatgagcaggttccttcaaccccatatgatcctttagttctgcgcaatgctttcgagaaggctgtaataaagagacttatgactgatgtgccttttggagttctcctatctggaggattggactcgtctctcgttgctgcagtagcattacgccatttggaaaaatcagaagctgctcgtcaatggggttcacaattgcacacgttttgcatcggtttgcagggatcgccagatcttaaagctggcagagaagttgctgactatcttggaacacgccaccacgagtttcagtttacagttcaggacgggatagacgcgatagaggaagtcatttaccatattgagacttatgacgttactacaataagagctagcaccccaatgtttcttatgtccagaaaaattaaatctttaggtgtaaagatggttctttctggggaaggttctgatgaaatactggggggatacttgtacttccataaggctcccaacaagaaagaatttcatgaagaaacatgccgaaagatcaaagctctccaccaatttgattgtttgagagctaacaaatcaacttctgcgtggggtgtcgaagctcgtgtgcctttcctagataaagaatttttaaatgttgcaatgagcatcgatccagagtggaagttgatcaagcctgatctcggaaggatcgagaagtgggtgctacgcaatgcctttgatgatgaagaacgaccttatctaccaaagcacattctatatagacagaaagaacagtttagtgatggagttgggtatagctggatagatggtctgaaagatcatgcaaataaacatgtctctgatactatgctgtcaaacgcaagctttgtcttcccggataacacacctctgacaaaagaagcgtactactacagaaccatcttcgagaagttcttcccgaagcagagtgctgctagagcgactgtaccaggaggtccaagtatagcttgcagtaccgcgaaagctgtagaatgggatgcaacttggtcaaagaatcttgatccgtcaggccgtgcggctcttggagttcatgttgcagcttatgaagaggataaagcagctgctgctgctaaggctggatcggatttagtagatcctcttcctaagaatggaacataa

SEQ ID NO: 144230 - protein, 579 aa, Arabidopsis thaliana
MCGILAVLGCIDNSQAKRSRIIELSRRLRHRGPDWSGLHCYEDCYLAHERLAIIDPTSGDQPLYNEDKTVAVTVNGEIYNHKILREKLKSHQFRTGSDCEVIAHLYEEHGEEFIDMLDGMFAFVLLDTRDKSFIAARDAIGITPLYIGWGLDGSVWFASEMKALSDDCEQFMSFPPGHIYSSKQGGLRRWYNPPWYNEQVPSTPYDPLVLRNAFEKAVIKRLMTDVPFGVLLSGGLDSSLVAAVALRHLEKSEAARQWGSQLHTFCIGLQGSPDLKAGREVADYLGTRHHEFQFTVQDGIDAIEEVIYHIETYDVTTIRASTPMFLMSRKIKSLGVKMVLSGEGSDEILGGYLYFHKAPNKKEFHEETCRKIKALHQFDCLRANKSTSAWGVEARVPFLDKEFLNVAMSIDPEWKLIKPDLGRIEKWVLRNAFDDEERPYLPKHILYRQKEQFSDGVGYSWIDGLKDHANKHVSDTMLSNASFVFPDNTPLTKEAYYYRTIFEKFFPKQSAARATVPGGPSIACSTAKAVEWDATWSKNLDPSGRAALGVHVAAYEEDKAAAAAKAGSDLVDPLPKNGT

SEQ ID NO: 144231 - DNA, 1665 bp, Vibrio cholerae O1 biovar eltor str. N16961
  CDS (1)..(1665): transl_table=11
atgtgctctatctttggcatcttagacattaaaactgatgcagcaacgctaagacctatcgccctcgaaatgtcgaaaaaactgcgccatcgcggtccagactggtcaggtatctatgcttctgataaagcgattctggcccatgagcgtctggccatcgtgggtttaaatagtggcgcacagcctctttatagcccagatcgtaagctcatccttgccgtgaatggtgaaatctataaccacaaagaaattcgtgaacgttacaagggtcaatatgaattccaaaccgattctgattgtgaagttatcttggcactataccgcgataaaggagctgatctcctcgaagaactcaatggtatttttgcttttgttctctacgatgaagagaaagatgaatacctgattggacgtgaccatatcggcatcattcctctttatcagggtcatgatgaacacggtaacttctatgtagcgtcagagatgaaagcactggttcctgtgtgtaaaacattgagtgagtttcctcctggcagctacttgagttcaaaagatcaagcggtgacacgctactatgtgcgtgattggaatagttttgatgaagtcaaagataacgtcagcagcaaagaagagttaactcaagccttagaagctgccgtgaaacgccaactgatgaccgatgttccttatggcgtactgctatctggtggcctggattcatcgattacctctgcgattgcgaagcgttttgccgcaatgcgtattgaagatgatgagaaaagtgcggcatggtggccacaacttcactcttttgcgatcggcttagagggggctccagatcttaaagccgcacgtgaggttgcagagaaaattggtaccgtacaccacgaaatgacttacaccattcaagagggacttgatgcgattcgtgatgtgatttaccacatcgaaacttatgatgtcactacgattcgtgcttctactcccatgttcttgatggggcgtaaaatcaaagccatgggcatcaaaatggtgctttccggtgagggagcagacgaaattttcggtggctatctctacttccataaagcgccaaacgctaaagagtttcacgaggaaaccgtacgcaaactgctggcgttgaacttatttgactgtgcgcgtgccaacaaatcgctggcagcatggggggtagaaggtcgtgtgcctttcctagataaagaatttattgatgttgcgatgcgcctcaacccagccgataaaatgtgtggtaatggcaaaatggaaaaacacatcctgcgtgagtgctttgagcactatctgcccgagtcgattgcatggcgtcaaaaggagcagttttctgatggcgtaggttatggctggatcgatacgctaaaagctaccgcagaagcgaagatcagtgatcaacaaatggaaactgcgaaattccgtttcccatacaatactccaaccaccaaagaaggttatgtgtaccgggaaatttttgaggaactattcccacttgaatctgcggcacgctgcgtaccgggaggcccttccgtcgcttgctcttcagctaaagcgattgagtgggatgagtcattcaaaaactgtattgacccatcaggccgcgcggtgaaagccgtccacaaacaagcctactaa

SEQ ID NO: 144232 - protein, 554 aa, Vibrio cholerae O1 biovar eltor str. N16961
MCSIFGILDIKTDAATLRPIALEMSKKLRHRGPDWSGIYASDKAILAHERLAIVGLNSGAQPLYSPDRKLILAVNGEIYNHKEIRERYKGQYEFQTDSDCEVILALYRDKGADLLEELNGIFAFVLYDEEKDEYLIGRDHIGIIPLYQGHDEHGNFYVASEMKALVPVCKTLSEFPPGSYLSSKDQAVTRYYVRDWNSFDEVKDNVSSKEELTQALEAAVKRQLMTDVPYGVLLSGGLDSSITSAIAKRFAAMRIEDDEKSAAWWPQLHSFAIGLEGAPDLKAAREVAEKIGTVHHEMTYTIQEGLDAIRDVIYHIETYDVTTIRASTPMFLMGRKIKAMGIKMVLSGEGADEIFGGYLYFHKAPNAKEFHEETVRKLLALNLFDCARANKSLAAWGVEGRVPFLDKEFIDVAMRLNPADKMCGNGKMEKHILRECFEHYLPESIAWRQKEQFSDGVGYGWIDTLKATAEAKISDQQMETAKFRFPYNTPTTKEGYVYREIFEELFPLESAARCVPGGPSVACSSAKAIEWDESFKNCIDPSGRAVKAVHKQAY

SEQ ID NO: 144233 - DNA, 1593 bp, Lactococcus lactis subsp. lactis Il1403
  CDS (1)..(1593): transl_table=11
atgtgcggttttttatttatggaaacatctgatttaacgatagaagagtttaaaagtaatttggaattgattgagcatcgaggaccagatgaccaacagcatgttcgtgatactttgggaaatgattttggtttttgccgactttcaatcatggatttatcagacttgggacgtcaaccctttggtttaaatggcaaaagagttatgtgtaatggtgaaatctataactttttaagtctccgtaagttcttggaaacaaaaggttataaatttaccggagattctgactgtgaggttcttttaccactttttgaaactactggaatcgaaacaatggtaaaaatgcttgatgctgaatttgcttttgtcttggttgatgaaaacactgctgaaatttttgccgctcgtgacccatttgggattcgtccacttttttatggttataataaagtaactggcaaaatttcgttttcatccgaagccaaagcactaatttcaacatgtaatgatgtgacaccatttcctccaggttactactatgccaatggtgaatttcatgtttttaatgacattgctgaggtttcaacaattgttgaagaacctttggctgaaatttcaggacatattcgtcgcaaattggaacgtgcagtcaaaaaacgtcttcatgcagatgctccaatgggctatctcttgtcaggtggtttagattcatcattggtttgtgcgattgcagctaaggaattagaaagtccaatcaaaacctttgctattggaatggaaaccgatccgattgatttgaaatatgctcgtgaagtggcagatttcttacgaactgaccataccgaaattctgatgacaaaagaagatgtactttcagcagtccgtgaagtgatttggcacttagaaacatgggatatcacaactattcgggcttctattgggatgtatttaatctgtaaatatattcatgagaatacagaactgaaagttttgatgactggtgaagtttctgatgaaatgtttggttataaatatactgactttgctccatcagcgggtgcctttcaaaaagaagctcaaaaacgagtgcatgaactttatatgtatgacgtcctgcgggctgaccgctgtttagcggctcattctcttgaagcgcgtgttccttttgctgatttggattttgcggcctatgtcatgtctattaatcccagcagaaaattgaatacttatggcaaagggaaatatctcttgcgtcatgcttttgaagggactgaactattgccagatgagattttattcagagaaaaagctgctttttctgacgctgttggtcactcaatggttgactatttaaaagaatttgctgacgaaaaatattctgatgaagacttagcaaaggccagtgaaaagtatccaaaacatacaccatttaccaaagaatcattgatgtatcgtgagatttttgaagaattttatccaggatatgaagattggattcttgatttttggatgccaaatcgcgattgggttggggcagaagttactgacccatcagctcgcgtcttatcaaattatggtgattctggaaaataa

SEQ ID NO: 144234 - protein, 530 aa, Lactococcus lactis subsp. lactis Il1403
MCGFLFMETSDLTIEEFKSNLELIEHRGPDDQQHVRDTLGNDFGFCRLSIMDLSDLGRQPFGLNGKRVMCNGEIYNFLSLRKFLETKGYKFTGDSDCEVLLPLFETTGIETMVKMLDAEFAFVLVDENTAEIFAARDPFGIRPLFYGYNKVTGKISFSSEAKALISTCNDVTPFPPGYYYANGEFHVFNDIAEVSTIVEEPLAEISGHIRRKLERAVKKRLHADAPMGYLLSGGLDSSLVCAIAAKELESPIKTFAIGMETDPIDLKYAREVADFLRTDHTEILMTKEDVLSAVREVIWHLETWDITTIRASIGMYLICKYIHENTELKVLMTGEVSDEMFGYKYTDFAPSAGAFQKEAQKRVHELYMYDVLRADRCLAAHSLEARVPFADLDFAAYVMSINPSRKLNTYGKGKYLLRHAFEGTELLPDEILFREKAAFSDAVGHSMVDYLKEFADEKYSDEDLAKASEKYPKHTPFTKESLMYREIFEEFYPGYEDWILDFWMPNRDWVGAEVTDPSARVLSNYGDSGK

SEQ ID NO: 144235 - DNA, 1665 bp, Escherichia coli O157:H7 EDL933
  CDS (1)..(1665): transl_table=11
atgtgttcaatttttggcgtattcgatatcaaaacagacgcagttgagctgcgtaagaaagcactcgagctgtcacgcctgatgcgtcatcgtggcccggactggtccggtatttatgccagcgataaagccattctcgctcacgaacgtctgtcaattgttgacgttaacgcgggggcgcaacctctctacaaccaacaaaaaacccacgtactggcggtaaacggtgaaatctacaatcaccaggcattgcgcgctgaatatggcgatcgttatcagttccagacagggtctgactgtgaagtgatcctcgcgctgtatcaggaaaaagggccggaatttctcgacgacttgcagggcatgtttgcctttgccctgtacgacagcgaaaaagatgcctacctgattggtcgcgaccatctggggatcatcccactgtatatgggctatgacgaacacggtcagctgtatgtggcctcagaaatgaaagccctggtgccagtttgccgcacgattaaagagttcccggcggggagctatttgtggagtcaggacggcgaaattcgttcttattatcatcgcgactggttcgactttgatgcagtgaaagataacgtgaccgacaaaaacgagctgcgtcaggctctggaagattccgttaaaagccatctgatgtctgatgtgccttacggtgtgctgctttctggtggtctggattcctcaattatttccgctatcaccaagaaatacgcagcccgtcgcgtggaagatcaggaacgctctgaagcctggtggccgcagttacactcctttgctgtaggtctgccgggttcaccggatctgaaagcagcccaggaagtggcaaaccatctgggcactgtgcatcatgaaattcacttcactgtacaggaaggtctggacgccatccgcgacgtgatttaccacatcgaaacctatgatgtgaccactattcgcgcttcaacaccgatgtatttaatgtcgcgtaagatcaaagcgatgggcattaaaatggtgctgtccggtgaaggttctgatgaagtgttcggcggttatctttacttccacaaagcaccgaatgccaaagaactgcatgaagagacggtgcgtaaactgctggccctgcatatgtatgactgcgcgcgtgccaacaaagcgatgtcagcctggggcgtggaagcacgcgttccgttcctcgacaagaaattcctcgacgtggcgatgcgcattaacccgcaggataaaatgtgcggtaacggcaagatggaaaaacacatcctgcgtgaatgttttgagtcatacctgcccgcaagcgtggcctggcggcagaaagagcagttctccgatggcgtcggttacagttggatcgacaccctgaaagaagtggcggcgcagcaggtttctgatcaacagctggaaactgcccgcttccgcttcccgtacaacacaccgacctcaaaagaagcgtatctgtaccgggagatctttgaagaactattcccgcttccgagcgccgctgagtgcgtgccgggcggtccttccgtcgcgtgttcttccgctaaagcgatcgaatgggatgaagcgttcaagaaaatggacgatccgtctggtcgcgcggttggtgttcaccagtcggcgtataagtaa

SEQ ID NO: 144236 - protein, 554 aa, Escherichia coli O157:H7 EDL933
MCSIFGVFDIKTDAVELRKKALELSRLMRHRGPDWSGIYASDKAILAHERLSIVDVNAGAQPLYNQQKTHVLAVNGEIYNHQALRAEYGDRYQFQTGSDCEVILALYQEKGPEFLDDLQGMFAFALYDSEKDAYLIGRDHLGIIPLYMGYDEHGQLYVASEMKALVPVCRTIKEFPAGSYLWSQDGEIRSYYHRDWFDFDAVKDNVTDKNELRQALEDSVKSHLMSDVPYGVLLSGGLDSSIISAITKKYAARRVEDQERSEAWWPQLHSFAVGLPGSPDLKAAQEVANHLGTVHHEIHFTVQEGLDAIRDVIYHIETYDVTTIRASTPMYLMSRKIKAMGIKMVLSGEGSDEVFGGYLYFHKAPNAKELHEETVRKLLALHMYDCARANKAMSAWGVEARVPFLDKKFLDVAMRINPQDKMCGNGKMEKHILRECFESYLPASVAWRQKEQFSDGVGYSWIDTLKEVAAQQVSDQQLETARFRFPYNTPTSKEAYLYREIFEELFPLPSAAECVPGGPSVACSSAKAIEWDEAFKKMDDPSGRAVGVHQSAYK

SEQ ID NO: 144237 - DNA, 1692 bp, Xylella fastidiosa 9a5c
  CDS (1)..(1692): transl_table=11
atgtgttccatttttggaatcttcaacctgcaacccagtgacaacctacagagactgcgtcaccaagcattggagtgctcgcaacggcaacggcatcgcggacccgattggagcggcgtttacgttgatgtgggtgcgattctggtgcacgaacgccttgctatcgtcgatccagccggcggcgcccagccactgctctccgaggatggcacgctggcgttggcggtcaacggcgaaatctataaccacgctgtactcaaaggaacattgcagcagccttatgtgttccaaactcattctgattgcgaagtgattaatgcgctttaccgcgaagaaactccaacctcgtttctgaatcgcttaaatgggatttttgcattcgcattatgggacaagaccaccggacgtggcctcatcgcacgcgatccaatgggtgtggtgccactgtactgggggcacgatcaggacggtcgcttacgcgtcgcgtcagagatgaaagcattgattgagcattgccccgacgttgcacaattcccacccggccattggtacgacaccacaacgggcacactggtgaagtattacgaacgctcctggaaaaactattctgcagtggaaggagtgcaggtctcactacaggaactgcgtgaagcgttcgagcgggccgtccatcgtcaactcatgaccgatgtgccatacggtgtactgctgtccggtggattggattcttccctggtggctgcggtggccgcacgctacgcacgccatcgcatcgaaaccaatgatcagagcgaagcatggtggccacgtctgcactcatttgcgattggactgaaagactcgccagatttgagtgcggccaacgtggctgccgaggcgttgaataccgtccaccatggtttcgagtacaccctccaggaggggctggatgttctacctgaagtgattcgtcacattgaaacttacgatgtcacgacgattcgcgcatccacgccaatgttcctgctggcacgtcgcattaaggcgatgggagtgaagatggtgctgtcaggtgaagggagcgatgaaatttttggcggttacctgtacttccacaaagcgccgaacgcacgtgagttccacgaagaattggtccgcaagctcaacgccctgtattactacgactgcttgcgtgccaacaaagcgatgatggcgtggggtgtcgagccgcgcgtgccgttcttggaccgtgaatttctcgatgtggctatgcggatggatgcgcagcataagatggtcgacaagaccagcgacggcccacagcagatggagaaaggcatcctgcgtgcagcgtttgacggctatttgccgccatcaatcctgtggcgacagaaggagcagttcagtgatggtgttggctacggttggatcgacggactgaaagcacacgctgaaacgcaagtgtctgaccatgcgctggcaactgccgagacacgtttccaggtgaaccctccccagaccaaagaagcctattactaccgcagcatatttgagcgcttcttcccaagcccggcggctgctgagacggtaccgggcggtaaatcaatcgcctgttcctcaccggcggcaattgcttgggatgccagcttcgccacaatggctgacccatccggtcgtgcagtcagcggggttcatcaacaagcactgctgtag

SEQ ID NO: 144238 - protein, 563 aa, Xylella fastidiosa 9a5c
MCSIFGIFNLQPSDNLQRLRHQALECSQRQRHRGPDWSGVYVDVGAILVHERLAIVDPAGGAQPLLSEDGTLALAVNGEIYNHAVLKGTLQQPYVFQTHSDCEVINALYREETPTSFLNRLNGIFAFALWDKTTGRGLIARDPMGVVPLYWGHDQDGRLRVASEMKALIEHCPDVAQFPPGHWYDTTTGTLVKYYERSWKNYSAVEGVQVSLQELREAFERAVHRQLMTDVPYGVLLSGGLDSSLVAAVAARYARHRIETNDQSEAWWPRLHSFAIGLKDSPDLSAANVAAEALNTVHHGFEYTLQEGLDVLPEVIRHIETYDVTTIRASTPMFLLARRIKAMGVKMVLSGEGSDEIFGGYLYFHKAPNAREFHEELVRKLNALYYYDCLRANKAMMAWGVEPRVPFLDREFLDVAMRMDAQHKMVDKTSDGPQQMEKGILRAAFDGYLPPSILWRQKEQFSDGVGYGWIDGLKAHAETQVSDHALATAETRFQVNPPQTKEAYYYRSIFERFFPSPAAAETVPGGKSIACSSPAAIAWDASFATMADPSGRAVSGVHQQALL

SEQ ID NO: 144239 - DNA, 1776 bp, Sinorhizobium meliloti 1021
  CDS (1)..(1776): transl_table=11
atgtgtggaatttgtggagaagtcaggttcgatggcggttcgccgtcggttacggcagtctcgatcatggcggacgtccttgcccctcgcgggccggatgcgtcaggcgtggtggtgcgcgggaatgtcggactggggcaccggcgattgcgtattctcgacctgtccgacaagtcgcagcagccgatggtcgattctgacctcggcctgtcgctcgtcttcaacggctgcatctacaattttcgcgaactgaggttggagcttgaagagaagggttacagattcttctcgtccggcgataccgaggtcatcctgaaggcgtggcatgcctggggcgaggaatgcgtctcgcgtttccatggcatgttcgcattcgtcattcacgagcgcgacagcggacgcgtcgtcatggcgcgcgaccgtttcgggatcaagccgctctatatcgccgaagtacagggcgccttgcgcttcgcttccgccttgcccgcgctcgtcaaggcgggcggcgtcgacacctcgatcgacgtggccgcgctccacaactacatgaccttccacgcggtcgtgccgccaccgcgcacgatcctgaacggcgttcgcaagctgccgcctgcgacccttcgcgtttatgaacgcgacggcagcttcgaggaccggcgctactgggatccgccctatcgccgccaggcaggcgacgcagccataagccgcgaggaatggcaggaacagctcctcgacgcgctgcgcattgccgtgaagcgtcgcatggtcgccgacgtgccggtcggcgtgcttctttccggcggcgtcgattccagcctgatcgtcgggcttctcgcggaagcgggccagcgcggtctcatgagcttctccgtcggcttcgaggaggcaaacggcgaaaagggcgacgaattcgtctattcggacctgatcgccggtcacttcggtacggatcatcgcaagatattcgtcccctccgccgatctgatgggggccttgcccgggaccatcgccgcaatgtccgagccgatggtctcctatgacaatgtcggcttctatctgctctcgaaggaggtttcgaagcacgtcaaggtcgtacagtcggggcagggtgcggacgaggtcttcggaggttaccactggtacccgccgctgatgaactccaacgacgtcgttgcggattacggcaaggccttccgcgaccgttcccacgcggttttgaccacccagttgtcggatgcctggattgccgaccacgacgtgagtggcgacttgctgaacgagcacctcctgcgcgagggtgccgctacgcccgtcgatcaggcgctccgcctcgacagcaacgttatgctcgtcgacgaccccgtgaagcgcgtcgacaatatgaccatggcctggggcctcgaagcgcgcgtgcctttcctcgaccacgagctggtggaacttgccgcgcgcatgcccccggaggagaagctgcgcgacggcggcaagggcattctgaaggacgtggcgcgccgggtcattccgagcgaggtcatcgaccgcaagaaaggctatttcccggtgccgcagctcaaatatatcgccggtccgtatctcgatctgatccgcgataccttgcgctcgcagaaggcgcgcgagcggggcctcttccaagatgcttatcttgaccgcctgttccaggagccgtcggatcacatcacgccgctgcgcggctccgaactgtggcaggtcggactgcttgaaatgtggcttgaagcgcagggggtatag

SEQ ID NO: 144240 - protein, 591 aa, Sinorhizobium meliloti 1021
MCGICGEVRFDGGSPSVTAVSIMADVLAPRGPDASGVVVRGNVGLGHRRLRILDLSDKSQQPMVDSDLGLSLVFNGCIYNFRELRLELEEKGYRFFSSGDTEVILKAWHAWGEECVSRFHGMFAFVIHERDSGRVVMARDRFGIKPLYIAEVQGALRFASALPALVKAGGVDTSIDVAALHNYMTFHAVVPPPRTILNGVRKLPPATLRVYERDGSFEDRRYWDPPYRRQAGDAAISREEWQEQLLDALRIAVKRRMVADVPVGVLLSGGVDSSLIVGLLAEAGQRGLMSFSVGFEEANGEKGDEFVYSDLIAGHFGTDHRKIFVPSADLMGALPGTIAAMSEPMVSYDNVGFYLLSKEVSKHVKVVQSGQGADEVFGGYHWYPPLMNSNDVVADYGKAFRDRSHAVLTTQLSDAWIADHDVSGDLLNEHLLREGAATPVDQALRLDSNVMLVDDPVKRVDNMTMAWGLEARVPFLDHELVELAARMPPEEKLRDGGKGILKDVARRVIPSEVIDRKKGYFPVPQLKYIAGPYLDLIRDTLRSQKARERGLFQDAYLDRLFQEPSDHITPLRGSELWQVGLLEMWLEAQGV

SEQ ID NO: 144241 - DNA, 1695 bp, Xanthomonas campestris pv. campestris str. ATCC 33913
  CDS (1)..(1695): transl_table=11
atgtgttccatcttcggtatcttcggcctgcaacccggcgacgacctgcaggccctgcgccggcaggccctggaatgttcgcagcggcaacgccatcgcgggccggactggagcggcgtgtacgtcgatgccggtgccatcctggtgcacgagcgtctggccatcgtcgacccggcgggcggttcgcagccgctgttgtcggaggacggcagcctggcgttggcagtcaacggcgagatctataaccatcgcgaactcaaggccgagctattgcagccgtacgcttttcagaccggctcggactgcgaagtgatcaatgcgctgtaccgcgaagatgcaccggcctcctatctcaaccgcctcaatggcatcttcgcctttgcgttgtgggacaaggccgcggggcgggtgatcatcgcgcgcgacccgattggcgtggtgccgttgtactggggacacgaccgcgaaggccgcctgcgcgtggcgtccgaactcaagtcgctggtggacgattgcgccgatgccgcgcagtttccgcctggccattggtacgacagcgccaccggcgcattgagccgctactacgagcgctcgtggcgcgaatacagcgaagtggaaaatgtgcaggtgccgctgcaagagctgcgtgaggcgttcgagcgcgcggtgcatcgccagctgatgaccgatgtgccctacggtgtgctgctgtccggtggcctggattcgtcgttggtggcggcggtggccgcacgctacgcgcggcaccgcatcgaagagaacgacaccaccgaagcctggtggccgcgtctgcattcgttcgcaatcggcctgaccggctcgccggatctggccgctgccgaagtggccgccgccgcgctcggtaccgtgcaccatggcttcgaatacagctttgaagaaggcctggatgcgttgccggaagtgatccgccatatcgaaacctatgacgtgaccacgattcgtgcgtccacgccgatgttcctgctggcgcggcgcatcaaggcgatgggcgtcaagatggtgctgtccggcgaaggcagcgacgagatcttcggtggctacctgtacttccacaaggcaccgaacgcacgcgaattccacgaagaactggtgcgcaagctcgatgcgctcaacaactacgattgcctgcgcgccaacaagtcgatgatggcctggggcgtggaaccgcgcgtgccgttcctggatcgcgaattcctggacgtggcgatgcgcatggacgcgcgcttcaagatgatcgacaagaccagcaccggtgccacccgcatcgagaagggcatcttgcgcgaggcatttgccggctatctgccggaatcgatcctgtggcggcagaaggagcaattcagcgatggcgttggttatggctggatcgacggcctcaaggcacatgccgccgcgcacgtgagcgatcgcgaactggcggcggccgatcggcgcttcccggtgaacccgccgcagaccaaggaagcgtatttctaccgcagtctgttcgagcaattcttccccagccaggccgctgcggagacggtgccgggtggcaaatccatcgcgtgttcgtcgccgacggccattgcctgggacgcgagctttgcggcgatggccgatccgtcgggccgtgcgattgccggcgtgcacgcgcaggcgttggcgtcctga

SEQ ID NO: 144242 - protein, 564 aa, Xanthomonas campestris pv. campestris str. ATCC 33913
MCSIFGIFGLQPGDDLQALRRQALECSQRQRHRGPDWSGVYVDAGAILVHERLAIVDPAGGSQPLLSEDGSLALAVNGEIYNHRELKAELLQPYAFQTGSDCEVINALYREDAPASYLNRLNGIFAFALWDKAAGRVIIARDPIGVVPLYWGHDREGRLRVASELKSLVDDCADAAQFPPGHWYDSATGALSRYYERSWREYSEVENVQVPLQELREAFERAVHRQLMTDVPYGVLLSGGLDSSLVAAVAARYARHRIEENDTTEAWWPRLHSFAIGLTGSPDLAAAEVAAAALGTVHHGFEYSFEEGLDALPEVIRHIETYDVTTIRASTPMFLLARRIKAMGVKMVLSGEGSDEIFGGYLYFHKAPNAREFHEELVRKLDALNNYDCLRANKSMMAWGVEPRVPFLDREFLDVAMRMDARFKMIDKTSTGATRIEKGILREAFAGYLPESILWRQKEQFSDGVGYGWIDGLKAHAAAHVSDRELAAADRRFPVNPPQTKEAYFYRSLFEQFFPSQAAAETVPGGKSIACSSPTAIAWDASFAAMADPSGRAIAGVHAQALAS

SEQ ID NO: 144243 - DNA, 1695 bp, Xanthomonas axonopodis pv. citri str. 306
  CDS (1)..(1695): transl_table=11
atgtgttccatcttcggtattttcggcctgcaacccggtgacgacctgcaggcgctgcgccggcaggcgctggaatgttcacagcggcagcgtcaccgcgggcccgactggagcggcgtctacgtcgataccggcgccatcctggtgcacgagcgcctggccattgtcgatccggccggcggctcgcaaccattgctctccgaagacgggcagctcgccctggcggtcaatggcgagatctacaaccatcgcgaactcaaggcggagctgctgcagccgtacgcgttccagaccggctccgattgcgaggtgatcaatgcgctgtatcgcgaagatacgcctgcttcgtatctcaaccgcctcaacggcatctttgcattcgcgctgtgggacaagacggaagggcgcgtcatcatcgcgcgcgacccgatcggtgtggtgccgctgtactgggggcatgatcgcgaaggccgtttgcgtgtggcgtcggaactgaaatcgctggtggacgactgtgccgatgcggcgcagtttccgccgggccattggtacgacagcgccaccggcgcactgaaccgttactacgaacgcgcctggcgccaatacggcgcggtggaaggtgtacaggtgcaactgcaggaattgcgcgaagccttcgagcgcgccgtgcaccgtcagctcatgaccgatgtgccgtacggtgtattgctgtccggtggactggattcttcgctggttgcggccgtcgccgcgcgctacgcccgtcaccgcatcgaagaaaacgacatcaccgaagcctggtggccgcgcctgcattcgttcgcgatcggcttgaagggctcgccagatctggccgcggccgaagtggccgccgcagcgctcggcacggtgcatcacggtttcgaatacaccttcgacgaaggcctggatgcattgcccgacgtcattcgccacatcgaaacctatgacgtcaccaccattcgcgcctccacaccgatgttcttgctggcgcggcggatcaaggcgatgggcgtcaagatggtgctttccggcgaaggcagcgatgagatcttcggcggctacctgtatttccataaggcaccgaatgcgcgcgaattccacgaagagctggtacgcaagctcgacgcgctcaacaactacgactgcctgcgcgcgaacaagtcgatgatggcctggggcgtagagccacgtgtgccgttcctggaccgcgaattcctggatgtggcgatgcgcatggatgccaggttcaagatgatcgacaagaccagcagcggggcgacgcgcatggagaagggtgtactgcgcgaggcatttgccggctacctgcccgaatccatcctgtggcgtcagaaagagcagttcagcgacggcgtgggttacggctggatcgacgggctgaaggcgcatgcgcagtcgcaggtcagcgaccgcgaactcgccgccgccgaccgacgctacccggtcaacccgccgcagaccaaggaggcgtatttctatcgcagcttgttcgagcagtttttccctggccaggcggcggcggaaaccgtgccgggcggcaagtcgatcgcctgctcgtcgccaacggcgattgcctgggatgcgagttttgccgcgatggccgacccatcgggccgcgcgattgccggggtgcacgcgcaggcgctggcttcgtaa

SEQ ID NO: 144244 - protein, 564 aa, Xanthomonas axonopodis pv. citri str. 306
MCSIFGIFGLQPGDDLQALRRQALECSQRQRHRGPDWSGVYVDTGAILVHERLAIVDPAGGSQPLLSEDGQLALAVNGEIYNHRELKAELLQPYAFQTGSDCEVINALYREDTPASYLNRLNGIFAFALWDKTEGRVIIARDPIGVVPLYWGHDREGRLRVASELKSLVDDCADAAQFPPGHWYDSATGALNRYYERAWRQYGAVEGVQVQLQELREAFERAVHRQLMTDVPYGVLLSGGLDSSLVAAVAARYARHRIEENDITEAWWPRLHSFAIGLKGSPDLAAAEVAAAALGTVHHGFEYTFDEGLDALPDVIRHIETYDVTTIRASTPMFLLARRIKAMGVKMVLSGEGSDEIFGGYLYFHKAPNAREFHEELVRKLDALNNYDCLRANKSMMAWGVEPRVPFLDREFLDVAMRMDARFKMIDKTSSGATRMEKGVLREAFAGYLPESILWRQKEQFSDGVGYGWIDGLKAHAQSQVSDRELAAADRRYPVNPPQTKEAYFYRSLFEQFFPGQAAAETVPGGKSIACSSPTAIAWDASFAAMADPSGRAIAGVHAQALAS

SEQ ID NO: 144245 - DNA, 1665 bp, Yersinia pestis KIM
  CDS (1)..(1665): transl_table=11
atgtgttctattttcggggtcttagagcttaaaaccgaccctattgaattacgcaagaaagcgctagaaatgtcacgtttgatgcgtcaccgtggcccagactggtctggtgtctgggcgaatgataaagccatcctcgcccatgagcgcttatctattgttgacgtcaataccggtgcccagccgctgtataatgccgcccacacacatatcttggccgtgaatggtgaaatttataatcatcaagcattacgtcagcaatatagcgaccgttacgccttccaaacgggttcagactgtgaagttattctggcgttgtatcaagaaaaagggcccgcgttcctcgatgatctgcaagggatgtttgccttcgtcctatacgataccgagaaagacgcctacctgatcggccgtgaccatttaggtattatcccgctgtatatggggcacgacgaacacggcaatatgtttgtagcttcggaaatgaaagccttggtacccgtttgccgcaccataaaagaattccctgctggcagctatttgtggagtcaggatggcgagatccgcgaatactatcatcgcgattggtttgattacgaccacgtcaaagacaacgtaaccgacaaaatccaacttgccaacgcattggaagatgcggttaaaagccatctgatgtccgatgtcccttatggggtattgctgtctggtggcctggattcatccgttatctctgctatcaccaaaaaatttgccgcccgccgtgtagaagataatgaacgcagcgaagcctggtggccacaactgcactccttcgccgtcggtttgattggctcacccgatttacgcgcagcacaagaagtcgctaaccacttgggcacggtacaccatgaaattcatttcaccgtgcaggaagggctggatgccatccgcgatgtgatttatcacatcgaaacctatgatgtgacgactatccgcgcgtcaacgccgatgtacctgatgtcacgtaaaatcaaagccatgggcatcaaaatggtgctatctggtgagggttctgacgaagtcttcggtgggtatctctatttccacaaagcgcccaacgccaaagaattacatgaagaaaccgtgcgtaaactgttagctctccatatgtatgactgcgcccgtgccaacaaagcgatgtcagcttggggcgttgaagctcgtgtgcccttcctggataaaaacttccttgatgtcgccatgcgtatcaatccacaggataaaatgtgcggcaatggcaaaatggagaaacatatcctgcgagaatgtttcgaatcttacctgccacacagcgtcgcctggcgtcagaaagaacaattctctgatggtgttggctatagctggattgacaccttgaaagagaaagcagccgagcaagtcactgaccaacagatggaaaccgctcacttccgcttcccgtacaacacacctggctcgaaagaagggtatttgtaccgtgaaatctttgaagagctgttcccgctacctagtgcggcggaatgtgtccctggcggcccctctgttgcctgttcatcagctaaagccattgaatgggatgaatcattcaaaaatatggatgatccatcaggccgtgcggttggcgtccatcaggatgcttacaaataa

SEQ ID NO: 144246 - protein, 554 aa, Yersinia pestis KIM
MCSIFGVLELKTDPIELRKKALEMSRLMRHRGPDWSGVWANDKAILAHERLSIVDVNTGAQPLYNAAHTHILAVNGEIYNHQALRQQYSDRYAFQTGSDCEVILALYQEKGPAFLDDLQGMFAFVLYDTEKDAYLIGRDHLGIIPLYMGHDEHGNMFVASEMKALVPVCRTIKEFPAGSYLWSQDGEIREYYHRDWFDYDHVKDNVTDKIQLANALEDAVKSHLMSDVPYGVLLSGGLDSSVISAITKKFAARRVEDNERSEAWWPQLHSFAVGLIGSPDLRAAQEVANHLGTVHHEIHFTVQEGLDAIRDVIYHIETYDVTTIRASTPMYLMSRKIKAMGIKMVLSGEGSDEVFGGYLYFHKAPNAKELHEETVRKLLALHMYDCARANKAMSAWGVEARVPFLDKNFLDVAMRINPQDKMCGNGKMEKHILRECFESYLPHSVAWRQKEQFSDGVGYSWIDTLKEKAAEQVTDQQMETAHFRFPYNTPGSKEGYLYREIFEELFPLPSAAECVPGGPSVACSSAKAIEWDESFKNMDDPSGRAVGVHQDAYK

SEQ ID NO: 144247 - DNA, 1548 bp, Shigella flexneri 2a str. 301
  CDS (1)..(1548): transl_table=11
atgtgttcaatttttggcgtattcgatatcaaaacagacgcagttgagctgcgtaagaaagcactcgagctgtcacgcctgatgcgtcatcgtggcccggactggtccggtatttatgccagcgataacgccattctcgctcacgaacgtctgtcaattgttgacgttaacgcgggggcgcaacctctctacaaccaacaaaaaaaccacgtactggcggtaaacggtgaaatctacaaccaccaggcattgcgcgctgaatatggcgatcgttatcagttccagacagggtctgactgtgaagtgatcctcgcgctgtatcaggaaaaagggccggaatttctcgacgacttgcagggcatgtttgcctttgccctgtacgacagcgaaaaagatgcctacctgattggtcgcgaccatctggggatcatcccactgtatatggggtatgacgaacacggtcagctgtatgtggcctcagaaatgaaatcgctggtgccagtttgccgcacgattaaagagttcccggcggggagctatttgtggagtcaggacggcgaaatccgttcttattatcatcgcgactggttcgactttgatgcagtgaaagataacgtgaccgacaaaaacgagctgcgtcaggcactggaagattccgttaaaagccatctgatgtctgatgtgccttacggtgtgctactttctggtggtctggattcctcaattatttccgctatcaccaagaaatacgcagcccgtcgcgtgcatcacgaaattcacttcactgtacaggaaggtctggatgccatccgcgacgtgatttaccacatcgaaacttatgatgtgaccactattcgcgcttcaacaccgatgtatttaatgtcgcgtaagatcaaggcgatgggcattaaaatggtgctgtccggtgaaggttctgatgaagtgtttggcggttatctttacttccataaagcgcccaacgttaaagaactgcatgaagagacggtgcgtaaactgctggccttgcatatgtatgactgcgcgcgcgccaacaaagcgatgtcagcctggggcgtggaagcacgcgttccgttcctcgacaaaaaattccttgatgtggcgatgcgcattaacccgcaggataaaatgtgcggtaacggcaaaatggaaaaacacatcctgcgtgaatgttttgagtcatacctgcccgcaagcgtggcctggcggcagaaagagcagttctccgatggcgtcggttacagttggatcgacaccctgaaagaagtggcggcgcagcaggtttctgatcagcaactggaaactgcccgcttccgcttcccgtacaacacgccgacctcaaaagaagcgtatctgtaccgcgagatctttgaagaactgttcccacttccgagtgccgctgagtgcgtgccgggcggtccttccgtcgcgtgttcttcagctaaagcgatcgaatgggatgaagcgttcaaaaaaatggacgatccgtctggtcgtgcggttggcgttcaccagtcggcgtataagtaa

SEQ ID NO: 144248 - protein, 515 aa, Shigella flexneri 2a str. 301
MCSIFGVFDIKTDAVELRKKALELSRLMRHRGPDWSGIYASDNAILAHERLSIVDVNAGAQPLYNQQKNHVLAVNGEIYNHQALRAEYGDRYQFQTGSDCEVILALYQEKGPEFLDDLQGMFAFALYDSEKDAYLIGRDHLGIIPLYMGYDEHGQLYVASEMKSLVPVCRTIKEFPAGSYLWSQDGEIRSYYHRDWFDFDAVKDNVTDKNELRQALEDSVKSHLMSDVPYGVLLSGGLDSSIISAITKKYAARRVHHEIHFTVQEGLDAIRDVIYHIETYDVTTIRASTPMYLMSRKIKAMGIKMVLSGEGSDEVFGGYLYFHKAPNVKELHEETVRKLLALHMYDCARANKAMSAWGVEARVPFLDKKFLDVAMRINPQDKMCGNGKMEKHILRECFESYLPASVAWRQKEQFSDGVGYSWIDTLKEVAAQQVSDQQLETARFRFPYNTPTSKEAYLYREIFEELFPLPSAAECVPGGPSVACSSAKAIEWDEAFKKMDDPSGRAVGVHQSAYK

SEQ ID NO: 144249 - DNA, 1665 bp, Shewanella oneidensis MR-1
  CDS (1)..(1665): transl_table=11
atgtgttcgattttttcaattttagatattcaatccgatgcaaaagagctgcgtcaagtcgcactagaaatgtccaaactgatgcgccatcgcggccccgattggtcaggcatttacgccagcgataaagctattttggcccacgaacgcttggccattgtcgatattgaacatggcgcgcagccactgctaaccgaagacggcagccttatcctcgcagtcaatggtgaaatctataaccacaaagaactcaaagcccagttaggcgataagtacagctatcaaaccaactcagattgcgaagttattctggcgctgtatcaggaatatggcactgaatttcttgataaattaaacggtattttcgccttcgtactctacgacaaagccaaagacgcctacctaattggtcgcgatcatatgggtatcatcccgctctacacgggtcgtgatgcggcaggtaacctctatgtcgcctctgaaatgaaagcactgatgccagtgtgtaaaaccgtggaagaattccagccgggccaatacttatactcaagcgatgctgcggcagtgaaatactacactcgcgattggcaacagtatgatgcagttaaagataatggcgccagccaagaagaattgcgtgaagctctagaagctgcagttaagcgccaattgatgtccgatgtaccttacggggtattactctccggcggtttagactcatcggtgatctcggctatcacccagacatttgctaaacgtcgcatcgaagatgacggtgaaacgggcgcttggtggccgcagctacactcctttgctgtcggtttaaaaggcgcaccggatttaatcgctgccaaaaaggttgctgatgccattggaacgattcaccatgagatcaactttaccttccaagaagggctagatgcgattaaagaagtgatttatcacttagaaacctatgatgtcaccaccattcgtgcggccacaccaatgtatttaatggcacgaaaaatcaaggcgatgggcattaaaatggtgctctctggcgaaggcgctgatgaactctttggcggctacttatacttccacaaggcgccaaacgcacaggctttccatgaggaattagtccgtaagctggataaactgcatctgttcgattgcctgcgcgccaacaaagccatggccgcatggggactcgaagcccgtgtgcccttcctcgataaggaatttatggatgtggcgatgcgaatcaaccctgaggcaaaaatgtctaaggatggccggattgagaaacacattctgcgtcaagcctttgagcataaattgcccaaagaagtcgcctggcgccaaaaggaacaattcagcgatggcgtgggttactcttggatcgatggtttgaaggcccatgccgcagagcaagtagacgatttgcaactggccaacgcgaagttccgcttcccctataacacgccagaaaccaaagaagcctatttctaccgttgtttctttgaggagcattatccattgccaagtgccgccgaaacggttcctgggggcaagtcggtcgcctgctcaaccccagaagcactggcctgggatgaaagtttacggggtattatcgacccatcaggccgagccgtacgctctgtacatgctgcgagttattga

SEQ ID NO: 144250 - protein, 554 aa, Shewanella oneidensis MR-1
MCSIFSILDIQSDAKELRQVALEMSKLMRHRGPDWSGIYASDKAILAHERLAIVDIEHGAQPLLTEDGSLILAVNGEIYNHKELKAQLGDKYSYQTNSDCEVILALYQEYGTEFLDKLNGIFAFVLYDKAKDAYLIGRDHMGIIPLYTGRDAAGNLYVASEMKALMPVCKTVEEFQPGQYLYSSDAAAVKYYTRDWQQYDAVKDNGASQEELREALEAAVKRQLMSDVPYGVLLSGGLDSSVISAITQTFAKRRIEDDGETGAWWPQLHSFAVGLKGAPDLIAAKKVADAIGTIHHEINFTFQEGLDAIKEVIYHLETYDVTTIRAATPMYLMARKIKAMGIKMVLSGEGADELFGGYLYFHKAPNAQAFHEELVRKLDKLHLFDCLRANKAMAAWGLEARVPFLDKEFMDVAMRINPEAKMSKDGRIEKHILRQAFEHKLPKEVAWRQKEQFSDGVGYSWIDGLKAHAAEQVDDLQLANAKFRFPYNTPETKEAYFYRCFFEEHYPLPSAAETVPGGKSVACSTPEALAWDESLRGIIDPSGRAVRSVHAASY

SEQ ID NO: 144251 - DNA, 1665 bp, Salmonella enterica subsp. enterica serovar Typhi Ty2
  CDS (1)..(1665): transl_table=11
atgtgttctattttcggcgtattcgatatcaaaacagatgcagcggaactgcgtaaaaaagcccttgaattgtcacgcctgatgcgccatcgcggcccggactggtccggcatctacgcttgcgataacgcgattctcgcacatgaacgcttgtcgattgttgatgttaacgccggcgcccagcccctgtataacgctaagaaaactcacgtgctggcggtgaacggtgaaatttataaccatcagacgttacgcgcggagtatggcgatcgttacgcgttccagactggctccgactgcgaagttattctcgcgctatatcaggaaaaagggccggatttccttgacgatttacaggggatgttcgccttcgccctgtatgacagcgaaaaagacgcttatctgattggtcgtgaccatatcggtattattccgctctacatgggctatgacgaattcggcaacttctacgtagcgtcagaaatgaaagcgctgactccggtctgccgcaccattaaagagttcccggcgggcagctacctgtggagcaaagacggcgaaattcgtcagtactatcagcgcgactggttcgattacgatgcggtaaaagataacgtcaccgacaaaaacgcgctgcgtcaggcgctggaagaatccgtgaaaagccacctgatgtccgacgtgccctacggcgtactgctctccggcggcctggactcgtcggttatctcggcaatcaccaaaaaattcgccgcccgtcgcgtcgaagatcaggagcgctccgaagcctggtggccacagttgcactcttttgcggtaggtctggaaggttcgcctgacctgaaggcggcccaggaagtggctaaccacctcggcaccgtgcatcatgaaattcacttcaccgtccaggagggtctggatgcgattcgcgacgtgatttaccacattgaaacctatgacgtaaccactatccgcgcctcaacgccaatgtatctgatgtcgcgtaagatcaaagcgatgggcatcaaaatggtgctctccggcgaaggttctgatgaggtgtttggcggctacctgtacttccataaagcgccgaacgccaaagagttacatgaagagacggtccgtaagctacaggcgctgcatatgtatgactgcacccgcgccaacaaagcgatgtccgcctggggcgtggaagcgcgcgtaccgttcctggataaaaaattcctcgacgtggcgatgcgtatcaacccacaggataaaatgtgcggcaacggcaagatggaaaaacacgtgctgcgcgagtgcttcgagtcttatctgccagcaagcgtggcgtggcgtcagaaagagcagttctctgacggcgtaggctacagctggattgatacgctgaaagaggtggcggcgaaacagatttccgatcaacaactggaaacagcccgcttccgctttccatacaacacgccgtcgtctaaagaggcgtacttgtaccgggaaatttttgaagaattgttcccggtgccgagcgccgcggaatgcgtacccggcggcccgtccgtggcctgttcttccgccaaagccattgagtgggatgaagcattcaaaacgatggatgacccgtcaggccgcgcggtcggcgtgcatcagtcggcgtaccagtaa

SEQ ID NO: 144252 - protein, 554 aa, Salmonella enterica subsp. enterica serovar Typhi Ty2
MCSIFGVFDIKTDAAELRKKALELSRLMRHRGPDWSGIYACDNAILAHERLSIVDVNAGAQPLYNAKKTHVLAVNGEIYNHQTLRAEYGDRYAFQTGSDCEVILALYQEKGPDFLDDLQGMFAFALYDSEKDAYLIGRDHIGIIPLYMGYDEFGNFYVASEMKALTPVCRTIKEFPAGSYLWSKDGEIRQYYQRDWFDYDAVKDNVTDKNALRQALEESVKSHLMSDVPYGVLLSGGLDSSVISAITKKFAARRVEDQERSEAWWPQLHSFAVGLEGSPDLKAAQEVANHLGTVHHEIHFTVQEGLDAIRDVIYHIETYDVTTIRASTPMYLMSRKIKAMGIKMVLSGEGSDEVFGGYLYFHKAPNAKELHEETVRKLQALHMYDCTRANKAMSAWGVEARVPFLDKKFLDVAMRINPQDKMCGNGKMEKHVLRECFESYLPASVAWRQKEQFSDGVGYSWIDTLKEVAAKQISDQQLETARFRFPYNTPSSKEAYLYREIFEELFPVPSAAECVPGGPSVACSSAKAIEWDEAFKTMDDPSGRAVGVHQSAYQ

SEQ ID NO: 144253 - DNA, 1680 bp, Bacteroides thetaiotaomicron VPI-5482
  CDS (1)..(1680): transl_table=11
atgtgtggaatagcaggtatactcaacataaaaactcaaaccaaagagctaagagacaaagcactgaaaatggcacagaaaatccgtcatcgcggaccggactggagcggtatctacgtaggtggaagcgccattctggcacacgaacgcctctcgatagttgacccgcaaagcggaggacagcccttatactcccccgaccggaaacaagcgctcgccgtgaacggtgaaatctacaaccatcgggatatccgcgcccgctatgccggacaatatgattttcagaccggaagcgactgtgaagtgattcttgccctttataaagataaaggcatccactttctggaagagatcagcggaattttcgcctttgtactttatgatgaagaaaaagacgagttcctcattgcacgtgatcctatcggagtcatacctttatatataggaaaagacaaggatggcaaaatctacttcggcagtgaactgaaagcactcgaaggattctgtaatgagtacgaaccatttcttccgggacattacttttacagtaaagaaggcaaaatgaagcgttggtatacacgcgaatggacagactatgagtctgtaaaagacaatgatgccaaagtcagtgatgtaaaagaagcattggaagatgccgttcatcgccagctgatgagtgacgttccctatggagtacttctttcaggtggtctggacagttctgtgatttcagctatcgccaaaaaatatgcagcaaaacgtattgaaacagacggagcaagtgacgcctggtggcctcaactacattcttttgccatcggtctgaagggggcgcccgatttgataaaggcacgtgaagtggcagaatatatcggtacggttcatcatgaaatcaattatacggttcaggaagggctggatgctattcgggatgttatctattttatcgagacgtatgatgtgactacggtacgtgcctccactcccatgtatttactggcacgtgtgatcaaatcgatggggatcaaaatggtattgagtggtgaaggtgccgatgaagttttcggcggttatctttactttcacaaagctcccactccgaaagatttccatgaggaaacggtacgtaagttatcaaaactgcatatgtatgattgccttcgtgccaataagagtttatcagcctggggtgtagagggacgtgtcccatttctggacaaggaatttctggatgtagcgatggcgttgaatccaaaagctaaaatgtgccccggaaaggagattgagaaacgaattgtacgtgaagcttttgccgatatgctaccggaaagcgtagcatggagacaaaaagagcagttcagtgatggtgtgggatattcgtggattgataccttaagagagattacagcggctgccgtcagtgatgaacagatggaacacgctgccgaacgtttcccgattaacactccgctcaacaaggaagaatattactaccggagtatctttgaagagcattttccgagtgaaagcgcagcccgcagcgtaccaagcgtaccaagtgtggcctgctctacagcagaagcgctggcatgggatgtagctttccgtaacctgaatgaaccaagcggcagagcagtgagaggagtgcatgaagaagcctatgccgaagaggtaaaataa

SEQ ID NO: 144254 - protein, 559 aa, Bacteroides thetaiotaomicron VPI-5482
MCGIAGILNIKTQTKELRDKALKMAQKIRHRGPDWSGIYVGGSAILAHERLSIVDPQSGGQPLYSPDRKQALAVNGEIYNHRDIRARYAGQYDFQTGSDCEVILALYKDKGIHFLEEISGIFAFVLYDEEKDEFLIARDPIGVIPLYIGKDKDGKIYFGSELKALEGFCNEYEPFLPGHYFYSKEGKMKRWYTREWTDYESVKDNDAKVSDVKEALEDAVHRQLMSDVPYGVLLSGGLDSSVISAIAKKYAAKRIETDGASDAWWPQLHSFAIGLKGAPDLIKAREVAEYIGTVHHEINYTVQEGLDAIRDVIYFIETYDVTTVRASTPMYLLARVIKSMGIKMVLSGEGADEVFGGYLYFHKAPTPKDFHEETVRKLSKLHMYDCLRANKSLSAWGVEGRVPFLDKEFLDVAMALNPKAKMCPGKEIEKRIVREAFADMLPESVAWRQKEQFSDGVGYSWIDTLREITAAAVSDEQMEHAAERFPINTPLNKEEYYYRSIFEEHFPSESAARSVPSVPSVACSTAEALAWDVAFRNLNEPSGRAVRGVHEEAYAEEVK

SEQ ID NO: 144255 - DNA, 1665 bp, Shigella flexneri 2a str. 2457T
  CDS (1)..(1665): transl_table=11
atgtgttcaatttttggcgtattcgatatcaaaacagacgcagttgagctgcgtaagaaagcactcgagctgtcacgcctgatgcgtcatcgtggcccggactggtccggtatttatgccagcgataacgccattctcgctcacgaacgtctgtcaattgttgacgttaacgcgggggcgcaacctctctacaaccaacaaaaaaaccacgtactggcggtaaacggtgaaatctacaaccaccaggcattgcgcgctgaatatggcgatcgttatcagttccagacagggtctgactgtgaagtgatcctcgcgctgtatcaggaaaaagggccggaatttctcgacgacttgcagggcatgtttgcctttgccctgtacgacagcgaaaaagatgcctacctgattggtcgcgaccatctggggatcatcccactgtatatggggtatgacgaacacggtcagctgtatgtggcctcagaaatgaaatcgctggtgccagtttgccgcacgattaaagagttcccggcggggagctatttgtggagtcaggacggcgaaatccgttcttattatcatcgcgactggttcgactttgatgcagtgaaagataacgtgaccgacaaaaacgagctgcgtcaggcactggaagattccgttaaaagccatctgatgtctgatgtgccttacggtgtgctactttctggtggtctggattcctcaattatttccgctatcaccaagaaatacgcagcccgtcgcgtggaagatcaggaacgctctgaagcctggtggccgcagttacactcctttgctgtaggtctgccgggttcaccggatcttaaagcagcccaggaagtggcaaaccatctgggcacggtgcatcacgaaattcacttcactgtacaggaaggtctggatgccatccgcgacgtgatttaccacatcgaaacttatgatgtgaccactattcgcgcttcaacaccgatgtatttaatgtcgcgtaagatcaaggcgatgggcattaaaatggtgctgtccggtgaaggttctgatgaagtgtttggcggttatctttacttccataaagcgcccaacgttaaagaactgcatgaagagacggtgcgtaaactgctggccttgcatatgtatgactgcgcgcgcgccaacaaagcgatgtcagcctggggcgtggaagcacgcgttccgttcctcgacaaaaaattccttgatgtggcgatgcgcattaacccgcaggataaaatgtgcggtaacggcaaaatggaaaaacacatcctgcgtgaatgttttgagtcatacctgcccgcaagcgtggcctggcggcagaaagagcagttctccgatggcgtcggttacagttggatcgacaccctgaaagaagtggcggcgcagcaggtttctgatcagcaactggaaactgcccgcttccgcttcccgtacaacacgccgacctcaaaagaagcgtatctgtaccgcgagatctttgaagaactgttcccacttccgagtgccgctgagtgcgtgccgggcggtccttccgtcgcgtgttcttcagctaaagcgatcgaatgggatgaagcgttcaaaaaaatggacgatccgtctggtcgtgcggttggcgttcaccagtcggcgtataagtaa

SEQ ID NO: 144256 - protein, 554 aa, Shigella flexneri 2a str. 2457T
MCSIFGVFDIKTDAVELRKKALELSRLMRHRGPDWSGIYASDNAILAHERLSIVDVNAGAQPLYNQQKNHVLAVNGEIYNHQALRAEYGDRYQFQTGSDCEVILALYQEKGPEFLDDLQGMFAFALYDSEKDAYLIGRDHLGIIPLYMGYDEHGQLYVASEMKSLVPVCRTIKEFPAGSYLWSQDGEIRSYYHRDWFDFDAVKDNVTDKNELRQALEDSVKSHLMSDVPYGVLLSGGLDSSIISAITKKYAARRVEDQERSEAWWPQLHSFAVGLPGSPDLKAAQEVANHLGTVHHEIHFTVQEGLDAIRDVIYHIETYDVTTIRASTPMYLMSRKIKAMGIKMVLSGEGSDEVFGGYLYFHKAPNVKELHEETVRKLLALHMYDCARANKAMSAWGVEARVPFLDKKFLDVAMRINPQDKMCGNGKMEKHILRECFESYLPASVAWRQKEQFSDGVGYSWIDTLKEVAAQQVSDQQLETARFRFPYNTPTSKEAYLYREIFEELFPLPSAAECVPGGPSVACSSAKAIEWDEAFKKMDDPSGRAVGVHQSAYK

SEQ ID NO: 144257 - DNA, 1539 bp, Arabidopsis thaliana
  CDS (1)..(1539)
atgtgtggaatacttgccgtgttaggatgttccgatgattctcaggccaagagagttcgtgttcttgagctttctcgcagattgaggcacagaggacctgactggagtggcttatatcagaacggagataattacttggcccatcaacgtcttgccgtcatcgatcctgcttccggtgatcaacctcttttcaacgaggacaagaccattgttgtcacggtgaacggagagatttataaccatgaggagctgagaaaacgtctgaagaatcacaagttccgtactggtagtgattgtgaagtcattgctcacttgtacgaggagtatggtgtggattttgttgatatgttggatggaatattctcctttgtgttgctcgacacacgagataactctttcatggtggctcgtgatgcgattggtgtcacttcgctctacattggttggggactagacggatctgtgtggatatcttcagagatgaaaggcctaaacgatgactgtgagcatttcgaaacgtttcctccaggtcatttttattcaagcaaattaggagggtttaagcaatggtataatcctccttggttcaatgaatctgttccttcaacgccttatgagcctcttgcgataagacgcgcctttgaaaacgctgtgattaagcggttgatgactgatgttccatttggagttttgctctctggtggtcttgattcttcccttgttgcctccatcactgcacgtcacttggccggtactaaggcggctaagcaatggggtcctcagctccattccttttgcgttggtcttgagggctcaccggacttgaaggcagggaaagaggtggcggaatatttggggacggtgcaccacgagttccacttctcggtgcaggacgggattgatgcgatagaggatgtgatttaccatgttgagacctatgatgtgacgactatcagagcgagcacaccgatgttcttgatgtcccggaaaatcaagtctctaggggtcaagatggttctctccggcgaaggtgcggacgagatctttggagggtacctctatttccacaaggcacctaacaagaaagagtttcaccaagaaacttgtcgcaagatcaaggctcttcacaagtatgactgtctaagagccaacaaatctacctctgcctttggactagaggcacgtgttcctttccttgacaaagacttcatcaacacagctatgtctctcgaccctgaatccaagatgatcaagccagaggaaggaaggatcgagaaatgggttctaaggagagcctttgacgacgaagaacgtccttatctaccaaaacacattctctacagacagaaagaacagttcagtgatggtgttggctacagttggatcgatggcctgaaagatcacgctgctcaaaatgtcaatgacaagatgatgtcgaacgcggggcatatcttccctcacaacactccaaacactaaagaagcttactactacagaatgatctttgaaaggttcttcccgcaggtgagagtcttataa

SEQ ID NO: 144258 - protein, 512 aa, Arabidopsis thaliana
MCGILAVLGCSDDSQAKRVRVLELSRRLRHRGPDWSGLYQNGDNYLAHQRLAVIDPASGDQPLFNEDKTIVVTVNGEIYNHEELRKRLKNHKFRTGSDCEVIAHLYEEYGVDFVDMLDGIFSFVLLDTRDNSFMVARDAIGVTSLYIGWGLDGSVWISSEMKGLNDDCEHFETFPPGHFYSSKLGGFKQWYNPPWFNESVPSTPYEPLAIRRAFENAVIKRLMTDVPFGVLLSGGLDSSLVASITARHLAGTKAAKQWGPQLHSFCVGLEGSPDLKAGKEVAEYLGTVHHEFHFSVQDGIDAIEDVIYHVETYDVTTIRASTPMFLMSRKIKSLGVKMVLSGEGADEIFGGYLYFHKAPNKKEFHQETCRKIKALHKYDCLRANKSTSAFGLEARVPFLDKDFINTAMSLDPESKMIKPEEGRIEKWVLRRAFDDEERPYLPKHILYRQKEQFSDGVGYSWIDGLKDHAAQNVNDKMMSNAGHIFPHNTPNTKEAYYYRMIFERFFPQVRVL

SEQ ID NO: 144259 - DNA, 1737 bp, Arabidopsis thaliana
  CDS (1)..(1737)
atgtgtgggattctcgctgttcttggttgcatcgacaactctcaagctaaacgttctcgtatcatcgaactctctcgcagattgaggcacagaggtcctgattggagtggactccattgttatgaagattgttatcttgcccatgagcgtttagccatcattgaccctacttcaggagaccaacctctctataacgaagacaagaccgtcgctgtcactgtaaatggagagatatacaaccacaagattttgcgtgaaaagcttaagtctcatcagttccgtactggtagtgactgtgaagtgattgcacatctttacgaagaacatggagaggaatttatcgacatgttggatggaatgttcgcgtttgtccttcttgatactcgcgacaaaagttttattgctgcaagggacgctattggtatcactccactttacattggatggggtcttgatggttctgtctggtttgcttcggagatgaaagcgcttagtgatgattgtgaacagtttatgtcttttcctcctggccacatctactcaagtaaacaaggagggcttaggaggtggtacaatcctccgtggtacaatgagcaggttccttcaaccccatatgatcctttagttctgcgcaatgctttcgagaaggctgtaataaagagacttatgactgatgtgccttttggagttctcctatctggaggattggactcgtctctcgttgctgcagtagcattacgccatttggaaaaatcagaagctgctcgtcaatggggttcacaattgcacacgttttgcatcggtttgcagggatcgccagatcttaaagctggcagagaagttgctgactatcttggaacacgccaccacgagtttcagtttacagttcaggacgggatagacgcgatagaggaagtcatttaccatattgagacttatgacgttactacaataagagctagcaccccaatgtttcttatgtccagaaaaattaaatctttaggtgtaaagatggttctttctggggaaggttctgatgaaatactggggggatacttgtacttccataaggctcccaacaagaaagaatttcatgaagaaacatgccgaaagatcaaagctctccaccaatttgattgtttgagagctaacaaatcaacttctgcgtggggtgtcgaagctcgtgtgcctttcctagataaagaatttttaaatgttgcaatgagcatcgatccagagtggaagttgatcaagcctgatctcggaaggatcgagaagtgggtgctacgcaatgcctttgatgatgaagaacgaccttatctaccaaagcacattctatatagacagaaagaacagtttagtgatggagttgggtatagctggatagatggtctgaaagatcatgcaaataaacatgtctctgatactatgctgtcaaacgcaagctttgtcttcccggataacacacctctgacaaaagaagcgtactactacagaaccatcttcgagaagttcttcccgaagagtgctgctagagcgactgtaccaggaggtccaagtatagcttgcagtaccgcgaaagctgtagaatgggatgcaacttggtcaaagaatcttgatccgtcaggccgtgcggctcttggagttcatgttgcagcttatgaagaggataaagcagctgctgctgctaaggctggatcggatttagtagatcctcttcctaagaatggaacataa

SEQ ID NO: 144260 - protein, 578 aa, Arabidopsis thaliana
MCGILAVLGCIDNSQAKRSRIIELSRRLRHRGPDWSGLHCYEDCYLAHERLAIIDPTSGDQPLYNEDKTVAVTVNGEIYNHKILREKLKSHQFRTGSDCEVIAHLYEEHGEEFIDMLDGMFAFVLLDTRDKSFIAARDAIGITPLYIGWGLDGSVWFASEMKALSDDCEQFMSFPPGHIYSSKQGGLRRWYNPPWYNEQVPSTPYDPLVLRNAFEKAVIKRLMTDVPFGVLLSGGLDSSLVAAVALRHLEKSEAARQWGSQLHTFCIGLQGSPDLKAGREVADYLGTRHHEFQFTVQDGIDAIEEVIYHIETYDVTTIRASTPMFLMSRKIKSLGVKMVLSGEGSDEILGGYLYFHKAPNKKEFHEETCRKIKALHQFDCLRANKSTSAWGVEARVPFLDKEFLNVAMSIDPEWKLIKPDLGRIEKWVLRNAFDDEERPYLPKHILYRQKEQFSDGVGYSWIDGLKDHANKHVSDTMLSNASFVFPDNTPLTKEAYYYRTIFEKFFPKSAARATVPGGPSIACSTAKAVEWDATWSKNLDPSGRAALGVHVAAYEEDKAAAAAKAGSDLVDPLPKNGT

SEQ ID NO: 144261 - DNA, 1638 bp, Wigglesworthia glossinidia endosymbiont of Glossina brevipalpis
  CDS (1)..(1638): transl_table=11
atgtgttctatatttggtattttgaatattaaaaataattcaatttctttaagaaagaaagcattaaaatgttctaatttaatgaaacatagaggtccagattccaatggaatttattgtgatgaagatgtaattttagttcatgagagattatctattattgatgttaaaagtggaaatcaaccattatttaataacagcaaaacaaatgttctaattatgaatggagaaatatataactacgaagaaataaaaaaaaatttaattcatgattatagtttcaatactaattctgacaacgaagttgttttagctttatataaaaaatttggattaaattttttaaacaaattaaatggaatgtttgctttcatattatatgatatagaaaaaaaaatttatttaataggcagagatcatatcggaatgattcctttatacatgggatatgattgcgataataatttatacatttcatcggaaatgaaagcgttgattcctgtatgtaattatataaaagaatttcctataggaagttatttatgtaatttaaataaaaaaattattaaatattataaaagaaattggtttgaatttgattcaataaaaaattgtttattaagttataaaaaaataaaacattcattaaaaaaatcagttttaaatcatttaaaatcagaagtaccttttggtattctattatctggaggattagactcttctataattgcatcaatagcatcaaaagaattgaattataaaaatttaaataaaaaattgaaatctttttctattggattagaaaattctccagatttacattcttctaggatatgcgctagatatttaaatacagatcattgcgaagtaaaattcacagaacaagatggattagatgttataaaaaaagtgatttattatgtagaaacttacgatattactactataagagcttctattccaatgtatttaatatcacaaaaaatcaaatctagcggtattaaaatgattctatctggagaaggagcagatgaaatttttggaggatatttatattttcacaatgctccaagtgaaaaagatttacacgatgaattagttagaaagttaaaatctttacacatttatgactgtgctagagctaataaatcaatgctagcatttggaatagaagctcgttttccttttttagataaaaaatttttagatgttgcaatgaggataaatccaaaacacaaaatgtgtaataaaaatagaatagaaaagtatattttaagaaaatcttttataaattatttgccaaataatattttatggagacaaaaagaacagttttctgatggagtaggatataaatggattgatagtataaaaaatttttctaaaaaaataataagtgataaaaaatttaataatgctattcataaatttccttacaatactcctttatctaaagaagaatatttatatagagagatttttgaaaatttttttccattgcccagtgcagcagaatgtgttcctcaagaaaaatcaattgcatgttcttcagaaatagcttcaaaatggagtaaatatagaaatttaaattttgatccatctggaagatctttagacatacatatttctaaaaattaa

SEQ ID NO: 144262 - protein, 545 aa, Wigglesworthia glossinidia endosymbiont of Glossina brevipalpis
MCSIFGILNIKNNSISLRKKALKCSNLMKHRGPDSNGIYCDEDVILVHERLSIIDVKSGNQPLFNNSKTNVLIMNGEIYNYEEIKKNLIHDYSFNTNSDNEVVLALYKKFGLNFLNKLNGMFAFILYDIEKKIYLIGRDHIGMIPLYMGYDCDNNLYISSEMKALIPVCNYIKEFPIGSYLCNLNKKIIKYYKRNWFEFDSIKNCLLSYKKIKHSLKKSVLNHLKSEVPFGILLSGGLDSSIIASIASKELNYKNLNKKLKSFSIGLENSPDLHSSRICARYLNTDHCEVKFTEQDGLDVIKKVIYYVETYDITTIRASIPMYLISQKIKSSGIKMILSGEGADEIFGGYLYFHNAPSEKDLHDELVRKLKSLHIYDCARANKSMLAFGIEARFPFLDKKFLDVAMRINPKHKMCNKNRIEKYILRKSFINYLPNNILWRQKEQFSDGVGYKWIDSIKNFSKKIISDKKFNNAIHKFPYNTPLSKEEYLYREIFENFFPLPSAAECVPQEKSIACSSEIASKWSKYRNLNFDPSGRSLDIHISKN

SEQ ID NO: 144263 - DNA, 1857 bp, Wolinella succinogenes DSM 1740
  CDS (1)..(1857): transl_table=11
atgtgcggaatcgtaggctacagccaaaaccacccccaagccatccaagagatgctccaaagcatccgccatcgaggtcctgatgatctaggaatctactgtgatgagggcttctcgcttggtcacacccgcctctccatcctcgatctgagccacgcaggccatcagcccatggagtttgagcatctcgtgattgtctttaacggtgaggtctataacttccgcgccatccaaaaagagcttctagggcttggctacaccttcttctccgattcagacacagaggtgatcctcaaagcgatgcactgctggggcgaaaaagccgtggataaattcatcgggatgtttgcctttgccctctgggataagagaaaagaggagctgctcctctatcgagaccgagtaggagtgaagcctctttactactattttgaagggggcgagcttctttttgctagcgagctacgcgccatcaccgccatcaaacccaacctagcgctaagccaagcggggctttatgaatattttcaattcggctatataagctccaatctctccatccatcaggccatccacaagctccctgctgggcattatctccgcttcaaagcgggcaagatcgaggtgaagccctattggagcatccacaccttcttggagatgcccccttttgaaaagagtgaagaggagcttattgatgagctagaagagcttttggtggatgccttcaagcttcgtatggtggcggatgtgcccgtgggagtctttttgagcggaggaatcgattcctctttagtggcagcgattttacaaaagcaccatggtcatatccatactttcaccatcggctttgagaatcctcgctacaacgaagccctctacgccaaaggggtcgccgagcatcttggcaccgagcatacggaacgaatcctaagcgctgaagaggcgcgagagattctctatcgcttccctgaagtttacgatgagccttttggcgatagtagcgggattcctacgcttcttgtctccaaggtggccaaggagagcggagtgaaggtcgtcctctccgctgatggcggagatgagatcttttgcggttatgagcgctatcccatcgcccactccctctcgcgcaagatcctctccctcccctatcccctaagagccttcgcaggaagagccatggagagctttggagccaagagggcgggctatctctttaaagtgcgcaacctagagcacaaattcaaccaactcagcgagatgctgcgcgctaaggatttggaagagttctacgagctcttggtgcacaactccaaaaactatgagatcaaagagctcctaggggagaccttccctcccaagagccgagcctttaaagtcggcgagaggattcaccccatgcaggggatgatgtcatgggattatgaacgctacatggtggatgacattttggtgaaagttgatcgagcgaccatgtttcactctattgaaggacgggagcctctactggatcaccgcattgccgaatttgccgcacgccttccctttaacatgaaatttcgcgagggcaaaaccaaatatatcctgcgaaaagttcttgagcgctaccttcccaaagagatgatcgaacgccccaagatgggctttggaatcccgatgtttgagtggtttagccaagatttacgctccctttttgagactcactttacccctgagagactcaaaagctctggcgtgctcaacccaagctatgtcctaagagagcttggcaaactccaaagaggggagcccgtcaatgtcaataagctttggctcatcctcgtctttttgatgtggcaagagaaggcacgctag

SEQ ID NO: 144264 - protein, 618 aa, Wolinella succinogenes DSM 1740
MCGIVGYSQNHPQAIQEMLQSIRHRGPDDLGIYCDEGFSLGHTRLSILDLSHAGHQPMEFEHLVIVFNGEVYNFRAIQKELLGLGYTFFSDSDTEVILKAMHCWGEKAVDKFIGMFAFALWDKRKEELLLYRDRVGVKPLYYYFEGGELLFASELRAITAIKPNLALSQAGLYEYFQFGYISSNLSIHQAIHKLPAGHYLRFKAGKIEVKPYWSIHTFLEMPPFEKSEEELIDELEELLVDAFKLRMVADVPVGVFLSGGIDSSLVAAILQKHHGHIHTFTIGFENPRYNEALYAKGVAEHLGTEHTERILSAEEAREILYRFPEVYDEPFGDSSGIPTLLVSKVAKESGVKVVLSADGGDEIFCGYERYPIAHSLSRKILSLPYPLRAFAGRAMESFGAKRAGYLFKVRNLEHKFNQLSEMLRAKDLEEFYELLVHNSKNYEIKELLGETFPPKSRAFKVGERIHPMQGMMSWDYERYMVDDILVKVDRATMFHSIEGREPLLDHRIAEFAARLPFNMKFREGKTKYILRKVLERYLPKEMIERPKMGFGIPMFEWFSQDLRSLFETHFTPERLKSSGVLNPSYVLRELGKLQRGEPVNVNKLWLILVFLMWQEKAR

SEQ ID NO: 144265 - DNA, 1677 bp, Onion yellows phytoplasma OY-M
  CDS (1)..(1677): transl_table=11
atgtgttcaatttttggaatactaaatattaaaaccgatccacaaattttgcgtgaccaagctcttaaactttcaagtttgatgcgtcatcgaggacctgattggtcaagaatttttgcctctcaaaaagccattttagcacacgaaagactatcaattatagatgttaatgctggagctcaaccactttataataaaaccaaaaccttaatacttgcaataaatggagaaatttataaccacctagatttacgcaaacaatacaaagataaatacgaatttcaaaaagaatcagattgtgaagttattctagcactatatcaagaaaaaggtgttaattttttagatgaattacaaggaatgtttgcatttattttatatgatcttacaaaaaacacctatcttataggacgcgatcatatgggaataattccactttatatgggatattaccttaaccaaaatttttatatagcttctgaaatgaaagccttaattcccatttgccaaaccctttctatttttcctccaggaaattatttatatagtgaatctggcaaaatggtgaaatattataaacgcaattggatggattatcaaaatgtttacaacaaccaaaccaacacaaaccaattacgcaattttcttgaagcatcagtaaaaaaaattttaatgtctgatgttccttatggcgtacttttatctggtggtcttgactcttctattatttctggaatcactaaaaaatttgccaaacaccgcatagaagaatcaagtaaaaaagaggtttgttttccttcacttcattcttttgctgtaggtcttaaaggcgctcctgatcttaaagctgccaaagaagtagacaatcatttaggaacagcccatcatgaaattaattttactattcaagaaggcatagatgctttaaaagatgttatttatcacattgaaacgtatgatattacaactattcgcgcatcaattcctatgtatttaatggctcgcaaaattaaagctatgggaatcaaaatgattctttctggtgaaggtgctgatgagatttttggaggttatctatattttcataaagcccctaatgctcaagaattccacaaagaaacagtccgtaaattagcttcattacatttatatgattgttcacgagccaacaaagcaatgagtgcttggggagtagaggcgcgagtgcctttcttagacaaaaactttttagatgttgctatgagacttaatcccaaagataaaatgtgtggcacaaatggcaaaatagaaaaacatattctacgacaaacatttgaatcttatttacccaaaaagattgtatggcgccaaaaagaacaattttctgatggagtaggctacagttggattgatgctttaaaacaacttgcccaaaccaaaatcacagatacacaattaaaaaatgcttatgttcgtttcccttacaatactcctacaaacaaagaaggctacatgtatcgcgaaatttttgaaatcttatttcctttgccaagtgcaataagtctttttcctggtggtccttcaattgcttgctgtactgcaaaagctatcgaatgggacaaagcttttaaacaaataaacgacccttcaggacgtgctgcattaggagtgcataatgaagcttataaggacaaataa

SEQ ID NO: 144266 - protein, 558 aa, Onion yellows phytoplasma OY-M
MCSIFGILNIKTDPQILRDQALKLSSLMRHRGPDWSRIFASQKAILAHERLSIIDVNAGAQPLYNKTKTLILAINGEIYNHLDLRKQYKDKYEFQKESDCEVILALYQEKGVNFLDELQGMFAFILYDLTKNTYLIGRDHMGIIPLYMGYYLNQNFYIASEMKALIPICQTLSIFPPGNYLYSESGKMVKYYKRNWMDYQNVYNNQTNTNQLRNFLEASVKKILMSDVPYGVLLSGGLDSSIISGITKKFAKHRIEESSKKEVCFPSLHSFAVGLKGAPDLKAAKEVDNHLGTAHHEINFTIQEGIDALKDVIYHIETYDITTIRASIPMYLMARKIKAMGIKMILSGEGADEIFGGYLYFHKAPNAQEFHKETVRKLASLHLYDCSRANKAMSAWGVEARVPFLDKNFLDVAMRLNPKDKMCGTNGKIEKHILRQTFESYLPKKIVWRQKEQFSDGVGYSWIDALKQLAQTKITDTQLKNAYVRFPYNTPTNKEGYMYREIFEILFPLPSAISLFPGGPSIACCTAKAIEWDKAFKQINDPSGRAALGVHNEAYKDK

SEQ ID NO: 144267 - DNA, 1677 bp, Drosophila melanogaster
  CDS (1)..(1677)
atgtgcggaatttttgccatattttcgagggatggggagccgatacccacgcaaatcctccatggaagcaaacacagtttaagggaactggcctatcgacagagtggcaagcatcggcatcggggtccagattccacgggggtctatgtgaattccttggaaggggtggccatgattcatgaacgcctgcgaatcattggcgtggaaatgggcgaccaacccttcgtctctgaagatggtaacctcatcctggtggccaatggagagatctacaattatctggagctttcggctgagattgcgaaaaagcgtggctcctacaaccccatgagcgattgccacgtgatactggaactgtaccaggattatggaaaggatcttctgcaatacatcactggaatgtttgcttttgccttgtacgataggaagaccaaggaagtgcttcttgcccgagacccctttggcattatacccatgtatgtgggtgaggatgcgtcgggaaacctttgggtggcctcggagatgaagtgcctggtggatacctgctccaaagtggagactttcacacctggcgaggctcgtttcggtaaagttggtgactttaaaacatgctggcagtttcagcagtcttggatcaaggaggtgcccacacaaacctgcgaattatccctactgcgagccaacttggagtttgccgtgcgcagtcatctgcagtgcgatgttcaaatgggagccctgctatccggcggagtggattccagtcttatagcctccatagccacgaagataatgcgcgaacgggatcccaacttccggctgaaaacattctctgtgggtctaagggatgcacccgacttccaggcggccaggagtgtggccaaatatatagacagcgatcacaaggagatcatattcgagatcgacgaagctctggatggcattagggatattatttaccaccttgaaacctatgatgtgaccacagtgagatgtagtttgcccatgctgctactagctagatatatcaagagcacaggcatcaagatgatcctctccggcgaaggagccgatgagatctttggagggtatttatacttccacaaggccccaagctacaacgatttccacgaggagctggtgaagagagtgcgccagctgcatttatccgattgtttgcgggccaacaaggtggccatggccaagggcgtggagctgcgagtgccctttctggacacggggttcgttaaccatgtgatgcaaatccgaccggaggataagatacccggacccctcaacaaattcggggaagtacagcaaaagcgattggagaagtatgtcctgcgagctgcctttgcggataactatctgcccgatgaagtcctctggcgccagaaggagcagttctccgacggagtgggctacgattggatcgacagcatccgcagggtggccaccagccatgtcagcgatcaagaattctccgcagccgccctacgcttcccctttaacacgcccacaaccaaggaggccttctactatcgctgcattttcgccgaacaattccccggagaatcggcggcccgaaccgtggtcagatgggtgccacgcctcgattggggctgtccggaggatccatccggacgggcacaggccgtccaccaggtcaacaaaaactga

SEQ ID NO: 144268 - protein, 558 aa, Drosophila melanogaster
MCGIFAIFSRDGEPIPTQILHGSKHSLRELAYRQSGKHRHRGPDSTGVYVNSLEGVAMIHERLRIIGVEMGDQPFVSEDGNLILVANGEIYNYLELSAEIAKKRGSYNPMSDCHVILELYQDYGKDLLQYITGMFAFALYDRKTKEVLLARDPFGIIPMYVGEDASGNLWVASEMKCLVDTCSKVETFTPGEARFGKVGDFKTCWQFQQSWIKEVPTQTCELSLLRANLEFAVRSHLQCDVQMGALLSGGVDSSLIASIATKIMRERDPNFRLKTFSVGLRDAPDFQAARSVAKYIDSDHKEIIFEIDEALDGIRDIIYHLETYDVTTVRCSLPMLLLARYIKSTGIKMILSGEGADEIFGGYLYFHKAPSYNDFHEELVKRVRQLHLSDCLRANKVAMAKGVELRVPFLDTGFVNHVMQIRPEDKIPGPLNKFGEVQQKRLEKYVLRAAFADNYLPDEVLWRQKEQFSDGVGYDWIDSIRRVATSHVSDQEFSAAALRFPFNTPTTKEAFYYRCIFAEQFPGESAARTVVRWVPRLDWGCPEDPSGRAQAVHQVNKN

SEQ ID NO: 144269 - DNA, 1587 bp, Apis mellifera
  CDS (1)..(1587)
atgtgtggaatttgggctctttttggattaaatgtatcatccttaactaatatttgcagtaattttgaaaaaattacacaccgtggtccagaagcatttaaacttgaatttgattatgcaattaagaatggttattttggatttcatagattagcaattgtggataatctgtatggtatgcaaccaatgagacttcatcaatatccacatttatttttattatgtaatggtgaaatttataactataaaaagcttggtctagaatatggatttacatataccactcaatgtgatgtcgaggtgataattcatttatatgcacatcttggtattgaaaatgtgaccaggatgcttgatggagtttttgcattttgtttaatggatattaaaaataaaagaattcttataggtagagatccttatggtattaggccacttttcaaattaagttctgatgatggacaattagcaatttgttcagaaagcaagggacttatagaaataattaaattaataacttcaaaattaacattaaaaccatttccaccaggacattatgaaaaatatgaaattttaaatgatggtagaacaaaattattaaaaagtgtaaactattatcaacctggagacaaaccttgttttcaagcttttgttccttataatgatttgattaatacagatatacatggaaatataagaaaattactttcaattgctgttcagaaaagattaatgtctgatagagaaattggttgtttattatcaggaggcttggattcaagtttaattgctgctttacttgtaaaacatgcaaaagatgcaaatttatcatataaaataaaaagttttgcaattggtatgggagatagtccagatattattgcagctagacaggttgcagaatatataggaactgaacatcatgaaataatcttttttgaaaatgatgtaattgatattttagacaaacttatttatcaattagagacttgtgatattactacaattcgagcctctattggtatgtatcttgtctcaagatatatcaaacagaatacagcaacaactgtgatatttagtggagaaggtgctgatgaattagcacaaggatacatttattttagagatgcaccaaatccaatagaagctcataatgaatctgtacgattattaaaagatatatatttatatgatggtttgagagcagatagaacaactagtgcatttagtttagaattacgagttccatttttagatattcaattcacaaattattatttatcattggatgctgcttctagacaacctcaaggaaggattgaaaaatatttattgagatctgcttatgaagaattacaaaaagctcattcgaaatttccacattgtactccaaaaacgaaagaagctctttattacagaaaaatttttgagaaatattataaaggacaagctgaaagttttgtaccatatttttggatgccacggtggataaaaggaatttctgatccatccgcaagatttattatacattatgcagcagatgtaaaaaataatcaaaaagaaaatgaaaagagattaaaagtataa

SEQ ID NO: 144270 - protein, 528 aa, Apis mellifera
MCGIWALFGLNVSSLTNICSNFEKITHRGPEAFKLEFDYAIKNGYFGFHRLAIVDNLYGMQPMRLHQYPHLFLLCNGEIYNYKKLGLEYGFTYTTQCDVEVIIHLYAHLGIENVTRMLDGVFAFCLMDIKNKRILIGRDPYGIRPLFKLSSDDGQLAICSESKGLIEIIKLITSKLTLKPFPPGHYEKYEILNDGRTKLLKSVNYYQPGDKPCFQAFVPYNDLINTDIHGNIRKLLSIAVQKRLMSDREIGCLLSGGLDSSLIAALLVKHAKDANLSYKIKSFAIGMGDSPDIIAARQVAEYIGTEHHEIIFFENDVIDILDKLIYQLETCDITTIRASIGMYLVSRYIKQNTATTVIFSGEGADELAQGYIYFRDAPNPIEAHNESVRLLKDIYLYDGLRADRTTSAFSLELRVPFLDIQFTNYYLSLDAASRQPQGRIEKYLLRSAYEELQKAHSKFPHCTPKTKEALYYRKIFEKYYKGQAESFVPYFWMPRWIKGISDPSARFIIHYAADVKNNQKENEKRLKV

SEQ ID NO: 144271 - DNA, 1683 bp, Nasonia vitripennis
  CDS (1)..(1683)
atgtgtggactgtgggctctatttggtctcgacaccaattccctcacctgcgtctgcgacaacttttccaagatttcgcacagaggaccggacgcttttaagatcgagcacgacagtcgggtcaagaatgcttacctgggattccacaggctgtcgattgtcgatggactgtgcggaatgcaacctatcagggtgttcaagtatcccctgctgttcctgttgtgtaacggagagatttacaactacaaaagtttgagcaaggagtacggttttgaatactcaacgaaatgtgatatcgaggtactcatgcatctgtacgccaccaagggtgccgatggtgtctgtaagtctctggatggtgtgtttgcattctgcctgttggacattgaaaagaggaaaattttacttggcagagatccatatggtgtcaggcctctttttagagtggtcactgctaatggccaattggctgtgtcttctgaaagtaaagcattgacaggaatcgcaaacctcttgacaggagatcatgtggtagaaccattcctaccaggaacgtttgaagaatatgatcttttagaggatggtcatgtcaagtttatcaggagggagaggtaccatgagcctggacagaaaccaagcttcactacctttgttccctggaatgagctgagttcaaaagatattcacgagaatatcagaaaattattctcagctgctgtggaaaaacgtttgatggccgatagaagaataggatgcatgttgtcaggaggcttggattccagtttagtggctgccttgcttgtaaaatatgccaaacagcacaacttgccatacaaaattcagagcttctccattggtatggagggcagtccagatattctggcagcaagacaggtcgctgatcacattggcactgaacatcacgagataattatcacgcaaaaggatataacagatgtactagagaaagttatttattacactgaaacttttgacattactaccatcagagcttccattggaatgtacctaatttcgagatacatcaaaaacaacacagaaaccacagtaatcttcagtggtgagggtgctgatgaattggcacagggctatatttacttcagagatgcaccaagtgcgtttgacggtcacaaagaatctctaagactgctaaaagatatttacttgtacgacggacttcgtgccgatcggacaaccagtgcatttagtctagaattgagagtaccatttttggacttgcaatggactaactactatctatcgcttgacccgtctctgcgacaaccacaaaacggtgtggagaaacatttactcagatctgcatttgatggaactggtttgctgccagcaaacattctgtggagaggcaaagaggcatttagcgacggcgtgacaagcgtaaaaaagagcctgttccaaataatcgacgaaatcgttcaagaaagagttcaagacgaggatctacaagctgcctatgaaaaatacccgcattgcacaccaaagacaaaagaagcatactattacaggaaagtttttgaatcccattacggcggatacgcggaatctctaattccatactattggatgcctcagtgggtcaaaggcgtgacggatccttcggctcgcttcatctctcactacgagaacaagaacaaagtgtaa

SEQ ID NO: 144272 - protein, 560 aa, Nasonia vitripennis
MCGLWALFGLDTNSLTCVCDNFSKISHRGPDAFKIEHDSRVKNAYLGFHRLSIVDGLCGMQPIRVFKYPLLFLLCNGEIYNYKSLSKEYGFEYSTKCDIEVLMHLYATKGADGVCKSLDGVFAFCLLDIEKRKILLGRDPYGVRPLFRVVTANGQLAVSSESKALTGIANLLTGDHVVEPFLPGTFEEYDLLEDGHVKFIRRERYHEPGQKPSFTTFVPWNELSSKDIHENIRKLFSAAVEKRLMADRRIGCMLSGGLDSSLVAALLVKYAKQHNLPYKIQSFSIGMEGSPDILAARQVADHIGTEHHEIIITQKDITDVLEKVIYYTETFDITTIRASIGMYLISRYIKNNTETTVIFSGEGADELAQGYIYFRDAPSAFDGHKESLRLLKDIYLYDGLRADRTTSAFSLELRVPFLDLQWTNYYLSLDPSLRQPQNGVEKHLLRSAFDGTGLLPANILWRGKEAFSDGVTSVKKSLFQIIDEIVQERVQDEDLQAAYEKYPHCTPKTKEAYYYRKVFESHYGGYAESLIPYYWMPQWVKGVTDPSARFISHYENKNKV

SEQ ID NO: 144273 - DNA, 1737 bp, Anopheles gambiae str. PEST
  CDS (1)..(1737)
atgtgtggtattctttgtatatttacgcaatatacatcaacagacacaagcccacaaaatcgcacaagttgcaatggagagtcctcacagtgtggtgatctttcgtgtgattccttacgggaaatggcctttcggcaatcgagtaaacagcggcaccgaggtcccgatcaaactggcctgtgcgttaatgacgagtatggattcgtgctggtacaggagcgcctttcgattgttggagtgaaaacaggacggcagcccctaacctcaaccaacggcatgacgcatctggtagcgaacggagagatttacaactttcttcatatggcgtcgcttattaacgatgcgctgaaatttgaatactacacaccgcgcagtgattgtgacgttctggtagctttctacgagctgtttggagcagatcgattattgcaaattgttcgcggcatgttcgctttcgtgctgtacgactgcagcacccatcggctgctggtagctcgtgatccggtcggcatagtgccactttactatggttgggatgacgcagggagtttgtggtttgccagtgagttaaagtgtctagtgggttgctgtcccgaagtaaatgtgttccctcccggccattcatactatgggctaagggagagttttgtcccgaaaccttactttcaagcactatggatgacggaaatttctaccgctagagtcgacctggaactgttgaaacaccacctggaaagcgccgttgagtcacatttgcagagtgaggtgccgttcggtgctctgcttagtggtggactcgactctagcctgatcgcctccatcgccacacgcatacttcgcgcacgcacagataattcaacctttcgactaaagacatacagcattgggctggagggagaaagtcctgatctaacgtatgcacgcatggtggctgactacatcggcagtgatcacaccgaggtccgttttaccatcccggagggcatagacctcgtacgggacgctgtgtactatgccgagacttacgacgtcactacgatccgctgcatcgtagcggtaatgctgctggcaagagccatccgcagcgaaggcattaaggtggtgctctcgggcgagggggcagatgagctattcggcggctatctttattttcatcgtgccccgagtgcggccgagtttcatcgtgaaacggtgcgccgcgtacgaggacttcatctgtccgattgtttgcgtgccaacaaaggctgtgcggcctggggactggagttaagagttccgtttctcgataccgatttcttgcagcacgtaatgtccatcaggccggaggacagggcgcccggcattccgtcgcacgatgatcacagtgcgctggaaaaacgtattcttcgacaagcgttcgccgatggtaattaccttccgtcggaagtgctctggagacagaaggagcagttttccgatggagttggatatgcctggatcgatgccattgcccagtgggcatcgaagcgtgtcactcagacggagtatgcagctgccgccgatagatttcccttcaacacgccgacaacgaaagaagcgttctactatcggaagctattcgagcaaatgttcccgggggaaagctttgcacgtacggtgcaacggtggattccacgcacggattggggttgctcggaagatccgtccggtagaaagcaagacgttcatcgaggtcataataggcgagaacaggaatag

SEQ ID NO: 144274 - protein, 578 aa, Anopheles gambiae str. PEST
MCGILCIFTQYTSTDTSPQNRTSCNGESSQCGDLSCDSLREMAFRQSSKQRHRGPDQTGLCVNDEYGFVLVQERLSIVGVKTGRQPLTSTNGMTHLVANGEIYNFLHMASLINDALKFEYYTPRSDCDVLVAFYELFGADRLLQIVRGMFAFVLYDCSTHRLLVARDPVGIVPLYYGWDDAGSLWFASELKCLVGCCPEVNVFPPGHSYYGLRESFVPKPYFQALWMTEISTARVDLELLKHHLESAVESHLQSEVPFGALLSGGLDSSLIASIATRILRARTDNSTFRLKTYSIGLEGESPDLTYARMVADYIGSDHTEVRFTIPEGIDLVRDAVYYAETYDVTTIRCIVAVMLLARAIRSEGIKVVLSGEGADELFGGYLYFHRAPSAAEFHRETVRRVRGLHLSDCLRANKGCAAWGLELRVPFLDTDFLQHVMSIRPEDRAPGIPSHDDHSALEKRILRQAFADGNYLPSEVLWRQKEQFSDGVGYAWIDAIAQWASKRVTQTEYAAAADRFPFNTPTTKEAFYYRKLFEQMFPGESFARTVQRWIPRTDWGCSEDPSGRKQDVHRGHNRREQE

SEQ ID NO: 144275 - DNA, 1752 bp, Magnaporthe grisea 70-15
  CDS (1)..(1752)
atgtgtggcatcttcgcctgccacgcacacccggatgtgcaaaaattcaagcccaccgccctccggctcgcaaaagcgatccgacatcggggtcccgattggagcggaagcgtgacttgcaaccagacgatattgtgccatgagcgtctcagtattgttggtgttgagagcggtgcccagccccttaccaacgaggatgagagcatcattctggccgtcaatggcgagatctacaaccacaggctggtccgtaagagcttgaagaccccataccacttcaagacaacatccgactgcgaggtcatcatccctctgtatatggaacatggcctcgacgcgcccaagtacctggatggcatgttctcatttgtcctgtacgacaagaagcagaaccgcacgatagccgcacgagaccccatcggagttacgaccttctaccagggttggtcgtcctcagagccgggcgcggtttactttggatccgagctcaagtgcctctaccaggtttgcgataagattgaggcattccctcccggtcacatctatgacagcttgaccggcgagaggactcgctacttccaaccaacatggtgggacccaaagagggtaccggaaacaccactcgatctcacaaagttgcgcgaggcgttggagaagtcggtcaggaaacgtcttatggccgaggtgccgtacggtgttcttctgtcaggtggtttggactcaagtctggtggcatcaatcgctcagcgtgagacaaagcgcctgaagaagcttgcgattgaggctggtcttgaggacttgcctgccgagccaacaggaaaccatgaccagggcgagggtcttgtgggaattgacgacgagaacaagttgtcaaccatgacctaccttcctcagctcaactcgttctcgattggtctgccaggctcgcccgacaacaaggcagcccttgaggtggctaagttcctgggcacaaagcaccatgttatgaccttcacaatcgaggatggtctcaacgctctttcggacgtcatttaccaccttgagtcttacgacgtgaccacgatccgagcatcaacccccatgtacttgctttctcgtaagatcaaggctatgggtatcaagatggtgttgagcggcgagggcagcgacgaggcctttggtggctatctctacttccacaatgcccctgacaaggatgctttccacgacgagacggtccgtcgcgtcaagaacttgcacctgtccgactgcttgcgtgccaacaagtcgacatcagcctggggattagaggctcgtgtgccattccttgacaaggagttccttgagctggccatgaacattgatcccaaggagaagatgatcaccaaggagcgcatcgagaagtacattgtccgcaaggcgttcgacacctctgacgaccccaacgccgagccgtacctgccagataacatcctttggcgccagaaggagcagttctctgacggtgtgggctatggctggatcgacgcactcaaggacaatgccgagatccaagtgaccgacgagatgatgaagaaccccaagcccgagtggggagacgacatcccagacactaaagaggcttactggtacaggtgcatgtttgacgagcacttccctccacactgcgcctcgacggtggagcgctggaccccgacgtggtctaagcagaccgatcccagtggcagagccatcgcggtccatgctgccaagtatgaccacatcagcgagtaa

SEQ ID NO: 144276 - protein, 583 aa, Magnaporthe grisea 70-15
MCGIFACHAHPDVQKFKPTALRLAKAIRHRGPDWSGSVTCNQTILCHERLSIVGVESGAQPLTNEDESIILAVNGEIYNHRLVRKSLKTPYHFKTTSDCEVIIPLYMEHGLDAPKYLDGMFSFVLYDKKQNRTIAARDPIGVTTFYQGWSSSEPGAVYFGSELKCLYQVCDKIEAFPPGHIYDSLTGERTRYFQPTWWDPKRVPETPLDLTKLREALEKSVRKRLMAEVPYGVLLSGGLDSSLVASIAQRETKRLKKLAIEAGLEDLPAEPTGNHDQGEGLVGIDDENKLSTMTYLPQLNSFSIGLPGSPDNKAALEVAKFLGTKHHVMTFTIEDGLNALSDVIYHLESYDVTTIRASTPMYLLSRKIKAMGIKMVLSGEGSDEAFGGYLYFHNAPDKDAFHDETVRRVKNLHLSDCLRANKSTSAWGLEARVPFLDKEFLELAMNIDPKEKMITKERIEKYIVRKAFDTSDDPNAEPYLPDNILWRQKEQFSDGVGYGWIDALKDNAEIQVTDEMMKNPKPEWGDDIPDTKEAYWYRCMFDEHFPPHCASTVERWTPTWSKQTDPSGRAIAVHAAKYDHISE

SEQ ID NO: 144277 - DNA, 1740 bp, Gibberella zeae PH-1
  CDS (1)..(1740)
atgtgtggaatcttcgcctgtcaccgtcatcccgatgtggaaaagttcaagcctacggctctgaaactcgcaaagcaaattcgtcaccgtggccccgactggagtggaagcgttatttccaaccacaccattctctgccatgagcgtctcagcattgtcggtgttgagtccggagcccagcccctgaccaacgccgacgacagcatcattctcgccgtcaacggtgagatctacaaccatcgtcacattcgaaagcacctcaaggagcgataccacttcaagaccacttctgattgcgaggtcatcatccccttgtacaccgaatttgacaccgatgcccccaaccaccttgatggcatgttctcatttgtcctctacgacaagaagcaagaccgcacgattgccgctcgcgaccctatcggtattaccacattttaccagggctggtcctccactgagcctggaaccatctacttcgcctccgagttgaagtgtttgcacagcgtttgcgacaagatcgtcgctttccctcccggccatgtctacgactccaagactggcgagaccactcgctacttcaacccctcttggtgggaccccaagaaggttcccagtacccctgtcgactacaaggtccttcgacaggctcttgagaagtccgtccgaaagcgactcatggctgaggtgcctttcggtgttcttctttccggtggtcttgattcgagtttgactgcctccatcgcccagcgtgaggtgacccgactccgaaaacaggctcttgaggccaacggcaacgttctccctgtcgaggaccctgacactggtgagggtcttgttggtgttgacgatgacgaccacctcgacactcttacctaccttccccagctcaactctttctccatcggtcttccaggctctcccgataacaaggccgctcttgaggtcgctaagttcctcgggaccaagcaccatgtcatgacctttaccatcgaggacggtctcaacgctctttctgacgttatcttccacctcgagacttacgacgtcaccaccatccgagcctctacccccatgtacctcttgtcgagaaagatcaaggctatgggtatcaagatggttctgagtggcgagggcagtgacgagatctttggcggttacttgtacttccacgctgctcctgacaaggactctttccacgaggaaaccgtgcgacgtgtcaagaacttgcatctgtctgattgtctgcgagccaacaagtccacatctgcttggggtcttgaggctcgtgttcctttccttgacaaggagttccttgagtactccatgaacattgatcctcaggacaagatgatcactaaggagaagctcgaaaagtacatcctccgcaaggctttcgatacttcggatgagcctggcgagcagccttaccttcccgacaacatcctctggcgacagaaggaacagttctctgatggtgtcggctacggttggatcgacgccctcaaggacaccgctgagaagcaggtcactgatgagatgatgaagaaccccaagcctgagtggggcaacgatatccctgataccaaggaggcgtactggtaccgatgcatgtttgacgagcacttcccccctcactgcgcgtcaactgtcatgcgctggactcccacctggtccaagcagactgaccctagtggccgagccattgccacccacaacgccaagtacgacagcgcggcttaa

SEQ ID NO: 144278 - protein, 579 aa, Gibberella zeae PH-1
MCGIFACHRHPDVEKFKPTALKLAKQIRHRGPDWSGSVISNHTILCHERLSIVGVESGAQPLTNADDSIILAVNGEIYNHRHIRKHLKERYHFKTTSDCEVIIPLYTEFDTDAPNHLDGMFSFVLYDKKQDRTIAARDPIGITTFYQGWSSTEPGTIYFASELKCLHSVCDKIVAFPPGHVYDSKTGETTRYFNPSWWDPKKVPSTPVDYKVLRQALEKSVRKRLMAEVPFGVLLSGGLDSSLTASIAQREVTRLRKQALEANGNVLPVEDPDTGEGLVGVDDDDHLDTLTYLPQLNSFSIGLPGSPDNKAALEVAKFLGTKHHVMTFTIEDGLNALSDVIFHLETYDVTTIRASTPMYLLSRKIKAMGIKMVLSGEGSDEIFGGYLYFHAAPDKDSFHEETVRRVKNLHLSDCLRANKSTSAWGLEARVPFLDKEFLEYSMNIDPQDKMITKEKLEKYILRKAFDTSDEPGEQPYLPDNILWRQKEQFSDGVGYGWIDALKDTAEKQVTDEMMKNPKPEWGNDIPDTKEAYWYRCMFDEHFPPHCASTVMRWTPTWSKQTDPSGRAIATHNAKYDSAA

SEQ ID NO: 144279 - DNA, 1725 bp, Candida glabrata CBS 138
  CDS (1)..(1725)
atgtgtggtatttttgcagcttacaagcaccaagatgtgcatgctttcaagccaaaggctcttcaactatctaagagaattagacaccgtggtccagattggtcgggtaacgttgtcaagaactccactatcatggtccatgaaagattggccattgttggtttggattccggtgctcaaccaatcaccagtgaagatggtgactacaccttgtgtgtcaacggtgaaatttacaaccacattcagctaagagaacaattcccagattacaagttcaagactctaagtgactgtgaacctatcatcccagcttacttggaacacgacatcgatgctccaaaatacttggacggtatgttcgcttggtgtctgtacgatgctaagcaagacagaattgtagctgcaagagatccagtcggtatcactaccttgtacatgggtcgttgttcttcttctccaaagactgttttcttcgcttctgaattgaagtgtctgacagatgactgtgacgagatcactgccttcccaccaggtcacgtctatgactctaagaccgatcaaatcaccagatacttcactccagactggatcgatgagtcccgtattccaactactccagttaacttcaaggatatcagagaatctctagaaaaggctgtcagaaagagactgatggctgaagtcccatacggtgttcttttgtccggtggtttggactcttccctaattgcatctatcgctgctcgtgaaaccgaaaaagctaacgaggaaaacgacgctgctgacaacgacgcctccgcttccaagcaactggccggtattgataaccaaggtcacctacatactgctggttggtctcgtctgcattctttcgcaattggtcttccaaatgcgccagatctacaagctgccagaaaggttgctaaattcattggctctattcaccacgaacacacattcactctacaagaaggtctagatgccttggatgatgtcatctaccacttggaaacttacgatgtcaccaccatcagagcttccactccaatgttcttgctatctagaaagatcaaagctcaaggtgtgaagatggttttgtctggtgaaggttctgatgaaatcttcggtggttatctatatttcgctcaagctccatctgctactgaattccatattgagtctgttaagcgtgtaaagaacctacacttggcagactgtctaagagccaacaagtctaccatggcttggggtctagaagctcgtgttccattcttggataaggagttcttgcaattatgtatgaacattgaccctaaggacaagatgatcgaccaatcagccggccgtatcgagaagtacatcctgagaaaggctttcgacacatctgatgagccagacgtaaaaccatacttgccagaagaaattctatggagacaaaaggaacaattctctgatggtgttggttactcctggatcgacggtttgaaggacactgctgaaagagtcatctctgacactatgttctctaaccctaagattgaatggggtgaagatatcccaactactaaggaagcttactggtacagattgaagtttgatgctcttttcccacaaaagactgctgcttctactgtcatgagatggattccaaaggccgactggggctgtgctgaagatccttctggtagatacgccaagatccacgaacaacacgttactgcttaa

SEQ ID NO: 144280 - protein, 574 aa, Candida glabrata CBS 138
MCGIFAAYKHQDVHAFKPKALQLSKRIRHRGPDWSGNVVKNSTIMVHERLAIVGLDSGAQPITSEDGDYTLCVNGEIYNHIQLREQFPDYKFKTLSDCEPIIPAYLEHDIDAPKYLDGMFAWCLYDAKQDRIVAARDPVGITTLYMGRCSSSPKTVFFASELKCLTDDCDEITAFPPGHVYDSKTDQITRYFTPDWIDESRIPTTPVNFKDIRESLEKAVRKRLMAEVPYGVLLSGGLDSSLIASIAARETEKANEENDAADNDASASKQLAGIDNQGHLHTAGWSRLHSFAIGLPNAPDLQAARKVAKFIGSIHHEHTFTLQEGLDALDDVIYHLETYDVTTIRASTPMFLLSRKIKAQGVKMVLSGEGSDEIFGGYLYFAQAPSATEFHIESVKRVKNLHLADCLRANKSTMAWGLEARVPFLDKEFLQLCMNIDPKDKMIDQSAGRIEKYILRKAFDTSDEPDVKPYLPEEILWRQKEQFSDGVGYSWIDGLKDTAERVISDTMFSNPKIEWGEDIPTTKEAYWYRLKFDALFPQKTAASTVMRWIPKADWGCAEDPSGRYAKIHEQHVTA

SEQ ID NO: 144281 - DNA, 1725 bp, Kluyveromyces lactis NRRL Y-1140
  CDS (1)..(1725)
atgtgtggtatatttgcttcattcagaaaccctgatgttcaggcttacaaaccaaaagctttacaattatccaagagaatcagacaccgtggtccagattggtcaggtaacattgttaagaactctactattctagttcacgaaagattggctattgtcggattggactctggtgcccaaccaatcacttccgaagatggttcttacactttggccgtcaatggtgaaatttacaaccatatcatgttgagagaagaatgtgcaagctatccattcaagactttgtctgactgtgaacctatcattccattatacgaaaagtacgatatcgatgctccaaaacacttggatggtatgttcgcttggtgtttgtacgattctaagaaggatcgtatcatcgctgccagagacccaatcggtattaccactctttacatgggtagatcctctgcttctccaaagtctgtttggttctccagtgaactgaaatgtttgaccgatgactgtgatgaaatcattgctttcccaccaggtcacgtatacgactctgaaactgacaaattgaccagatatttcactcctgactggttggacgaatccagaattccaaccaccccagttgactttaaggctgttagagaaagtttggaaaaggctgttagaaagagattaatggctgaagttccttacggtgttctattgtccggtggtttggattcctctttgattgctgctattgccgcaagagaaacagaaaaaactaatgccgaacttgatccagttgtttatgacagtgacccacatcaattggctgggcttgacgaacaaggtcatctacatgctgctggctggtctagattgcactcattcgctgttggtttgccaaacgctccagatttacaagctgctcgtaaggtggctacattcatcggttctatccatcacgaacatactttcactttacaggaaggtctagacgctttggacgatgttatctaccacttagaaacttacgatgtcactactatccgtgcttccaccccaatgttcttgctttctcgtaagatcaaggctcaaggtgttaagatggttttgtccggtgaaggttccgatgaaatctttggtggttatctatacttcgcacaagctccatcagctgctgaattccacgtcgaatctgtcaagagagttaagaacttgcacttggctgattgtttgcgtgctaacaaatctaccatggcttggggtctagaagctcgtgttccattcttggacagggacttcctacaactatgtatgaacattgatccaaacgacaagatgatcaaaccagctgaaggtaagatcgaaaaatacattctaagaaaggcattcgataccacggatgaaccagatttgaaaccatacttaccagaagaaatcttgtggagacaaaaggaacaattctccgacggtgtcggttactcttggattgatggtctaaaggatgcagctgaaagcactatctctgatgaacaattcgctcaaccaaaggctgaatggggtgacgatattccaactaccaaggaagcctactggtacagattgaagttcgatgctttgttcccacaaaagaccgctgcttccactgtcatgagatggattccaaaggctgactggggttgtgctgaagatccttccggtagatacgccaagatccacgaacaacacgttgataaaaaataa

SEQ ID NO: 144282 - protein, 574 aa, Kluyveromyces lactis NRRL Y-1140
MCGIFASFRNPDVQAYKPKALQLSKRIRHRGPDWSGNIVKNSTILVHERLAIVGLDSGAQPITSEDGSYTLAVNGEIYNHIMLREECASYPFKTLSDCEPIIPLYEKYDIDAPKHLDGMFAWCLYDSKKDRIIAARDPIGITTLYMGRSSASPKSVWFSSELKCLTDDCDEIIAFPPGHVYDSETDKLTRYFTPDWLDESRIPTTPVDFKAVRESLEKAVRKRLMAEVPYGVLLSGGLDSSLIAAIAARETEKTNAELDPVVYDSDPHQLAGLDEQGHLHAAGWSRLHSFAVGLPNAPDLQAARKVATFIGSIHHEHTFTLQEGLDALDDVIYHLETYDVTTIRASTPMFLLSRKIKAQGVKMVLSGEGSDEIFGGYLYFAQAPSAAEFHVESVKRVKNLHLADCLRANKSTMAWGLEARVPFLDRDFLQLCMNIDPNDKMIKPAEGKIEKYILRKAFDTTDEPDLKPYLPEEILWRQKEQFSDGVGYSWIDGLKDAAESTISDEQFAQPKAEWGDDIPTTKEAYWYRLKFDALFPQKTAASTVMRWIPKADWGCAEDPSGRYAKIHEQHVDKK

SEQ ID NO: 144283 - DNA, 1722 bp, Debaryomyces hansenii CBS767
  CDS (1)..(1722)
atgtgtggtatttttgcagcttttagacaaccagaggttgaacagtttaaatcaaaggctttacagtattccaagagaatccgtcaccgtggtccagattggtcaggtaacgttattcaaaactccaccatcttatgtcacgaaagattggctattgtcgggttagactccggtgcccaaccaattacgtctgaagacggtaactacaccttagcagttaacggtgaaatctataaccatattcaattaagagatgagttcccatcatacccatacaaatctttatctgattgtgaaccaattattccattatttgaaaaatacgacgtcgatgcgccaaagtatttggacggtatgttcgcatgggtattgtatgacaagaaaaacgaccgtattgtcgccagtagagatcctattggtatcaccactttgtacatgggtaagagttccaagaacccaaaaactcgttactttgcatctgaattaaaatgtcttactgacgaatgtgatgaaatctttgcgttcccaccaggtcacgtctacgattctaacaccgatgaaatcaccagatacttcaatccttcatggtgggaagaatcgtcgattccatctaagagagtcgacctcaaggaagtcagagaaactttggaattagctgttagaaagagattaatggcagaagttccatatggtgtcttgttatcaggtggtttagattcctccttgattgcagccattgctgctagagaaactcaaaaggctgcagcaggcatcagcaaggatggaattgatgcaaacaaagaattatctggtgttgatgaaaagggttctttacactccagtggttggaatcagttacactcctttgctatcggtcttccaggtgctccagacttaatcgctgctgaaaaggttgctcattttattggtactattcaccattcccacacctttactttagacgaaggtttggatgctttggatgatgttatctataacttggaaacttacgatgttactactatcagagcgtccactcctatgtacttattatcgagaaagatcaaggcccaaggtgtgaagatggttttgtcaggtgaaggttctgatgaaattttcggaggttacttatacttcgctaatgctccaagtccaaaggacttccacgaagaatgtgttaagagagttaaaaacttgcattatgctgactgtttaagagctaacaagtcaactatggcttggggattagaagccagagttccattcttagacaagcaatttttggaagtttgtatgaacattaacccagaagataaattaatcaagccagctgagggcaagattgaaaaatacattttgagaaaggcgtttgacacttctgatgatccaaacgccaagccatacttaccagaggaaatcttgtggagacaaaaggaacaattttcggatggtgtcggttactcatggatcgatggcttaaaggatgctgcagaagcagctatttccgatgaacaattcgctaaccctaaagcagaatggggtacagatgttccaacaactaaggaagcttactggtacagatgtaaattcgatgaaattttccattctaaggctgctgcttcaactgttatgagatgggttccaaaggctgaatggggttgtcatgctgatccatccggtagattcgctactatccatgaacagaaagttgaccaagattaa

SEQ ID NO: 144284 - protein, 573 aa, Debaryomyces hansenii CBS767
MCGIFAAFRQPEVEQFKSKALQYSKRIRHRGPDWSGNVIQNSTILCHERLAIVGLDSGAQPITSEDGNYTLAVNGEIYNHIQLRDEFPSYPYKSLSDCEPIIPLFEKYDVDAPKYLDGMFAWVLYDKKNDRIVASRDPIGITTLYMGKSSKNPKTRYFASELKCLTDECDEIFAFPPGHVYDSNTDEITRYFNPSWWEESSIPSKRVDLKEVRETLELAVRKRLMAEVPYGVLLSGGLDSSLIAAIAARETQKAAAGISKDGIDANKELSGVDEKGSLHSSGWNQLHSFAIGLPGAPDLIAAEKVAHFIGTIHHSHTFTLDEGLDALDDVIYNLETYDVTTIRASTPMYLLSRKIKAQGVKMVLSGEGSDEIFGGYLYFANAPSPKDFHEECVKRVKNLHYADCLRANKSTMAWGLEARVPFLDKQFLEVCMNINPEDKLIKPAEGKIEKYILRKAFDTSDDPNAKPYLPEEILWRQKEQFSDGVGYSWIDGLKDAAEAAISDEQFANPKAEWGTDVPTTKEAYWYRCKFDEIFHSKAAASTVMRWVPKAEWGCHADPSGRFATIHEQKVDQD

SEQ ID NO: 144285 - DNA, 1695 bp, Yarrowia lipolytica CLIB122
  CDS (1)..(1695)
atgtgtggaattttcgccgcctacaaactgcccgacgtggccgagtacaagacacatgcgctgcagctgtccaagcgaatccgacaccggggccccgactggtcgggaaactgctccaagaacaacaccatcatttgccacgagcgactggccattgtgggtctggacaccggagcccagcccatcacctcgcctgacgagtcgattgttctgggagtgaacggagagatctacaaccaccgaatcctgcgaaaggagttccccgactacaagttcaagacccactcggactgtgagcccatcattcctctgtacgagaagtacggcatcgacgcccccaagaagctcgacggaatgtttgcctttgttctgtacgactccaacaaggaccgaattatcgccgcccgagaccccattggaatcaccaccctgtacatgggccgatcttacaagaacccccagactgtgtggtttgccagcgagctcaagtgtctggtggacgactgtgacgagatcaaggccttcccccccggccacgtctacgactccgacaccgacaagatcacccgatactttgagccctcctggtgggacggatccaagatccccaccaagcgagttgactacaaggagctccgagaggctctggaggctgctgttcgaaagcgactcatgtccgaggttccctacggtgttctgctttccggcggtctcgattcttctctgattgcctccatcgctgcccgagagacccgacgagctgctcccgagaagaccgtcaaccaggatcttgccggtgtcgacgagcagggccacctgaccaactcttccggctcgcgactgcactccttctccgtcggtctgcccggcgctcccgatctgcttgccgcccagaagtgtgccgagttcattggcaccatccatcacgagtacaccttcactgtccaggagggtctggacgctcttcgagacgtcatctatcacctggagacctttgacgtgaccaccatccgagcctccacccccatgtacctgctttctcgaaagatcaaggccggaggagtcaagatggttctgtccggtgagggatccgatgaggtctttggcggctacttgtactttggcgctgctccctctcccgaggccttccacaccgagtgtgtgcagcgagtcaagaacctgcactacgccgactgtctgcgagccaacaagtccaccatggcctggggactggaggcccgagtgcccttcctggacaagcagttcctggaggttgccatgaacattgatcctaaggacaagatcatcgacaaggaccacattgagaagtactccatccgaaaggcctttgatacctccgacgagcccggcgctgagccctacctgcccgacgagattctgtggcgacagaaggagcagttttccgacggagttggctactcgtggatcgacggtctcaaggatgccgccgagaacaccatcaccgacgagcagctcaagaaccccaagcctcactggggtgctgacgttcccaagaccaaggaggcctactggtaccgatgcatgttcgacgagctgttcccccagcccgccgccgccaccaccgtcatgcgatggatccccaaggccgactggggatgtgccgaggatccttccggacgatacgtcaagtctcactctgctcataagcagtag

SEQ ID NO: 144286 - protein, 564 aa, Yarrowia lipolytica CLIB122
MCGIFAAYKLPDVAEYKTHALQLSKRIRHRGPDWSGNCSKNNTIICHERLAIVGLDTGAQPITSPDESIVLGVNGEIYNHRILRKEFPDYKFKTHSDCEPIIPLYEKYGIDAPKKLDGMFAFVLYDSNKDRIIAARDPIGITTLYMGRSYKNPQTVWFASELKCLVDDCDEIKAFPPGHVYDSDTDKITRYFEPSWWDGSKIPTKRVDYKELREALEAAVRKRLMSEVPYGVLLSGGLDSSLIASIAARETRRAAPEKTVNQDLAGVDEQGHLTNSSGSRLHSFSVGLPGAPDLLAAQKCAEFIGTIHHEYTFTVQEGLDALRDVIYHLETFDVTTIRASTPMYLLSRKIKAGGVKMVLSGEGSDEVFGGYLYFGAAPSPEAFHTECVQRVKNLHYADCLRANKSTMAWGLEARVPFLDKQFLEVAMNIDPKDKIIDKDHIEKYSIRKAFDTSDEPGAEPYLPDEILWRQKEQFSDGVGYSWIDGLKDAAENTITDEQLKNPKPHWGADVPKTKEAYWYRCMFDELFPQPAAATTVMRWIPKADWGCAEDPSGRYVKSHSAHKQ

SEQ ID NO: 144287 - DNA, 1716 bp, Aspergillus nidulans FGSC A4
  CDS (1)..(1716)
atgtgtggtatcttcgcctgtcaccatcatccggatgtacaggcattcaagcctacagctttgcgcatggcaaaggctgtgcgccatcgtggaccggactggagtggaagcttcatcgctgataagacgattctttgccacgagcgtctgtgtatcgtcggtgtcgactccggcgctcagcccctcgttaacgacgatgaatccctcgccttggccgtcaacggtgaaatttacaaccaccgcatcgtgaggaagaccttggacgtggaatacaactataagacacactcggactgcgaagtcatcatccctctgtacatgaaatatggtctcgatgctcccaaacatcttgatggcatgttcgcctgggttctttatgacaagaaggaggatagggttattgcggcacgtgaccctattggtatctgcagtttctacatcggctggtcctctcagactcctggagccgtatactttgcctccgagttgaagagtttgcaccccgtctgcgacaaggtcgaggcttttcctcctggccatgttttcgactccaagagcggtgaattttcccgctacttccaaccctcatggtgggacccgaccaacgttcccagtacgcccgttgattacaaggcgattcgtgagtctctcacgaggtctgtgcgcaagcgcctaatggcagaagttccgtatggtgttctgttgtctggtggtcttgattctagcttggttgcttcgattgctcagcgggaaactctgcgcatgcagaaggctagctccggtgtcaagagcgaggccaacggtgaactggtcggtatcgacgacgagaacgagctttctactgtcaactccttccagcagctgcaatctttctccattggtctccctggtgctcccgacacagaggctgccatggaggtggctaagtttttgggaaccaagcaccacgccctcaccttcactattgaagatggtctcaacgccctatcggatgttatctaccatctggagacatacgatgtgaccactatccgtgcgtccacccccatgtacctgcttagccggaagatcaagggacttggagtcaagatggttctgagtggtgagggtagcgacgagatcttcggcgggtacctctacttccatgctgcacccaacaaggaggagttccacaaggaaaccgttagacgtgtaaagaacctgcacttggcagactgcctcagagccaacaagtcaacatcagcctggggcttggaggcgcgagttcctttcctcgacaaggccttcattgagacgtcgatgtcggttgatccccaggagaagatgatcacaaaggaccgcattgagaaatacatcctgcgcaaggcgttcgacacttccgatgagcccgacgtcgagccgtacctgcccgacaagatcctctggcgccagaaggagcagttcagtgacggtgtcggctacagctggatcgatggtctgaaggaccacgctgagcttcacgtcaccgacgagatgatgaagaaccctaagcccgagtggggtgatgatattccaactaccaaggaagcttactggtaccgcatgatgtttgacgagcacttcccatcctactgcgcgtccacagtcgagcggtgggtccccacatggtcgaagcagagcgaccccagtggaagagccattgctacccacaacgccaagtacgatgacgccgaatag

SEQ ID NO: 144288 - protein, 571 aa, Aspergillus nidulans FGSC A4
MCGIFACHHHPDVQAFKPTALRMAKAVRHRGPDWSGSFIADKTILCHERLCIVGVDSGAQPLVNDDESLALAVNGEIYNHRIVRKTLDVEYNYKTHSDCEVIIPLYMKYGLDAPKHLDGMFAWVLYDKKEDRVIAARDPIGICSFYIGWSSQTPGAVYFASELKSLHPVCDKVEAFPPGHVFDSKSGEFSRYFQPSWWDPTNVPSTPVDYKAIRESLTRSVRKRLMAEVPYGVLLSGGLDSSLVASIAQRETLRMQKASSGVKSEANGELVGIDDENELSTVNSFQQLQSFSIGLPGAPDTEAAMEVAKFLGTKHHALTFTIEDGLNALSDVIYHLETYDVTTIRASTPMYLLSRKIKGLGVKMVLSGEGSDEIFGGYLYFHAAPNKEEFHKETVRRVKNLHLADCLRANKSTSAWGLEARVPFLDKAFIETSMSVDPQEKMITKDRIEKYILRKAFDTSDEPDVEPYLPDKILWRQKEQFSDGVGYSWIDGLKDHAELHVTDEMMKNPKPEWGDDIPTTKEAYWYRMMFDEHFPSYCASTVERWVPTWSKQSDPSGRAIATHNAKYDDAE

SEQ ID NO: 144289 - DNA, 1722 bp, Candida albicans SC5314
  CDS (1)..(1722): transl_table=12
atgtgtggtatttttgcagcttacagacaaccagaggttgaagatttcaaaagtaaagctttacaatattccaaattaattagacatagaggtccagattggtcaggaaatgttgttcaaaacagcaccatattatgtcatgaaagattggctattgttggtttagattctggtgctcaacctattgtttcaccagatggtaactttactttggccgttaacggggaaatctataaccatattcaattaagagaacaatttcctgattataaattcaaatctttgagtgattgtgaaccaatcattcctcttttcacaaaatacgacattgatgccccaaaacatttagatggtatgtttgcttgggttttatacgacaagaaaaatgatagaatagtcgctgctagagatccaatcggtatcaccactttatacatgggtaaatcttctaaatctcctaaaacaagatattttgccagtgaattgaaatgtttgattgaagaatgtgacgaaatttttgcatttccaccaggtcatgtttatgattccaacactgatgaaataacaagatacttcaaaccatcttggtgggatgcatctaaagttccagaacaacacgttgactttaaaaaagttagagaaactttagaattggccgtgagaaagagattaatggctgaagttccttatggtgttttattatctggtggattggattcatctttaattgcttctattgcctctagagaaaccaaaaaagctgctcaagcttcatttaacccagaaggtatcgatgccaacaaggaattgtctggtgttgatgacaaaggttcattgcattccactggggtattcaaccaattacattcatttgctattggtttacctggtgctcctgatttattggctgctgaaaaagtcgctcatttcattggtaccattcatcattctcatactttcactttagaagaaggtcttgatgccttggatgatgtcatctaccatttggaaacttatgatgttaccaccattagagcttcaacaccaatgtacttgttatcaagaaaaatcaaagcccagggtgttaaaatggttctttctggtgaaggttccgatgaaatctttggtggatacttgtattttgccaatgctccaagtgctaaagaattccatgaagaatgtgtcaagcgagttaagaacttgcattatgctgattgtcttagagccaacaaatccaccatggcttggggattggaagccagagttccattcttggataaacaatttttggaagtttgtatgaacatcaacccagaagataaattgattcaaccaggtaaaattgaaaaatacattttaagaaaagcatttgataccagtgatgaaccagatgtcaaaccttatttaccagaagaaatcctttggagacaaaaggaacaattttccgacggggttggttattcatggattgatggattaaaagatactgctgaaaaaatggttagtgatgaagaatttgctcatccaaaaccagaatggggtgatgatattccaactactaaagaggcttactggtacagatgtaagtttgataaaatgtttaacggttcaaaagctgctgcatctactgttatgagatggattccaaaagctgaatggggttgtcatgccgatccatcaggaagatacgccgctactcatgatcataaagtcgctcaatag

SEQ ID NO: 144290 - protein, 573 aa, Candida albicans SC5314
MCGIFAAYRQPEVEDFKSKALQYSKLIRHRGPDWSGNVVQNSTILCHERLAIVGLDSGAQPIVSPDGNFTLAVNGEIYNHIQLREQFPDYKFKSLSDCEPIIPLFTKYDIDAPKHLDGMFAWVLYDKKNDRIVAARDPIGITTLYMGKSSKSPKTRYFASELKCLIEECDEIFAFPPGHVYDSNTDEITRYFKPSWWDASKVPEQHVDFKKVRETLELAVRKRLMAEVPYGVLLSGGLDSSLIASIASRETKKAAQASFNPEGIDANKELSGVDDKGSLHSTGVFNQLHSFAIGLPGAPDLLAAEKVAHFIGTIHHSHTFTLEEGLDALDDVIYHLETYDVTTIRASTPMYLLSRKIKAQGVKMVLSGEGSDEIFGGYLYFANAPSAKEFHEECVKRVKNLHYADCLRANKSTMAWGLEARVPFLDKQFLEVCMNINPEDKLIQPGKIEKYILRKAFDTSDEPDVKPYLPEEILWRQKEQFSDGVGYSWIDGLKDTAEKMVSDEEFAHPKPEWGDDIPTTKEAYWYRCKFDKMFNGSKAAASTVMRWIPKAEWGCHADPSGRYAATHDHKVAQ

SEQ ID NO: 144291 - DNA, 1722 bp, Candida albicans SC5314
  CDS (1)..(1722): transl_table=12
atgtgtggtatttttgcagcttacagacaaccagaggttgaagatttcaaaagtaaagctttacaatattccaaattaattagacatagaggtccagattggtcaggaaatgttgttcaaaacagcaccatattatgtcatgaaagattggctattgttggtttagattctggtgctcaacctattgtttcaccagatggtaactttactttggccgttaacggggaaatctataaccatattcaattaagagaacaatttcctgattataaattcaaatctttgagtgattgtgaaccaatcattcctcttttcacaaaatacgacattgatgccccaaaacatttagatggtatgtttgcttgggttttatacgacaagaaaaatgatagaatagttgctgctagagatccaatcggtatcaccactttatacatgggtaaatcttctaaatctcctaaaacaagatattttgccagtgaattgaaatgtttgattgaagaatgtgacgaaatttttgcattcccaccaggtcatgtttatgattccaacactgatgaaataacaagatacttccagccatcttggtgggatgcatctaaagttccagaacaacacgttgactttaaaaaagttagagaaactttagaattggccgtgagaaagagattaatggctgaagttccttatggtgttttattatctggtggattggattcatctttaattgcttctattgcctctagagaaaccaaaaaagctgcccaagcttctttcaacccagaaggtatcgatgccaacaaggaattgtctggtgttgatgacaaaggttcattgcattctactggggtattcaaccaattacattcatttgctattggtttacctggtgctcctgatttattggctgccgaaaaagtcgctcatttcattggtaccattcatcattctcatactttcactttagaagaaggtcttgatgccttggatgatgtcatctaccatttggaaacttatgatgttaccaccattagagcttcaacaccaatgtacttgttatcaagaaaaatcaaagcccaaggtgttaaaatggttctttctggtgaaggttcagatgaaatctttggtggatatttgtattttgccaatgctccaagtgctaaagaattccatgaagaatgtgtcaagcgagttaagaacttgcattatgctgattgtcttagagccaacaaatccaccatggcttggggattggaagccagagttccattcttggataaacaatttttggaagtttgtatgaacatcaacccagaagataaattgattcaaccaggtaaaattgaaaaatacattttaagaaaagcatttgataccagtgatgaaccagatgtcaaaccttatttaccagaagaaatcctttggagacaaaaggaacaattttccgacggggttggttattcatggattgatggattaaaagatactgctgaaaaaatggttagtgatgaagaatttgctcatccaaaaccagaatggggtgatgatattccaactactaaagaggcttactggtacagatgtaagtttgataaaatgtttaacggttcaaaagctgctgcatctactgttatgagatggattccaaaagctgaatggggttgtcatgccgatccatcaggaagatacgccgctactcatgatcataaagtcgctcaatag

SEQ ID NO: 144292 - protein, 573 aa, Candida albicans SC5314
MCGIFAAYRQPEVEDFKSKALQYSKLIRHRGPDWSGNVVQNSTILCHERLAIVGLDSGAQPIVSPDGNFTLAVNGEIYNHIQLREQFPDYKFKSLSDCEPIIPLFTKYDIDAPKHLDGMFAWVLYDKKNDRIVAARDPIGITTLYMGKSSKSPKTRYFASELKCLIEECDEIFAFPPGHVYDSNTDEITRYFQPSWWDASKVPEQHVDFKKVRETLELAVRKRLMAEVPYGVLLSGGLDSSLIASIASRETKKAAQASFNPEGIDANKELSGVDDKGSLHSTGVFNQLHSFAIGLPGAPDLLAAEKVAHFIGTIHHSHTFTLEEGLDALDDVIYHLETYDVTTIRASTPMYLLSRKIKAQGVKMVLSGEGSDEIFGGYLYFANAPSAKEFHEECVKRVKNLHYADCLRANKSTMAWGLEARVPFLDKQFLEVCMNINPEDKLIQPGKIEKYILRKAFDTSDEPDVKPYLPEEILWRQKEQFSDGVGYSWIDGLKDTAEKMVSDEEFAHPKPEWGDDIPTTKEAYWYRCKFDKMFNGSKAAASTVMRWIPKAEWGCHADPSGRYAATHDHKVAQ

SEQ ID NO: 144293 - DNA, 1905 bp, Ustilago maydis 521
  CDS (1)..(1905)
atgtgtggcattctcggatgtatccaccacccagacgctccggcgtatcgcggcaagatgctcaacatgtcgcgctgcattcgtcaccgtggccccgactggtccggctgtgtcgttacccaggaggagggatccaagggttccatcctctgccacgagcgtctggccattgtaggtatctcaacaggcgcccagcctctcgtttccaccgatggcaagctcatcctcgctgtcaacggtgagatctacaaccatcgacagctgcgcaagaacttgaaggatcagaacgccgaattcaagacagaatccgattgcgaggtcattctgcatctctaccgcgagcacggctccgactttgtcaagatgctcgacggcatgttctctttcattctgctcgacaccaccaccactccacaccgagtcattgctgctcgtgaccccatcggtatcaccacattgtaccagggtgcttcctacaagtaccctggcgcaatctacttttcctccgagctcaaggctatccacgaagaatgcgaccgcatccgttccttccctcccggccacttttacgactcgtccctgcccgaaggaaaagagactgttcgctactacacgcccagctggctcgacggcgatgctgagggtgccacaatccccaccaaccccaccgatctcaagcagatccgtgaggcgctcgaaaaggctgtccgcaagcgtctcatgtccgaagtgccttatggtgtgcttttgtcaggtggtctcgactcgtcgctcatcgcttcgatcgcagcgagagagacggacaagatggccgaccttcaacgcaagcagtgggaggagcgacaggctcgacgttctcgtggtctcactacgccagctggcgatgctaacggcgccaagctccccgtgggccttgacgaggatgccgacaacgaggtcgagaacctcgccgcatggccacgactccactcgttctctattggtctgcctggttcgcccgacttgatcgcggcacgcaaagccgcccagttcctcggcactgtgcaccacgagtacacgtttaccgttcaggagggtttggacgccatcgccgacgtgattttccacctcgagacgtacgatgtcaccacggtgcgtgcgtcgacacccatgtatctgctctcgcgcaagatcaaggcgatgggcgtcaagatggtgctctccggtgaaggatccgacgagattttcggtggctacctctacttccacgctgctcctgataagacttcgttccatcaggagtgtgtgcgccgtgtcaagaacctgcacaccgccgactgtcttcgtgccaacaagagtaccatggcttggggactcgaggcgcgtgtgccattcctcgacaaggcgttcctggatgtggccatgaacacggatgctgcagacaagatgtttagcaagggctcactccagcaggtggatgctgatggtcgtccgcgcatggaaaagtacattttgcgaaaggcatttgatgtgattccggacgacattgaagctggtggtgacggaagtggcagtatgctctcggcgtcggcgcctcgtaagccgtacttgcccgaggacattctgtggcgtcagaaggagcaattctcggatggtgtgggttactcgtggattgacggcattaaggaccatgccgaaaagactgtctcggatgaaaaattccaggaacgagcaaagaggtatcctaacgataccccggatactaaggaggcctatatgatccgcgagattttcgagagttggttcccatccgaggcggcagcttccacagccgtccgttggatccctagagccgattggggctgtgccgccgacccttccggtcgtgccgtcaacatccacgagtctgcctactctaccgagtaa

SEQ ID NO: 144294 - protein, 634 aa, Ustilago maydis 521
MCGILGCIHHPDAPAYRGKMLNMSRCIRHRGPDWSGCVVTQEEGSKGSILCHERLAIVGISTGAQPLVSTDGKLILAVNGEIYNHRQLRKNLKDQNAEFKTESDCEVILHLYREHGSDFVKMLDGMFSFILLDTTTTPHRVIAARDPIGITTLYQGASYKYPGAIYFSSELKAIHEECDRIRSFPPGHFYDSSLPEGKETVRYYTPSWLDGDAEGATIPTNPTDLKQIREALEKAVRKRLMSEVPYGVLLSGGLDSSLIASIAARETDKMADLQRKQWEERQARRSRGLTTPAGDANGAKLPVGLDEDADNEVENLAAWPRLHSFSIGLPGSPDLIAARKAAQFLGTVHHEYTFTVQEGLDAIADVIFHLETYDVTTVRASTPMYLLSRKIKAMGVKMVLSGEGSDEIFGGYLYFHAAPDKTSFHQECVRRVKNLHTADCLRANKSTMAWGLEARVPFLDKAFLDVAMNTDAADKMFSKGSLQQVDADGRPRMEKYILRKAFDVIPDDIEAGGDGSGSMLSASAPRKPYLPEDILWRQKEQFSDGVGYSWIDGIKDHAEKTVSDEKFQERAKRYPNDTPDTKEAYMIREIFESWFPSEAAASTAVRWIPRADWGCAADPSGRAVNIHESAYSTE

SEQ ID NO: 144295 - DNA, 1779 bp, Cryptococcus neoformans var. neoformans B-3501A
  CDS (1)..(1779)
atgtgtggtatcttctgctgcttcaaccgtgccggagacatctctcaataccgagcccgagccatcgcctgctccaagaggcagcgacaccgtggccccgattggtcaggctgttacatgaccaacaataccgtcctcgtccacgagcgattagccattgttggtgtcgacaccggtgctcaaccccttaccaacgaagacgaaagccttgtcctcgccgttaacggtgaaatttacaaccacgtcgctctcagaaaaagtctcaagaacaaagatgccgtgttcaagacccactcggactgtgaagtcatcatgcacctctacaaggagcacgacaccggtctctgcaacatgcttgacgggatgttctcctttgtcctcgttgacaagtccgtctctcctcctcgattgatcgctgcccgtgatcctatcggtatcaccactctctatatgggctggaactctcagtctcccgacactctttactttgcttctgagctcaagtgtatccacgaggagtgcgacaacctccaggctttccctcccggacatttctacgattccaaggagaagaagctcactcgatacttcaacccttcatggtgggactctgacaagggtgttgtccctcacaacgacattgactacaagcttttgagagaaactcttgaagctgccgtcaagaagaggttgatgtccgaagttccctatggtgtcctcctctcaggtggccttgactccagtttgatcgcttccatcgccgctagagaaacagacaaactcgctgaggagcaagaaaaattgagacaagaacgaaaacaggctattgcgtctggcaagtgggttggtgacgagcagccccttgcttcttggcctcaactccactcttttgccatcggtctccctggcgccccagatcttatcgctgcccgaaaggctgccgacttccttggtactatccaccacgaatacaactttaccgttcaggagggtcttgatgccatccctgaagtcatccaccaccttgagacttatgatgttaccactgtccgagctagtacccctatgtaccttctcagtaggaagatcaaagctatgggtgtgaagatggtcttgtctggtgagggtagtgacgaaatctttggtggttacctctacttccacgccgctcccaccgccaaagacttccacgaggaatgcgttaagcgtgtgaagaacctccacaccgctgactgtctccgtgccaacaagtctaccatggcttggggtcttgaagcccgtgttcccttccttgacaagactttcctagaggtctccatgaacgtcgatgccaagtacaagatgttctccaagggcactcaccaagaggttgacgaggatggtcgacccaagatggagaagtacatcttgagaaaggcgtttgactgctctcctgaggggaaggcgtacttgcctgactctatcctctggaggcaaaaagaacaattctctgatggtgtcggttactcttggattgacggcatgaaggaccacgccgccgcgatcgtctccgacgaaaagttcgccaaccgagccacccgatggcccctcgatactcctgataccaaggaggcttattggatccgtgagatctttgaacaccacttccctactgaagcggctgccaagactgctgtccgatgggtccccaagcaggaatggggtgtgtcttccgacccttccggtagggctgtgtctatccacactgcggcgtatgcggacggcgaggccaaggcttaa

SEQ ID NO: 144296 - protein, 592 aa, Cryptococcus neoformans var. neoformans B-3501A
MCGIFCCFNRAGDISQYRARAIACSKRQRHRGPDWSGCYMTNNTVLVHERLAIVGVDTGAQPLTNEDESLVLAVNGEIYNHVALRKSLKNKDAVFKTHSDCEVIMHLYKEHDTGLCNMLDGMFSFVLVDKSVSPPRLIAARDPIGITTLYMGWNSQSPDTLYFASELKCIHEECDNLQAFPPGHFYDSKEKKLTRYFNPSWWDSDKGVVPHNDIDYKLLRETLEAAVKKRLMSEVPYGVLLSGGLDSSLIASIAARETDKLAEEQEKLRQERKQAIASGKWVGDEQPLASWPQLHSFAIGLPGAPDLIAARKAADFLGTIHHEYNFTVQEGLDAIPEVIHHLETYDVTTVRASTPMYLLSRKIKAMGVKMVLSGEGSDEIFGGYLYFHAAPTAKDFHEECVKRVKNLHTADCLRANKSTMAWGLEARVPFLDKTFLEVSMNVDAKYKMFSKGTHQEVDEDGRPKMEKYILRKAFDCSPEGKAYLPDSILWRQKEQFSDGVGYSWIDGMKDHAAAIVSDEKFANRATRWPLDTPDTKEAYWIREIFEHHFPTEAAAKTAVRWVPKQEWGVSSDPSGRAVSIHTAAYADGEAKA

SEQ ID NO: 144297 - DNA, 1665 bp, Erwinia carotovora subsp. atroseptica SCRI1043
  CDS (1)..(1665): transl_table=11
atgtgttctatttttggtgtgcttgatctgaaaagcgatcctgttgaactgcgtaagaaagcactggaattatcccgtttaatgcgtcaccgcggaccagactggtccggcgtttatgccagcgacaaagcgattctggctcacgagcgtctgtctatcgttgacgtcaacacgggggcacagccgctttacaacgccgagcgcacccacattctggccgttaacggtgaaatttataaccatcaggcattgcgtcagcaatacggtgaccgttacgcgtttcagacaggctccgactgcgaagtcatccttgccctgtatcaggaaaaaggccctgaattcctggacgaactgcgaggcatgttcgcctttgcgctgtatgacagcgaaaaagacgcctacctgattggccgtgaccacctcgggattatcccgctgtatatgggctacgatgagcacggtaacctctacgtcgcttctgaaatgaaagcgctggtgccagtttgtcgtaccatcaaagaattcccagcaggcagctacctgtggagcaaagacggtgaaatccgtgaatattaccagcgtgactggtttgattacgatgcggtaaaagacaacgaaacggataaagtagcgctgcacgatgcgctcgaagaagcggtgaaaagccacctgatgtctgacgtgccttacggcgtgttgctttctggcggtctggattcttccgttatctccgcaatcaccaaaaaatatgccgcacgtcgcgtagaagatgacgcgcgcagtgaagcatggtggcctcagttgcactctttcgctgttggtttggaaggtgcgccagatttgaaagccgcgcaggaagtcgctaaacacttaggtaccgtgcaccacgaaatccatttcaccgtgcaggaagggctggatgcgattcgcgacgtgatttatcacatcgaaacctatgacgtcaccacgattcgtgcctcaacgccgatgtacttgatgtcacgtaaaatcaaagcgatgggcatcaagatggtgctgtcaggtgaaggttctgacgaagtgttcggcggctacctctatttccacaaagcgccaaacgccaaagagctgcatgaagaaaccgtgcgtaaactgctagcactgcaccagtatgactgcgcccgtgctaacaaagcgatgtcggcctggggcgtggaagctcgtgtacctttcctggacaaaaacttcctcgatgttgccatgcgcatcaacccgcgcgacaaaatgtgcggcaacggcaagatggaaaaacacatcctgcgcgagtgctttgaatcctatctgccgcacagcgttgcatggcgtcagaaagaacagttctctgatggcgtgggctacagctggatcgacacgctgaaagaagtggctgccaaccaggttaccgatcaacaattggaaactgcacgctttcgcttcccatacaatacgccaggctccaaagaagcctacctgtaccgtgaaatcttcgaagagctgttcccggtttcgagtgcagcagaatgtgtccctggaggcccgtcagtcgcctgttcgtctgctaaagcgattgagtgggatgaatccttcaaaacactggatgacccatcaggacgcgcggttggtgtacaccaatcagcctacaaataa

SEQ ID NO: 144298 - protein, 554 aa, Erwinia carotovora subsp. atroseptica SCRI1043
MCSIFGVLDLKSDPVELRKKALELSRLMRHRGPDWSGVYASDKAILAHERLSIVDVNTGAQPLYNAERTHILAVNGEIYNHQALRQQYGDRYAFQTGSDCEVILALYQEKGPEFLDELRGMFAFALYDSEKDAYLIGRDHLGIIPLYMGYDEHGNLYVASEMKALVPVCRTIKEFPAGSYLWSKDGEIREYYQRDWFDYDAVKDNETDKVALHDALEEAVKSHLMSDVPYGVLLSGGLDSSVISAITKKYAARRVEDDARSEAWWPQLHSFAVGLEGAPDLKAAQEVAKHLGTVHHEIHFTVQEGLDAIRDVIYHIETYDVTTIRASTPMYLMSRKIKAMGIKMVLSGEGSDEVFGGYLYFHKAPNAKELHEETVRKLLALHQYDCARANKAMSAWGVEARVPFLDKNFLDVAMRINPRDKMCGNGKMEKHILRECFESYLPHSVAWRQKEQFSDGVGYSWIDTLKEVAANQVTDQQLETARFRFPYNTPGSKEAYLYREIFEELFPVSSAAECVPGGPSVACSSAKAIEWDESFKTLDDPSGRAVGVHQSAYK

SEQ ID NO: 144299 - DNA, 1521 bp, Symbiobacterium thermophilum IAM 14863
  CDS (1)..(1521): transl_table=11
ttgagtgggatcgctgggatcctcggcaaacctgacaaggcccgcatcgtgaggatgctggaacaacaggcgcaccgggggcccgacggtcgcgggatctggacggcgacggccggtttcggcctggggcatgtgcgcctggccaccgtcgatgttgcgggcggtggccagccgctgtccaacgaggacggcagcctctggctggcgatgaccggcgccatctataaccatggcgcccttcggcgagagctcgaggggcgccatgcgttccggactcagtcagacgccgaagtggtggtgcacctgtttgaggagtatggccccgcctgcgtggagcggctggacgggatgttcgcgatcgccatctggggcgaggaggtgggccttttcctcgcccgcgacccgctgggcatccagccgctgtactggggggaggacgaggagggcaatgtcctcttcgcctccgagatcaaggcgctggtcggggagacgcgcttcgtacgcgagtttccgcccggccaccgctggcgcgccggcgagcccctggagccttacgagcggctgccggcgcacaccggcgaactggcggacccggaccaaatcgtcctggccctggaccgcctgctccacgccgctgtgcgcaagcagctcgcggcggacgtgccggtgggctgcctgctgagcggcgggctcgactccagcctggtcaccgccatcgcgcggcagcacgcggaaggcgaactccatacgtttgctgtggggttggaaggctcggcggacctggagcaggcgcgcatggtggccggggaattgggtaccattcaccacgagcgggtgctcacggaaaaggaggtgaccgccgtcctgccgcgggtggtcgacgccctggagtcgtgtgacccggcgctcgtgcgcagcgcggtcgcgacctactatgtggcggaactggccgccgggcacgtgaaggtggtgctctcgggcgagggcgccgacgagctcttcgccggatatgactacctggccgagttcgagcgcgatgcgggcgcactgggggccgagctgtacgagatcacggcggccatgcacaactgcaacctgcagcgggtcgaccgcatgacccaggtccacggcgtggaggcgcggatgccgtttgccgaccaggccgtggtggactttgcgttccgcatacacccccgcctgaagcgccgggacggcgagagcaagtggattctgcggcgggtcgcggagcagtatctgccgccggccatcgtctggcgggagaagcagaagttcgccatcggttcggggatcgcaccgctgctggagcattacgcggccaaggcggtgccggacgcggccttccgccgcgcgcgaagcccgaagggcgttcccttcgcgtcgaaggaggagttcctttactggagcctgttccgcgagcggtacggccgggaggacgtgctggcgctcatgggccggagccgcagcctgaaccagggccagcggtgggtcggggcgctctag

SEQ ID NO: 144300 - protein, 506 aa, Symbiobacterium thermophilum IAM 14863
MSGIAGILGKPDKARIVRMLEQQAHRGPDGRGIWTATAGFGLGHVRLATVDVAGGGQPLSNEDGSLWLAMTGAIYNHGALRRELEGRHAFRTQSDAEVVVHLFEEYGPACVERLDGMFAIAIWGEEVGLFLARDPLGIQPLYWGEDEEGNVLFASEIKALVGETRFVREFPPGHRWRAGEPLEPYERLPAHTGELADPDQIVLALDRLLHAAVRKQLAADVPVGCLLSGGLDSSLVTAIARQHAEGELHTFAVGLEGSADLEQARMVAGELGTIHHERVLTEKEVTAVLPRVVDALESCDPALVRSAVATYYVAELAAGHVKVVLSGEGADELFAGYDYLAEFERDAGALGAELYEITAAMHNCNLQRVDRMTQVHGVEARMPFADQAVVDFAFRIHPRLKRRDGESKWILRRVAEQYLPPAIVWREKQKFAIGSGIAPLLEHYAAKAVPDAAFRRARSPKGVPFASKEEFLYWSLFRERYGREDVLALMGRSRSLNQGQRWVGAL

SEQ ID NO: 144301 - DNA, 1842 bp, Bacillus licheniformis ATCC 14580
  CDS (1)..(1842): transl_table=11
atgtgtggaataacggggtgggtcgattttaagaagccgcttgtccgagagcagtcaatcatggagaagatgactgatacgctttcgaaaagaggacctgatgatacgaatatttggggaaagcgccatgttttattcggacataaacgcttggcagttgtggatctggaaggcggcagacagccgatgacccgcacacatcaaggatatgattatacgatttgctataatggcgagctctataatacggaggatttgcgaaaagagcttaggcggcgggggcatcaattcaagagccactcagatacagaggttttgcttcattcatacatggaatggaaagaggaatgcatcgacaggctgaacggaatttttgcatttgcggtatgggatgaaaagcgggatcttctttttgcggcacgcgaccggcttggtgttaaaccgttcttttacaccgaacagggctcatcatttttgttcggatctgaaatcaaagccatcctcgctcatcctgaagtgaaagcaaaggtagaccgttcagggctggcagaaattttcggcctcggcccgtcacgatcgccggggagcggtgtttttaaaggagtaaaggagatccgcccggggcatgcgatgattttctcaaaagacggtttaacggtttggcgctactggaatgtgaaaagcgagaagcatacggacagctttgacgaaacggtggaaaatgtgcggtcgctgtttcaggacgccgttacaaggcagcttgtgtctgatgtgccggtatgtacgtttttatctggaggggtcgattcgagcgccattaccgcaacggccgccaagcatttcgagagagaagggaaggcgccccttcatacgttttcgatcgattatgaagacaatgagcaatattttacgtcaagctcatttcagccaaacgccgacggcccgtggattaaaaaaatgtccgatgcattcggaacggttcatcacaattgcgtgatatcccaggaggagctggctgcctatttggaagaagccgtactggttcgggatttgccggggatggctgatgtcgattcttccctgctatggttctgccgcgagattaaaaaagactttgtcgtgagcctttcaggggaatgcgcggacgaaattttcggcggctatccttggttccattcggcagaagatgtgaaaggtttcccatggatgagatcaatggaagaacggatcggacttctgcaggacggctggcagaaaaagctgaacctcagcgaatatgtgaaggcaaaatatgaggaaacagttaaagaaacaccgctgctggaaggagaaacgggtgcggagaaacgaaggagagagctgttttacttaaatatgctctggtttatgacaacgctcttggatcgaaaagacagaatgagcatgggtgcgagcctcgaggtcagggttccgtttgcagatcacaggcttgtcgagtatgtctggaatattccatgggatgtcaaaatgcatggcagccgtgaaaaaggcatcttccgcaaggcgctggaaggcattttgcctgatgaagtgctgtaccgcaaaaaaagcccatatccgaaaacgcaccacccggcctatacgaaagccgtgatacgctggctggagtcattgctggagcaaaaagactcggcgctctatgctttcttagaaaagaaaaaactggagcggctgattgagacggaaggtgcatcatttcaagttccgtggtacggacaattgatgaagggaccgcagctgatcgcccaccttgcccaaatccatacttggtttgaaagttatcgaattgatatcgaggaataa

SEQ ID NO: 144302 - protein, 613 aa, Bacillus licheniformis ATCC 14580
MCGITGWVDFKKPLVREQSIMEKMTDTLSKRGPDDTNIWGKRHVLFGHKRLAVVDLEGGRQPMTRTHQGYDYTICYNGELYNTEDLRKELRRRGHQFKSHSDTEVLLHSYMEWKEECIDRLNGIFAFAVWDEKRDLLFAARDRLGVKPFFYTEQGSSFLFGSEIKAILAHPEVKAKVDRSGLAEIFGLGPSRSPGSGVFKGVKEIRPGHAMIFSKDGLTVWRYWNVKSEKHTDSFDETVENVRSLFQDAVTRQLVSDVPVCTFLSGGVDSSAITATAAKHFEREGKAPLHTFSIDYEDNEQYFTSSSFQPNADGPWIKKMSDAFGTVHHNCVISQEELAAYLEEAVLVRDLPGMADVDSSLLWFCREIKKDFVVSLSGECADEIFGGYPWFHSAEDVKGFPWMRSMEERIGLLQDGWQKKLNLSEYVKAKYEETVKETPLLEGETGAEKRRRELFYLNMLWFMTTLLDRKDRMSMGASLEVRVPFADHRLVEYVWNIPWDVKMHGSREKGIFRKALEGILPDEVLYRKKSPYPKTHHPAYTKAVIRWLESLLEQKDSALYAFLEKKKLERLIETEGASFQVPWYGQLMKGPQLIAHLAQIHTWFESYRIDIEE

SEQ ID NO: 144303 - DNA, 1773 bp, Azoarcus sp. EbN1
  CDS (1)..(1773): transl_table=11
atgtgcggtattgcaggtgaaatcagattcgatgggcagtcgcccgacgtgggggcgctggagcggatgaatgcgcggcagcgcgtgcgcggccccgacagcggcggcgtgttcgtgcaaggcgcgctcggcttcggccaccgccggctgaagatcatcgacctgtccgaatcggcgcagcagccgatgttcgacccggccctcggcctcgggatcgtcttcaatggggcgatctataaccacgccgcgctgcgccgcgagctcgagactctcggctaccgcttctactcgcgcggggatacggaagtcctgctgaaggcctaccacgcgtgggggcaggatttcgtgcagcggctcaacggcatgttcgcgttcgcgatctgggagcgggacagcggccgcgtcgtgctcggtcgcgaccggctcggcatcaagccgctgtattacagcgcacagcccggcctgctgcgcttcgcgtcgagcctgccggcgctcgttgccgccggcggcgtcgacaccacggtcgatgcggtggcgttgaaccactacctctcgttccatgcggtcgtgccggctccgcacacgattcttgccggtgtgcgcaagctgccgcccgcgacgctgatgacgatccacacggacgggcgtcgcagtgaacgcagctactggtcgctggcctacgctcacgagccgggcgacgcggcgcgcagcttcgaggagtggacggaaatcctgctcgaaggcttgcgcagtgcggtcggccgccgcctggtcgccgacgtgccggtcggcgcgctgctgtccggcggcgtcgattcgagtctgatcgtcgggctgatggcgcaggccggcgtgcagggcctgcggacctacaacgtcggcttcgaggacgtcggcggggaaaagggcaacgagttcgaatatgccgacatcgtcgccgaacgtttcgccacgatccacgaacgcatcttcgtgcccgaggcgcaactcctcgcgcggctgccggaagcggtcgcggcgatgagcgagccgatggtgagtcatgactgcatcggcttcttcctgctgtcggaggcagtgtcgcgccattcgaaagtcgtgcagagcgggcagggggcggacgaagtgttcggcggctaccactggtacccgaagctcgccggcagcgtcgacccggtcggcgattacctcgcggcatttcgcgaccgcgactacgacgagtattgccgcatggtcggcgcggcgaatcgtgccgacgattgcagcggtgcgttcgtcgccgcccacttcgacctgcccggtgcgatcgacccggtcgacaaggcactgcgtctcgataccaccgtgatgctcgtcgatgatccggtaaaacgcgtcgataacatgacgatggcgttcggtctggaggcccgcgtgcctttcctcgaccatgaactcgtcgagctggcggcgcgcattcctgcgcgacacaagctcgcccacggcggcaagggcgtactgaaggaggcggcgcgccaggtcattccttccgcggtcatcgaccggccgaaaggctattttccggtgccggggctgaaatacctgcaaggccaagtgctcgagcgggtgcgcgacgcgttgacgaaccgcgcggcccgggagcgcggcctgttccgccgggagtatgtcgacacgctgctcgccgatcccggcgcgcacatgacaccgctgcgcggctccaaactctggcagctcgggctgctcgaatggtggctgcagacccatgtccgctga

SEQ ID NO: 144304 - protein, 590 aa, Azoarcus sp. EbN1
MCGIAGEIRFDGQSPDVGALERMNARQRVRGPDSGGVFVQGALGFGHRRLKIIDLSESAQQPMFDPALGLGIVFNGAIYNHAALRRELETLGYRFYSRGDTEVLLKAYHAWGQDFVQRLNGMFAFAIWERDSGRVVLGRDRLGIKPLYYSAQPGLLRFASSLPALVAAGGVDTTVDAVALNHYLSFHAVVPAPHTILAGVRKLPPATLMTIHTDGRRSERSYWSLAYAHEPGDAARSFEEWTEILLEGLRSAVGRRLVADVPVGALLSGGVDSSLIVGLMAQAGVQGLRTYNVGFEDVGGEKGNEFEYADIVAERFATIHERIFVPEAQLLARLPEAVAAMSEPMVSHDCIGFFLLSEAVSRHSKVVQSGQGADEVFGGYHWYPKLAGSVDPVGDYLAAFRDRDYDEYCRMVGAANRADDCSGAFVAAHFDLPGAIDPVDKALRLDTTVMLVDDPVKRVDNMTMAFGLEARVPFLDHELVELAARIPARHKLAHGGKGVLKEAARQVIPSAVIDRPKGYFPVPGLKYLQGQVLERVRDALTNRAARERGLFRREYVDTLLADPGAHMTPLRGSKLWQLGLLEWWLQTHVR

SEQ ID NO: 144305 - DNA, 1677 bp, Bacteroides fragilis NCTC 9343
  CDS (1)..(1677): transl_table=11
atgtgtggaatagcaggaatcttcaatataaagattcagagcagggaactcaggaacaaggctctccgaatggcacgcaaaatacgtcaccgcgggcccgactggagtggaatgtattgtggcggaagtgccatcctggcacacgaacgcctttccatagtcgatccgcaaagcggaggacagcctctttattcatccgaccggaagcaagtactggcggttaacggcgaaatctataaccaccgtgacatccgcgcccaatatgccggccgctacgagttccggaccgggagtgactgtgaggtgatcctcgccctttaccgcgacaaaggtattcatttccttgaagagctgaacggcatcttcgcctttgccctttatgatgaagaaaaagacgaatacctgattgcccgggaccccatcggtgtaatacctttatatataggaaaggacgccgaaggacatgtctacttcggcagcgaactcaaagcgctcgaagggttctgcgacgagtacgaacccttcttacccggacactactatcacagcaaggaggggacgatgaaacgctggtacacccgtgactggatggaatataaagaggagaacgacaagcaggcggacagccggtctcccacccggcagattcaggacgcccttgagaatgccgtacaccgtcaactgatgtccgacgtaccttacggagtgcttctttcgggcgggctggacagttctgttatctctgccattgccaaaaagtatgccgccaaacgcattgaaaccgatggcgcaagcgatgcatggtggccgcagctacactcctttgccatcggactgaaaggtgcaccggacctgatcaaagcacgtgaagtagccgaatacatcggtacggttcatcatgaaataaactacacccttcaggaagggctcgatgccatccgggatgttatctatttcattgagacatacgacgtaactaccgtccgtgcttctacaccgatgtatctgttggcacgtgtcatcaagtcgatgggcatcaagatggtattgagcggtgaaggtgccgacgagatcttcggcggctacctttatttccacaaagcacccgatgcccgtgcctttcacgaagagactgtacgcaaactgtctaaactacatctatacgattgccttcgcgccaataagagcctcgcagcatggggtgtggaaggacgtgtccctttcctcgacaaagagtttctggatgtggccatgcaactcgatcccgaaataaaaatggctccgggaaaagtcatcgaaaagaaagtcctgcgcgaagcctttgcggatatgctcccttccggcatcgcctggcgccaaaaagaacagttcagtgacggtgtgggatatagttggatagatacgctgaaagagattaccgcaacggctgtcagtgacgaacagatggcacatgccgcagaacgttttcccatccacacccctatgaataaagaagagtattactaccgcagcatcttcgaagagcacttccccagtgaaagcgccgcccgcagcgtacccagtatccccagtgtagcctgttcgacagccgaggcactggcatgggacaccgcgttcaagaacctgaacgatcccagcggacgtgccgtaaaaggagtacacgaagaagcatattaa

SEQ ID NO: 144306 - protein, 558 aa, Bacteroides fragilis NCTC 9343
MCGIAGIFNIKIQSRELRNKALRMARKIRHRGPDWSGMYCGGSAILAHERLSIVDPQSGGQPLYSSDRKQVLAVNGEIYNHRDIRAQYAGRYEFRTGSDCEVILALYRDKGIHFLEELNGIFAFALYDEEKDEYLIARDPIGVIPLYIGKDAEGHVYFGSELKALEGFCDEYEPFLPGHYYHSKEGTMKRWYTRDWMEYKEENDKQADSRSPTRQIQDALENAVHRQLMSDVPYGVLLSGGLDSSVISAIAKKYAAKRIETDGASDAWWPQLHSFAIGLKGAPDLIKAREVAEYIGTVHHEINYTLQEGLDAIRDVIYFIETYDVTTVRASTPMYLLARVIKSMGIKMVLSGEGADEIFGGYLYFHKAPDARAFHEETVRKLSKLHLYDCLRANKSLAAWGVEGRVPFLDKEFLDVAMQLDPEIKMAPGKVIEKKVLREAFADMLPSGIAWRQKEQFSDGVGYSWIDTLKEITATAVSDEQMAHAAERFPIHTPMNKEEYYYRSIFEEHFPSESAARSVPSIPSVACSTAEALAWDTAFKNLNDPSGRAVKGVHEEAY

SEQ ID NO: 144307 - DNA, 1665 bp, Colwellia psychrerythraea 34H
  CDS (1)..(1665): transl_table=11
atgtgttcaatctttggtatattagatataaaaacaggtgcagatgcacttcgtcctacagcgttagaatgttctcgtcttttacgtcaccgcggtcccgattggtctggaatttatcacagcgacaatgccatattagtgcatgagcgtttatctattgttgatactgagcatggtgctcaacctttatacaatggtgataaaagcaatgtacttgctgttaacggtgagatttataaccacaaagcattagccagtgctttaaacgttgattatgaatttcaaacagcctcagattgtgaagttattctccctctatatgaagaatttggtgttgaatttgttgacaaactacaaggtatgtttgcctttattgtgtacaacgaaaaagataactcttatttaatagcacgtgatcacattggtattattcctttgtacacgggttatgatagtgaaggtaacttctatgttgcctcagaaatgaaagcgttaatgccgatttgtaaaaccgttgaagaatttcctcctggacatattcttgatagccgtgttgggaaattacaacaatattacaaacgtaactggcaagaatatgccgcgataaaagataataccactagtacgactaaaattcgtgaagcattagaagagtcagttaaaagtcatttaatgactgatgtaccttatggcgtattgttatcaggtggtttagattcttcactcatttctgcgattacgcaaaaatttgcagctcgtcgtattgaagacaacgatttagctgaagcttggtggccaaaagtacattcatttgcctgtggccttgcaggttctcctgatttaattgcagcacaaaccgtcgcagatagtattggtactattcaccacagtgtagtgtttaccgagcaagaaggtattgatgcacttaaagaagttatttatcacttagaaacctatgatgtaacaactatccgtgcttctacgccaatgtacttaatggcgcgtaaaatcaaagcaatgggtattaaaatggtactttctggtgaaggtgctgatgaaatatttggcggatacttgtacttccataaagcaccaaacgcacaagagttccatgaagagcttaaccgtaagcttgatcgacttcataaatttgattgcttacgggcaaacaaatcaatgtcggcttggggcattgaagcgcgcgtaccatttttagacaaaaactttatggatgttgcaatgcgcatcaaccctgaagataagttgtgtggcaatggtaaaatggaaaaagctattttacgtgaatcttttgaaggttacttaccaaaagaaatcttatggcgtcaaaaagagcaattctcagacggtgtaggttattcttggattgatggtttaaaagcccatgttgagtcacttgttactgaacaacagcttgaaaatgctcacattagattcccggtaaatacacctgataacaaagaaggttattactaccgtactgtttttgaagacaaatacccattagctacagctgctgattgtgttattggcggaaaatctgttgcttgtagcacagaagaagccttagcttgggatgaaagctttcaaaataacgcagatccatcgggtcgtgcggtactcagtgtacataacgagagttattaa

SEQ ID NO: 144308 - protein, 554 aa, Colwellia psychrerythraea 34H
MCSIFGILDIKTGADALRPTALECSRLLRHRGPDWSGIYHSDNAILVHERLSIVDTEHGAQPLYNGDKSNVLAVNGEIYNHKALASALNVDYEFQTASDCEVILPLYEEFGVEFVDKLQGMFAFIVYNEKDNSYLIARDHIGIIPLYTGYDSEGNFYVASEMKALMPICKTVEEFPPGHILDSRVGKLQQYYKRNWQEYAAIKDNTTSTTKIREALEESVKSHLMTDVPYGVLLSGGLDSSLISAITQKFAARRIEDNDLAEAWWPKVHSFACGLAGSPDLIAAQTVADSIGTIHHSVVFTEQEGIDALKEVIYHLETYDVTTIRASTPMYLMARKIKAMGIKMVLSGEGADEIFGGYLYFHKAPNAQEFHEELNRKLDRLHKFDCLRANKSMSAWGIEARVPFLDKNFMDVAMRINPEDKLCGNGKMEKAILRESFEGYLPKEILWRQKEQFSDGVGYSWIDGLKAHVESLVTEQQLENAHIRFPVNTPDNKEGYYYRTVFEDKYPLATAADCVIGGKSVACSTEEALAWDESFQNNADPSGRAVLSVHNESY

SEQ ID NO: 144309 - DNA, 1776 bp, Mesorhizobium sp. BNC1
  CDS (1)..(1776): transl_table=11
atgtgcggcatttgcggtgaagtgagatttgacggccggactccgtccgtatcggccatatccggaatgatggaagcgctggctccgagagggcccgacggcgcgggcatcgtgtcccacggcaatgcgggattcggccaccggcggctcaggatcatcgatctttcggaaaaggcgcagcagccgatggtggactccgcgttgggcctgaccatcgccttcaacggctgcatctacaattaccccgagctgcgcgaggcgctcgaggcaaagggctatagctttttctcgcacggcgacacggaggtcatcctcaaggcgtggcatgcctggggtgaaacctgcgtggagcgcttccatggcatgttcgctttcgtgatccaggagcgcgacaccggccgtatcgtgatggcgcgggaccgcttcggcatcaagccgctctacctcgccgagaagagcggcgtgctccgcttcgcctcctcgctcccggcgctcgtgaaagccggggacgtggatacctccatcgaccgggtggcgctgcatcactacatgaccttccacgcggtcgttccgccgccccgcactatcctcaatggtgtgcgcaagctgccgcccgccacgatccgcgtcatcgaggccgacggccgctcgacggaacggcgctactgggatccgccctatcgccgcgacccggccgatgccggcgtttcggcagaagagtggcgcgaccgtgtgcacgaggcgctacggcttgccgtgaagcggcgcatggtggctgatgtacccgtgggcgtgctgctttcaggcggtgtggattcgagcctcattgtcggccttctggccgaggccggccagaccgggctcatgagcttttccgtcggtttcgaggaagcgaatggcgagaaaggggacgagttcgtctattccgacttgatcgcgaaggagttcggcaccgatcatcacaagatattcgtgccttccgaccggctgatggatgcgctccccggcaccttcgccgccatgtccgagccgatggtgtcctacgacaatgtgggcttctatctgctctcgcaggaggtttccaagcacatcaaggtggtgcagtcggggcagggagctgacgaggtgttcggcggctatcactggtatccgccgcttgcccgctccaacgacgtggtggcagactacgcaaaggtcttctttgaccgctcgcacgagacgctgaagcgtcagctcggagcgaactggatcaatggcgaagactacagccgcggccttgtcgccgcggagctgatgcggccgggtgcggactcgcctgtcgatcgtgctttgaggctcgatgccaatgtgatgctggtggacgatccggtgaagcgggtcgacaacatgacgatggcctgggggctggaggctcgtgttcccttcctcgatcacgagctggttgagctcgccgcgcgcattccgcccgaagaaaagctgaaagacggcggcaaaggcgtgctcaaggatgtggcccggcttgtcgtgccgcatgaggtcatcgatcgaccgaagggttatttcccggtgccgcagctcaaatatgtggccggtccctatcttgagatggtgcgtgacgcgttgggctctcaacgcgctcgcgagcgcgggctgtttcgccaggattatctcgatcggcttttcgctcagcccgccgaccacatcacgccgctgcgcggttccgagctctggcaggccggacttctggaattgtggcttcagacccatgggatctag

SEQ ID NO: 144310 - protein, 591 aa, Mesorhizobium sp. BNC1
MCGICGEVRFDGRTPSVSAISGMMEALAPRGPDGAGIVSHGNAGFGHRRLRIIDLSEKAQQPMVDSALGLTIAFNGCIYNYPELREALEAKGYSFFSHGDTEVILKAWHAWGETCVERFHGMFAFVIQERDTGRIVMARDRFGIKPLYLAEKSGVLRFASSLPALVKAGDVDTSIDRVALHHYMTFHAVVPPPRTILNGVRKLPPATIRVIEADGRSTERRYWDPPYRRDPADAGVSAEEWRDRVHEALRLAVKRRMVADVPVGVLLSGGVDSSLIVGLLAEAGQTGLMSFSVGFEEANGEKGDEFVYSDLIAKEFGTDHHKIFVPSDRLMDALPGTFAAMSEPMVSYDNVGFYLLSQEVSKHIKVVQSGQGADEVFGGYHWYPPLARSNDVVADYAKVFFDRSHETLKRQLGANWINGEDYSRGLVAAELMRPGADSPVDRALRLDANVMLVDDPVKRVDNMTMAWGLEARVPFLDHELVELAARIPPEEKLKDGGKGVLKDVARLVVPHEVIDRPKGYFPVPQLKYVAGPYLEMVRDALGSQRARERGLFRQDYLDRLFAQPADHITPLRGSELWQAGLLELWLQTHGI

SEQ ID NO: 144311 - DNA, 1665 bp, Shewanella sp. MR-4
  CDS (1)..(1665): transl_table=11
atgtgttcgattttttcaattttagatattcaatccgatgcgaaagagctgcgccaagtagcactggaaatgtccaaactgatgcgccatcgcggccccgattggtcaggcatttacgccagcgataaagcaattttggcccatgagcgcttggcgattgtcgatattgaacacggtgcgcagccactgcttactgaagacggcagccttatcctcgcggtcaacggtgagatctacaaccataaagaactcaaagcccagctcggcgataaatacagctatcaaaccaactctgactgcgaagtcatcttggcgctatatcaagaatacggcactgaattccttgataaattaaacggtattttcgccttcgttctctacgataaagccaaagatgcctaccttattggccgcgaccatatgggcattatcccgctctacactgggcgtgatgcggcgggtaacttctacgtggcctccgaaatgaaagcactgatgcccgtctgtaaaaccgtggccgaattccagcctgggcaatatctgtactcaagcatcggtgagccagtgcaatactacactcgcgattggcagagttttgatgcggtgaaagataacggcgccagccaagaagaattacgcgatgccctcgaagccgccgttaagcgccaattgatgtccgatgtgccctacggcgtgttattgtctggcggtttagattcatcagtgatctcggcgattacccaaacctttgccaaacgccgtatcgaagatgacgatcaaagtggggcttggtggccacagctacactcctttgccgtgggtttaaagggcgcacccgatttagccgccgctaaaaaggttgccgatgcgattggtaccattcaccatgagatcaactttaccttccaagagggtttagatgcgattaaggaagtcatctaccacctagaaacctatgatgtgaccaccattcgtgccgcgacacctatgtacctgatggcccgtaaaatcaaggcgatggggatcaaaatggtgttatcgggtgaaggggccgatgaactctttggcggttacttgtacttccataaggcaccaaacgcgcaggccttccatgaggaactcgtgcgtaaactggataaactgcatttgttcgattgtctgcgcgccaacaaagccatggcggcatggggactcgaagcccgcgtacctttcctcgataaggaatttatggatgtggcgatgcgtatcaaccctgaggcaaaaatgtctaaggatggccggattgagaaacacattctgcgccaagcctttgagcataaattgccaaaagaagtcgcctggcgtcaaaaggagcaattcagcgatggcgtgggttactcttggatcgatggtttaaaggcccatgctgcagagcaagtagacgacctgcaactggccaacgcgaagttccgcttcccgtacaacacgccagaaaccaaggaagcctatttttaccgttgtttctttgaggagcattaccccttagctagcgcggccgaaaccgtgcccggtggcaagtcagtcgcctgctctactccagaagcgctggcatgggatgaaagcctacgcggcattatcgacccttctggccgtgccgtacgctcagtgcatgccgccagctattaa

SEQ ID NO: 144312 - protein, 554 aa, Shewanella sp. MR-4
MCSIFSILDIQSDAKELRQVALEMSKLMRHRGPDWSGIYASDKAILAHERLAIVDIEHGAQPLLTEDGSLILAVNGEIYNHKELKAQLGDKYSYQTNSDCEVILALYQEYGTEFLDKLNGIFAFVLYDKAKDAYLIGRDHMGIIPLYTGRDAAGNFYVASEMKALMPVCKTVAEFQPGQYLYSSIGEPVQYYTRDWQSFDAVKDNGASQEELRDALEAAVKRQLMSDVPYGVLLSGGLDSSVISAITQTFAKRRIEDDDQSGAWWPQLHSFAVGLKGAPDLAAAKKVADAIGTIHHEINFTFQEGLDAIKEVIYHLETYDVTTIRAATPMYLMARKIKAMGIKMVLSGEGADELFGGYLYFHKAPNAQAFHEELVRKLDKLHLFDCLRANKAMAAWGLEARVPFLDKEFMDVAMRINPEAKMSKDGRIEKHILRQAFEHKLPKEVAWRQKEQFSDGVGYSWIDGLKAHAAEQVDDLQLANAKFRFPYNTPETKEAYFYRCFFEEHYPLASAAETVPGGKSVACSTPEALAWDESLRGIIDPSGRAVRSVHAASY

SEQ ID NO: 144313 - DNA, 1833 bp, Pseudomonas aeruginosa UCBPP-PA14
  CDS (1)..(1833): transl_table=11
atgtgtggaatcaccggctggaccgactggagccgcgacctcggcgagcagcgcagcatcctcgaacgcatgacccgtaccctggccccgcgcgggccggacgccgaaggcctgtggctgtcgcggcacgcgctgctcggccatcggcgcctggcgatcatcgacctggagaacggcgcccaaccgatgcttgccgaggcgggcgggcgggtggcgctgacctacagcggcgaggtctacaacttccgcgagctgcgcgccgagctggagacgctgggccaggtcttccgtacccgctcggacaccgaggtggtgctgcgcgcctatctgcaatggggcgaggcttccttcgcccggctccgcggcatctacggcttcgccctgtgggacgagcgcgagcagagcctgtggctggtgcgcgatcgcttcggggtcaagccgctgtactactacccgaccgccggaggcgtgctgttcgcctcggaacccaaggcgatcttcgccaaccccgaggccaacccggtgctcgacgccagcggcatcgccgagctgttcgccctgaccaccgcgccgactcccggccacggcctgtacaagggcctgcgccaggtccggccgggccaggcgctgcgcttcgaccgcaatggtgtgcgcgagctggtctactgggcgctgcgcgcggaacgtcacgaagagggcgccgaggacagcgccgaacgcgccggccagttgctccgcgaggcagtggccgagcagctggtggccgacgtcccgctgggcagcctgctttccggcgggctcgactccagcgccatcagcgccttcgcggtggccgcgctggatggcgacgcgcggcgcctgccgaccttctccgtggacttccccggcgaaggccgcggcttcgtcccgacgccctggcaaagcagctgggacgaaccctatgcgcagctggcggcgaacttcctcggtacgccgcaccgtaccgtgctggtcgccccggaagaggtgctggaacaggacgaggcggtgctccaggcccgcgacctgcccggctggggcgagctggacgcctcgctctacctgctgttccgccaggtccgcgagcacaccacggtggcgctgtcgggcgagtcggccgacgaggtgttcggcggctacccgttcttccacgacccgagcgccctcgcacacgacggcttcccctggctggccggcaagagcgggccctggcaactgctgcggcgggaggtcgccgaacgggtggcggcgccggaatacatccgggcgcgctaccgcgaggccctcgccgaagtgccgcgactggatggcgaggatgccgcccagcggcgccagcgcgaggtcgcctacctggcgctgagccgctggttgccggcgatgctcgaacgcaaggaccggatgagcatggcggtcggcctggaagtgcgcgtgccgttctgcgaccaccgcctggtggagtacgtatggaacctgccctgggcgctgaagagcgtcgccggggaaagcaagagcctgctgcgccgggccctgcgcgggcacctgccgcaggcgatcctggagcggcgcaagagcggtttcccggccaaccccgacccacgttacctggcgctgctgcgcgagcgggtcggccgcctgctcgccgacggccgctcgccgctgttcgaactggtggacgccgggcgggtccgccaggctctcgaacagggcacgccgctgcccagcccgcgtgcctcggcgagcccgaccgccggcctggcctacctgctgaacctggaccgctggctgacccgccatggggtcgacatcagcctctga

SEQ ID NO: 144314 - protein, 610 aa, Pseudomonas aeruginosa UCBPP-PA14
MCGITGWTDWSRDLGEQRSILERMTRTLAPRGPDAEGLWLSRHALLGHRRLAIIDLENGAQPMLAEAGGRVALTYSGEVYNFRELRAELETLGQVFRTRSDTEVVLRAYLQWGEASFARLRGIYGFALWDEREQSLWLVRDRFGVKPLYYYPTAGGVLFASEPKAIFANPEANPVLDASGIAELFALTTAPTPGHGLYKGLRQVRPGQALRFDRNGVRELVYWALRAERHEEGAEDSAERAGQLLREAVAEQLVADVPLGSLLSGGLDSSAISAFAVAALDGDARRLPTFSVDFPGEGRGFVPTPWQSSWDEPYAQLAANFLGTPHRTVLVAPEEVLEQDEAVLQARDLPGWGELDASLYLLFRQVREHTTVALSGESADEVFGGYPFFHDPSALAHDGFPWLAGKSGPWQLLRREVAERVAAPEYIRARYREALAEVPRLDGEDAAQRRQREVAYLALSRWLPAMLERKDRMSMAVGLEVRVPFCDHRLVEYVWNLPWALKSVAGESKSLLRRALRGHLPQAILERRKSGFPANPDPRYLALLRERVGRLLADGRSPLFELVDAGRVRQALEQGTPLPSPRASASPTAGLAYLLNLDRWLTRHGVDISL

SEQ ID NO: 144315 - DNA, 1503 bp, Crocosphaera watsonii WH 8501
  CDS (1)..(1503): transl_table=11
atgtgtggcattgcaggaatctggggacaaacagaacaaactaacgttgaggcgatgatgaagagtattattcatcgtggtccagatgcaaaagggatttttacagttcccaacggttcaggaattttggggcatcagagattgagtattatggatgtagatgggggagatcaacccatttattccaaggcaaacacccaagcaattattggtaatggagaaatctataattatcctaaattgcaaccagaattagccaaaaaatacaagttcttaacgaaaagcgatacggaagcagttttacacttatacgaggaaaagaatacaactgcagtgggcgaattagatggaatgtttgcctttgctattattgacgataataagtttattgctgctcgtgatcccatcggcatcaaacctctttattatagtgaaaaagacggtaacttttggtttgcctcggaattaaaagctatcacacaattttgtgagaatgtagaagaatttccccctggccatttcttctcatcagaaacagggttttctcagtattacagcttaccagatattccccccgaactggatgctaatgtggatgagttattgcaagaaatacgagaaaccgtagaagcttctgtggttaaaagattgatgtccgatgtacctttaggtgctttcttgtcgggaggtttagatagtagtattatcgctgctatcgccaaaaaacataagtctgaattacatactttttctgtgggtattgccgggagtaaagatattaatgctgctcgtttggtgtctgattatttaggaaccatacaccacgaatacattattacacccgaagaagcgatcgccaaactaccggagattatttattatttagaatcctttgaccaagacttagttagaagtgggataccttgttattttacttcacgtttagcctctgaatatgtaaaagtaattctgacgggagaaggagcagacgagctttttgctggttatacttactacaaagatattcccagcgatgatacattacatagggaattaagaagatctgtcaacagtttacacaacattaatctacagcgtgttgatcgtttaactatggctcattctatcgagggaagagtgccatttttagatttaaaaatgatcgaactaggtcaaaaagtacctgctcatttaaaactgaaaggtacgccccctgtagaaaaatggatcttacgcaaagcctttgaggatattttaccagaggaaattgtttggcgcaaaaaagaacaatttgatgaaggaagtggcacagttgacttgttaactgaaaccttaaaagatgtgatgaatgaacaacaggctcaacaatatcaaaaagagcatccagatataaaattaagatcagcagaagagtgttattatcaccaaatattcatgaaggcttttgataaccccgatgctctcttaacaaatgttgctcgttgggcagaaacacggttttaa

SEQ ID NO: 144316 - protein, 500 aa, Crocosphaera watsonii WH 8501
MCGIAGIWGQTEQTNVEAMMKSIIHRGPDAKGIFTVPNGSGILGHQRLSIMDVDGGDQPIYSKANTQAIIGNGEIYNYPKLQPELAKKYKFLTKSDTEAVLHLYEEKNTTAVGELDGMFAFAIIDDNKFIAARDPIGIKPLYYSEKDGNFWFASELKAITQFCENVEEFPPGHFFSSETGFSQYYSLPDIPPELDANVDELLQEIRETVEASVVKRLMSDVPLGAFLSGGLDSSIIAAIAKKHKSELHTFSVGIAGSKDINAARLVSDYLGTIHHEYIITPEEAIAKLPEIIYYLESFDQDLVRSGIPCYFTSRLASEYVKVILTGEGADELFAGYTYYKDIPSDDTLHRELRRSVNSLHNINLQRVDRLTMAHSIEGRVPFLDLKMIELGQKVPAHLKLKGTPPVEKWILRKAFEDILPEEIVWRKKEQFDEGSGTVDLLTETLKDVMNEQQAQQYQKEHPDIKLRSAEECYYHQIFMKAFDNPDALLTNVARWAETRF

SEQ ID NO: 144317 - DNA, 1692 bp, Xylella fastidiosa Ann-1
  CDS (1)..(1692): transl_table=11
atgtgttccatttttggaatcttcaacctgcaacccagtgacaacctacagatactgcgtcaccaagcattggagtgctcgcaacggcaacggcatcgtggacccgattggagcggcgtttacgttgatgtgggtgcgattctggtgcacgaacgtcttgctatcgtcgatccagccggcggtgcccagccactgttctccgaggatggcaccctggcgttggcggtcaacggcgaaatctataaccacgctgtactcaaaggaacattgcagcagccctatgcgttccaaactcattctgattgcgaagtgattaatgcgctttaccgcgaagaaactccaacctcgtttctgaatcgcttaaatggaatttttgcattcgcattatgggacaagaccaccggacgtggcctcatcgcacgcgatccaatgggcgtggtgccgctgtactgggggcacgatcaggatggtcgcttacgcgtcgcgtcagagatgaaagcattggttgagcattgccccgatgttgcacaattcccacccggccattggtacgacaccacaacgggcacgctggtgaagtattacgaacgcccctggaaaaactattctgcagtggaaggagtgcaggtctcactacaggaactgcgtgaagccttcgagcgggccgtccatcgtcaactcatgaccgatgttccatacggtgtactgctgtctggtggattggattcttccctggtggctgcggtggccgcacgctacgcacgccatcgcatcgaaaccaatgatcagagcgaagcatggtggccacgtctgcactcatttgcgattggactgaaagactcgccagatttgagtgcggcgaacgtggctgctgaggcgttgaataccgtccaccatcgtttcgagtacaccttccaggaggggctggatgttctacctgaagtgattcgtcacattgaaacttacgatgtcacgacgattcgcgcatccacaccaatgttcctgctggcacgtcgcattaaggcgatgggagtgaagatggtgttgtcaggtgaaggcagcgatgaaatttttggcggttacctgtacttccacaaagcgccgaacgcacgcgagttccacgaagaattggtccgcaagctcaacgccctgtattactacgactgcttgcgcgccaacaaagcgatgatggcgtggggtgtcgagccgcgcgtgccgtttttggaccgtgaatttctcgatgtggctatgcggatggatgcgcagcataagatggtcgacaagaccagcaacggcccacaacggatggagaaaggcatcctgcgtgcagcgtttgacggctatttgccgccatcaatcctgtggcgacagaaggagcagttcagtgatggtgttggctacggttggatcgacggactgaaagcacacgctgaaacgcaagtctctgaccatgcgctggcaactgccgagacacgtttccaggtgaatcctccccagaccaaagaagcctattactaccgcagtatatttgagcgcttcttcccaagcccggcggcggctgagacggtaccgggcggtaaatcaatcgcctgttcttcaccggcggcgattgcctgggatgccagcttcgccacaatggctgacccatccggtcgtgcagtcagcggggttcatcaacaagcactgctgtag

SEQ ID NO: 144318 - protein, 563 aa, Xylella fastidiosa Ann-1
MCSIFGIFNLQPSDNLQILRHQALECSQRQRHRGPDWSGVYVDVGAILVHERLAIVDPAGGAQPLFSEDGTLALAVNGEIYNHAVLKGTLQQPYAFQTHSDCEVINALYREETPTSFLNRLNGIFAFALWDKTTGRGLIARDPMGVVPLYWGHDQDGRLRVASEMKALVEHCPDVAQFPPGHWYDTTTGTLVKYYERPWKNYSAVEGVQVSLQELREAFERAVHRQLMTDVPYGVLLSGGLDSSLVAAVAARYARHRIETNDQSEAWWPRLHSFAIGLKDSPDLSAANVAAEALNTVHHRFEYTFQEGLDVLPEVIRHIETYDVTTIRASTPMFLLARRIKAMGVKMVLSGEGSDEIFGGYLYFHKAPNAREFHEELVRKLNALYYYDCLRANKAMMAWGVEPRVPFLDREFLDVAMRMDAQHKMVDKTSNGPQRMEKGILRAAFDGYLPPSILWRQKEQFSDGVGYGWIDGLKAHAETQVSDHALATAETRFQVNPPQTKEAYYYRSIFERFFPSPAAAETVPGGKSIACSSPAAIAWDASFATMADPSGRAVSGVHQQALL

SEQ ID NO: 144319 - DNA, 1689 bp, Croceibacter atlanticus HTCC2559
  CDS (1)..(1689): transl_table=11
atgtgtggaatagtatgcgcattcgatttaaaagaaaagtctgaagttttaagacctcaagtgttagaaatggcaaaagctatacgtcatcgtggtccagattggagcggtatttatagcgatgataaggttataatggctcacgaaagattggctattgtagatccagcatctggtaaacaaccgttattgagtgatgatcgtaaacttatattagctgcgaatggagagatttacaaccatagggaattacgtaagcagtttgaaggaaagtatgattttaaaactgaaagtgactgcgaggttattttagctttatataaggaaaaaggagttgactttatagacgatatgaatggcatttttggttttgctatttatgatgcggaaaaggatgaatatttcgtggctagagaccatatgggaattattccattatatattggttgggatcaaaacggaacattttacgtagcttcagaattaaaggcgttagaaggtgtttgttctaaaattcaattatttcctccaggacattatatgtctagtaaagacggaaaatttgtaaaatggtataaaagagattggacagaatttgatgctgtaaaagataatgaaactagcattgctaaaattaaagaggcgctggaagctgctgtacaaagacagttaatgagtgatgtgccatatggtgtattgctttctggcggattagactcctctgtaacatctgcaatagcaaaaaaatatgctcaaaaaagagtagaaagtgatggtaaaaaagatgcttggtggccacaactgcatagtttttctgtaggtttagagggttctccagacttagctgctgcacgcaaagttgcagaccatatagatacagtacatcacgaaattaaattcacaatccaagaaggtttagatgcaataagagatgttatttacaatctcgaaacatatgacataacaacaatacgtgcaagtacgccaatgtatttaatggcacgtgtcattaagtctatggggataaaaatggtgctgtctggtgaaggtgcagatgagttgtttggtggctatttatactttcacaaggctccaaatgctcaagagtttcacgaagaaactgttcgtaaattaagtaaactacacatgtatgattgcttgcgtgctaataagagtttagcggcttggggaattgaaggtcgtgtaccatttttagataaagagtttatggatgttgcaatgagtataaacccacaagataaaatgattaatggtgagcgtatggaaaagtgggtagtacgtaaagcgtttgaagatatgataccagaaagtgtggcgtggagacaaaaagagcagtttagtgatggtgttggttacagttggatagatactttaaaagaaatggtaaacgatttaataacagatgaacaaatggcaaatgcacattttagattccctatacaaacgcctcaaaacaaagaggagttttattaccgtagtatttttgaagagcatttccctagtgacgctgcggcactttgtgttcctcaggagccaagtgtggcgtgtagtactaaaattgctttagagtgggatgaagcatttaaagatatgaatgatcctagtggtagagctgttgccaaagttcatgatgatgcttaccaagaaaaagaagctgtagcagtataa

SEQ ID NO: 144320 - protein, 562 aa, Croceibacter atlanticus HTCC2559
MCGIVCAFDLKEKSEVLRPQVLEMAKAIRHRGPDWSGIYSDDKVIMAHERLAIVDPASGKQPLLSDDRKLILAANGEIYNHRELRKQFEGKYDFKTESDCEVILALYKEKGVDFIDDMNGIFGFAIYDAEKDEYFVARDHMGIIPLYIGWDQNGTFYVASELKALEGVCSKIQLFPPGHYMSSKDGKFVKWYKRDWTEFDAVKDNETSIAKIKEALEAAVQRQLMSDVPYGVLLSGGLDSSVTSAIAKKYAQKRVESDGKKDAWWPQLHSFSVGLEGSPDLAAARKVADHIDTVHHEIKFTIQEGLDAIRDVIYNLETYDITTIRASTPMYLMARVIKSMGIKMVLSGEGADELFGGYLYFHKAPNAQEFHEETVRKLSKLHMYDCLRANKSLAAWGIEGRVPFLDKEFMDVAMSINPQDKMINGERMEKWVVRKAFEDMIPESVAWRQKEQFSDGVGYSWIDTLKEMVNDLITDEQMANAHFRFPIQTPQNKEEFYYRSIFEEHFPSDAAALCVPQEPSVACSTKIALEWDEAFKDMNDPSGRAVAKVHDDAYQEKEAVAV

SEQ ID NO: 144321 - DNA, 1677 bp, Pseudoalteromonas tunicata D2
  CDS (1)..(1677): transl_table=11
atgtgttcaatttttggggtgttagacatcaagtcagacccaatccagttacgtagccaagcaattgagatgtcaaagttacttaggcatcgagggcccgattggtctggagtatattcgtctgaaaaagcgattttagtccatgaaagattagcaattgttggtgttacaagtggtgctcagccactttataaccctgagcaaacaaacatcttagcggtgaatggtgaaatttataatcataaagaattagcaaaaaatctaaaggttgatttcgagtttcaaactgaatcagactgtgaagttattttggctctttataaagaaaaaggccctgagtttttagatgaccttaatgggatttttgctttttgtttgtatgatgaagaacaagatgcctatttaattggtcgtgatcacatcggtatcattccgctttatacaggtaccgatgagcatggcaatttttacgtcgcctcagagttaaaagcgttatcaccaatctgtaaccatattaaagagtttccaccaggtcattacttgtggagtcaagatggtgaattacgcccctattaccagcgtgactggaccagctttgacgctgtcaaagacaatagcgccactgctcaagacgttaaagttgctttagaggccgcggttaaacgtcaattaatgtgtgatgttccatacggggtattgctttcgggcggcttagactcgtcagttatttcagctatcacccaacgttttgccgctaaacgcatcgaagataatgataattcgaatgcttggtggcctcagcttcactctttttctgtcgggcttgcaggttctcctgatttagcggcggcacaaaaagttgcagatatgattggtaccgtgcaccacccaattatttttacagtacaacaaggaattgatgcgttaaaagaggtgatttatcatttagaaacttatgacgtcaccactattcgcgcttctacgccaatgtatttaatggcgcgccagataaaagcgatgggaattaaaatggttctttctggtgaaggtgccgatgagctatttggtggttatttgtattttcataaagcgcctgatgaaaaagagtttcatgaagagctaaatagaaaagtctcaaaactgcatttatttgattgtttacgcgccaataaatctatggccgcttggggtgttgaagcccgggttccatttttagacaaagagtttgtcgatgtcgcaatgcgcgtcaacccaattgctaaaatgtgcggtaaaaatggcaaaattgaaaagcatattttacgtcaagcctttgaaggttatttacctcatgaagtattgtggcgtcaaaaagagcagttctctgatggtgtcggctacagctggatagattctctaaaagaatatgtcgctgagcaagtgaccgatcagatgcttgcatcggctgcatttaaatttccaatcaatacacctgacagcaaagaagcttatttctatcgttgtatctttgcagaacatttcccaggtgatgcagctgcattgtgtgtaccttttggtaaatcagtcgcctgttcaacaccacaagctctggcttgggatgcgtcttttgccaataatgcagacccttctggtcgagctgctggtgttcataatgatgcttataacaaaacaaaatag

SEQ ID NO: 144322 - protein, 558 aa, Pseudoalteromonas tunicata D2
MCSIFGVLDIKSDPIQLRSQAIEMSKLLRHRGPDWSGVYSSEKAILVHERLAIVGVTSGAQPLYNPEQTNILAVNGEIYNHKELAKNLKVDFEFQTESDCEVILALYKEKGPEFLDDLNGIFAFCLYDEEQDAYLIGRDHIGIIPLYTGTDEHGNFYVASELKALSPICNHIKEFPPGHYLWSQDGELRPYYQRDWTSFDAVKDNSATAQDVKVALEAAVKRQLMCDVPYGVLLSGGLDSSVISAITQRFAAKRIEDNDNSNAWWPQLHSFSVGLAGSPDLAAAQKVADMIGTVHHPIIFTVQQGIDALKEVIYHLETYDVTTIRASTPMYLMARQIKAMGIKMVLSGEGADELFGGYLYFHKAPDEKEFHEELNRKVSKLHLFDCLRANKSMAAWGVEARVPFLDKEFVDVAMRVNPIAKMCGKNGKIEKHILRQAFEGYLPHEVLWRQKEQFSDGVGYSWIDSLKEYVAEQVTDQMLASAAFKFPINTPDSKEAYFYRCIFAEHFPGDAAALCVPFGKSVACSTPQALAWDASFANNADPSGRAAGVHNDAYNKTK

SEQ ID NO: 144323 - DNA, 1671 bp, Photobacterium sp. SKA34
  CDS (1)..(1671): transl_table=11
atgtgttctgtatttgggatcctagacattaagagcgacgcagcagcattgcgtcctattgcattagaaatgtcgaaaaagcttcgtcaccgtggcccagactggtcaggtatttatgcatcagaacatgccattcttgcgcatgaacgccttgcgattgtgggtctaaacagtggtgctcaacccatttatagcccagataaaaagttaatccttgctgttaacggtgaaatctacaaccacaaagaaatccgtgctcgctatgaaggcaaatacgatttccaaacagattcagactgtgaagttattcttgcgctataccaagatatgggcgaagagttacttgaagaacttaacggtattttcgcttttgttctttatgatgaagaaaaagacacctaccttgttggtcgtgaccacattggtattattccgctataccaaggctctgatgaaaacggcaactactatgttgcatcagaaatgaaagcgctggtgcctgtgtgtaaaacagtgagcgaattccctccaggttcttactacggtagtgctgatgcagagccacagcgttattataaccgtgattggaatgagtacgcagccgtacaaggtaactcaaccagcaaagaagaattaactgaagcactagaagccgctattaaacgtcagttaatgacagatgtaccttatggtgtcttactgtctggtggtttagactcgtcaattacatcagcagtggcaaaacgctttgctgcaatgcgtattgaagataatgaccaatctgaagcatggtggccacaacttcactcttttgccgtgggtcttgaaggcgcgcctgatttaaaagctgctcgtgaagttgctgataaaattggtaccgttcaccatgaaatgacatacaccattcaagaaggccttgatgcaatccgtgatgtgatttatcacattgaaacttacgatgtgacaactattcgcgcttcaacaccaatgttcttaatgggacgtaaaatcaaagcgatgggtatcaaaatggtactgtcaggtgaaggggctgatgagatctttggtggttacttatacttccacaaagcaccaaacgcgaaagaattccatgaagaaaccgtgcgtaaattgcttgctctaaacatgtttgactgtgctcgtgcgaacaaatcgctagcagcatggggggttgaaggtcgagtaccattcctagataaagaatttatcgatgtggcaatgcgtctaaaccctgaagacaaaatgtgtggtaacggtaagatggaaaaacatatcttacgtgagtgttttgaacactacctacctgaatctattgcatggcgtcaaaaagagcagttctctgatggtgtaggctacaactggattgatacactaaaagaagtggcagaagagaaagtgacggatcagcaattagaaactgcggcttaccgcttcccttacaacacaccaacaaccaaagaagcttacgcataccgtgagatttttgaagagctattcccactagaaagcgcagcaaaatgtgttcctggtggcccatctattgcttgttcaagcgcaaaagcgattgaatgggatgaaagctttaagaatgcagcggatccatcaggtcgtgctattgcggcagtacataacgaagcttataaaaagtaa

SEQ ID NO: 144324 - protein, 556 aa, Photobacterium sp. SKA34
MCSVFGILDIKSDAAALRPIALEMSKKLRHRGPDWSGIYASEHAILAHERLAIVGLNSGAQPIYSPDKKLILAVNGEIYNHKEIRARYEGKYDFQTDSDCEVILALYQDMGEELLEELNGIFAFVLYDEEKDTYLVGRDHIGIIPLYQGSDENGNYYVASEMKALVPVCKTVSEFPPGSYYGSADAEPQRYYNRDWNEYAAVQGNSTSKEELTEALEAAIKRQLMTDVPYGVLLSGGLDSSITSAVAKRFAAMRIEDNDQSEAWWPQLHSFAVGLEGAPDLKAAREVADKIGTVHHEMTYTIQEGLDAIRDVIYHIETYDVTTIRASTPMFLMGRKIKAMGIKMVLSGEGADEIFGGYLYFHKAPNAKEFHEETVRKLLALNMFDCARANKSLAAWGVEGRVPFLDKEFIDVAMRLNPEDKMCGNGKMEKHILRECFEHYLPESIAWRQKEQFSDGVGYNWIDTLKEVAEEKVTDQQLETAAYRFPYNTPTTKEAYAYREIFEELFPLESAAKCVPGGPSIACSSAKAIEWDESFKNAADPSGRAIAAVHNEAYKK

SEQ ID NO: 144325 - DNA, 1665 bp, Flavobacteria bacterium BBFL7
  CDS (1)..(1665): transl_table=11
atgtgtggaatagtagggatgtttcagctgaaaaaagacagccaagagcaaagagaaaaagttttagaattatcaaaaaaattaagacatcgtggaccagactggtctggaatttattgtggagataaagctatactagctcatgaacgattaacaatcgtcgacccacaatctggtggacaaccattatatagtccagatggtaaaattgtacttgctgttaacggagaaatttacaatcatcagaaaatacgtaatcattataaagatacttatgaattcaaaactaaaagtgattgtgaggtaattctagcactttatcaagataaaggagtggattttatggatgagcttacaggtatgtatggatttgcattatatgatagtgataaagacgttttcttatgtgcacgagatcatcaagggattatacctttgtattacggaactgatgatttggggcaattttatgtggcaagcgagcttaaagctttagagggaacttgcaatgagatagctccattcccaccaggtcattattactatagtgaaacaggtgaatttgtaaaatggtacaacagagaatggaaagattatgatgcagtaaaagacaacaccagctctgtagcagatcttaaacaagctatggaagactctgtacacagacatttaatgagcgacgtcccttatggggttttattatctggtggtctagatagctctatagtaagcgccgttgcaaaaaaatatgcagcaaaacgtatagaatcaggtgataacaaagaggcctggtggcctcagttacattcatttgccataggtttagaaggaagtcctgatctagcagcagcacaagaagttgcagatcatataggcactgtacatcacagtgtgaattttaccattcaagaaggattggacgctattaaagatgtagtatattacctagagacatatgacgtcaccaccattagagcatctactcctatgtacttactggctcgagtaattaaatccatgggaattaagatggttctttctggagaaggcagcgatgaaatctttggtggttatctttatttccataaggcgcctaatgcagaagaatttcataaagaaacagtacgcaaactagatacattacacctttacgataatcttagagcaaataagtcgctagccgcatggggaattgaaggtcgtgtgcctttcctagataaagagtttatggatgttgccatgagactaaatcctgaagataaaatgtgtggcggcggcaaaatggaaaaacatatcctcagagaagcatttgaggattacctacctcatagtgtagcctggagacaaaaagaacaatttagtgatggtgtaggatatagttggatcgatacattaaaagaagttgtgaacgatgtagtaactgatgatatgatggaagctgcacccttcaaatttaaaatcaatcctccaaaaaataaagaagaatactattatcgcagtatttttagtgagcatttccctagcgacacagcagcaagttgtgttccttctttaaaatctgttgcttgttccacaccagtagcactagaatgggatgaagcttttaaaaatatgaacgatccttcaggtcgtgcggtaagtggtgtacatgatgaaggatattaa

SEQ ID NO: 144326 - protein, 554 aa, Flavobacteria bacterium BBFL7
MCGIVGMFQLKKDSQEQREKVLELSKKLRHRGPDWSGIYCGDKAILAHERLTIVDPQSGGQPLYSPDGKIVLAVNGEIYNHQKIRNHYKDTYEFKTKSDCEVILALYQDKGVDFMDELTGMYGFALYDSDKDVFLCARDHQGIIPLYYGTDDLGQFYVASELKALEGTCNEIAPFPPGHYYYSETGEFVKWYNREWKDYDAVKDNTSSVADLKQAMEDSVHRHLMSDVPYGVLLSGGLDSSIVSAVAKKYAAKRIESGDNKEAWWPQLHSFAIGLEGSPDLAAAQEVADHIGTVHHSVNFTIQEGLDAIKDVVYYLETYDVTTIRASTPMYLLARVIKSMGIKMVLSGEGSDEIFGGYLYFHKAPNAEEFHKETVRKLDTLHLYDNLRANKSLAAWGIEGRVPFLDKEFMDVAMRLNPEDKMCGGGKMEKHILREAFEDYLPHSVAWRQKEQFSDGVGYSWIDTLKEVVNDVVTDDMMEAAPFKFKINPPKNKEEYYYRSIFSEHFPSDTAASCVPSLKSVACSTPVALEWDEAFKNMNDPSGRAVSGVHDEGY

SEQ ID NO: 144327 - DNA, 1665 bp, Vibrio sp. Ex25
  CDS (1)..(1665): transl_table=11
atgtgttcagtatttggcattttagacattaaaagcgatgcagccgcattgcgccctatcgcattagaaatgtcgaaaaaacttcgtcatcgtggccctgactggtctgggatttactcttcagagcgcgctattttagcgcatgagcgcttggcgattgttggcctaaatagtggtgcacaaccgctatacagccctgataaaaagctcatccttgcagtcaatggtgaaatctacaaccataaagaaattcgtgctcgttacgaaggaaaatacgagtttcaaaccgattcagactgtgaagtcattcttgcactgtaccaagatatgggtgcagatctccttgaagaactaaacggtattttcgcttttgttctgtacgatgaagaaaaagacgaatacttagtcggtcgcgatcacattggcattatccctctttatcaaggtcatgatgagcatggcaactactatgttgcatcagagatgaaggcacttgttccagtatgtaaaacagtgagcgagttccctcctggtagctactacagttcaaaagatgccgagccaacgcgttactatgttcgtgactggaacgaatacgctgccgttcaaggtaacaccaccagcaaagaagaactgactgaagcactagaagcagcggttaaacgccaactaatgacggatgttccatatggtgttttactatcaggtggtttagattcatccatcacctctgctgtggctaaacgttttgctgcaatgcgaattgaagacgatgaaaagtctgaagcttggtggccacaactgcactcttttgctgtgggcctagaaggcgcgcctgacctgaaagccgctcgcgaagttgccgaccaaatcggtaccgttcaccatgaaatgacttatacaattcaagaaggtctcgacgcgattcgcgacgtgatttaccacatcgaaacgtacgatgtgaccaccatccgcgcatccacacctatgttcttaatgggtcgtaagatcaaagcgatgggcattaagatggtactttctggtgaaggtgcagatgagatctttggtggttacctatatttccacaaagcaccaaacgcgaaagagttccacgaagaaacggtacgtaagctgcttgctctgaacatgtttgactgcgctcgcgcaaacaaatcgctagcggcatggggggttgaaggccgagtaccgttccttgataaagagtttatcgacgttgcaatgcgcctaaacccagcagataagatgtgtggcaacggcaaaatggaaaaacacattctacgcgagtgttttgagcattacttgccagagtcgatcgcatggcgtcaaaaagaacagttctctgatggcgtaggttacagctggattgatacgttgaaagaagtcgcagagcaaaaagtgacggatcagcagatggaaacggctcaataccgcttcccatacaacacgccaaccacaaaagaaggttacgtgtaccgagaaatctttgaagagctgttcccactaccttcagcggctgagtgtgtgccaggtggtccttcagtagcttgttcatcagcgaaagcgattgaatgggatgagtcattccaaaactgtgtagacccgtcaggtcgtgcggtgcaaaccgtccataacgacgcttactaa

SEQ ID NO: 144328 - protein, 554 aa, Vibrio sp. Ex25
MCSVFGILDIKSDAAALRPIALEMSKKLRHRGPDWSGIYSSERAILAHERLAIVGLNSGAQPLYSPDKKLILAVNGEIYNHKEIRARYEGKYEFQTDSDCEVILALYQDMGADLLEELNGIFAFVLYDEEKDEYLVGRDHIGIIPLYQGHDEHGNYYVASEMKALVPVCKTVSEFPPGSYYSSKDAEPTRYYVRDWNEYAAVQGNTTSKEELTEALEAAVKRQLMTDVPYGVLLSGGLDSSITSAVAKRFAAMRIEDDEKSEAWWPQLHSFAVGLEGAPDLKAAREVADQIGTVHHEMTYTIQEGLDAIRDVIYHIETYDVTTIRASTPMFLMGRKIKAMGIKMVLSGEGADEIFGGYLYFHKAPNAKEFHEETVRKLLALNMFDCARANKSLAAWGVEGRVPFLDKEFIDVAMRLNPADKMCGNGKMEKHILRECFEHYLPESIAWRQKEQFSDGVGYSWIDTLKEVAEQKVTDQQMETAQYRFPYNTPTTKEGYVYREIFEELFPLPSAAECVPGGPSVACSSAKAIEWDESFQNCVDPSGRAVQTVHNDAY

SEQ ID NO: 144329 - DNA, 1674 bp, Alteromonadales bacterium TW-7
  CDS (1)..(1674): transl_table=11
atgtgttcaatctttggggtattagatattaaatctgatcccgctcaattgcgaactcaagcaattgaaatgtcaaaattactacgacaccgaggcccagattggtctggtgtttatgcgtctgaaaaagcaattttagttcacgaacgtcttgcaattgttggcgtatctagtggtgcgcaacctttatacaaccctgaaaaaacgcatattttagcggtaaacggggaaatatataatcacaaagagttagctgcaaacttagacactgattttacttttcagacacagtctgactgtgaagtaatattagcgctttataaacaaaaaggtcctgagtttttagatgacttgaacggtatttttgcattttgcttatacgatgaagagaatgacgcctacttaattggtcgcgatcacattggtattataccgctatacactggccacgatgagcacggtaacttttatgttgcatctgagctaaaagcactttctccaatttgtaaacatattgaagaatttcctcctggtcattacctttacagtaaagatggtaagttaaagccgtattataaacgcgattggcaaacattcgacgcagtggaagataacagtgcagaatcatcagatgtgaaagacgcactagaggcagccgttaaacgtcaacttatgtgtgatgtaccttacggtgtattactatctggtggattagactcatcggttatttctgctattacacagcgttttgcagctaaacgtattgaagataacgacgaaagtgatgcttggtggcctaagctgcactcgttttcagtgggtcttgagggttcacccgatttagcggcagctcaaaaggtggccgacatgattgggacagtgcaccaccctatcatttttactattcaagaaggtattgatgcgcttcgtgaagttatttaccacatagaaacttacgatgtaaccactattcgtgcatcaacccctatgtatttaatggctcgtcaaattaaagccatgggtattaaaatggttctttctggtgagggtgcagatgaattatttggtggttacttatacttccataaagcgccaaatgcacaagagtttcatgaagaactaaaccgtaaagtatctaaacttcatatgtttgactgcctgcgcgctaataagtcaatggccgcatggggtgttgaagcccgcgtaccattcttagacaaagaatttgttgatgttgctatgcgcatcaatcctgaagctaaaatgtgtaaagatggcaaaattgaaaagcatattttacgtgaaggctttggtggttacctacctgatgaagttttatggcgccaaaaagaacagttttctgatggtgttggctacagctggatagatacattaaaagagtatgttgaagagcaagtaagcgatcaagacctcgctaacgctaagtttaaataccctattaatacccctgattcaaaagaagcttattactaccgtgctatttttgagtcgcacttcccaggtgacgcctcggctaagtgtgtaccacacggtaagtcagtcgcttgctcaacaccagaagcacttgcttgggatgaatcattccaaaataatgcggacccttcaggtcgttcagcgggcgtacacaacgacgcttacacaggtaaaaaataa

SEQ ID NO: 144330 - protein, 557 aa, Alteromonadales bacterium TW-7
MCSIFGVLDIKSDPAQLRTQAIEMSKLLRHRGPDWSGVYASEKAILVHERLAIVGVSSGAQPLYNPEKTHILAVNGEIYNHKELAANLDTDFTFQTQSDCEVILALYKQKGPEFLDDLNGIFAFCLYDEENDAYLIGRDHIGIIPLYTGHDEHGNFYVASELKALSPICKHIEEFPPGHYLYSKDGKLKPYYKRDWQTFDAVEDNSAESSDVKDALEAAVKRQLMCDVPYGVLLSGGLDSSVISAITQRFAAKRIEDNDESDAWWPKLHSFSVGLEGSPDLAAAQKVADMIGTVHHPIIFTIQEGIDALREVIYHIETYDVTTIRASTPMYLMARQIKAMGIKMVLSGEGADELFGGYLYFHKAPNAQEFHEELNRKVSKLHMFDCLRANKSMAAWGVEARVPFLDKEFVDVAMRINPEAKMCKDGKIEKHILREGFGGYLPDEVLWRQKEQFSDGVGYSWIDTLKEYVEEQVSDQDLANAKFKYPINTPDSKEAYYYRAIFESHFPGDASAKCVPHGKSVACSTPEALAWDESFQNNADPSGRSAGVHNDAYTGKK

SEQ ID NO: 144331 - DNA, 1614 bp, Candidatus Desulfococcus oleovorans Hxd3
  CDS (1)..(1614): transl_table=11
atgtgcggcattgctggatgtttcggcagaaaggatgaaccgaccgttaaacgcatgctggataccctgggccatcggggccccaatgaccgggggatgcatgcgggcgccagtttcgtggtgggccatacccggctttccatcgtggacgtggccaccggccgtcagcccatcctcaccggggacggtacaaaaggtatcgtggccaacggtgaaatttacaacttccgcaagctgcggatggggattgcggataagtaccagttccgcaccaggtcggacaccgaggtcgtgcttcatctctacgaagaaaaggggcctgcctgcgtcaaggacttagacggcatgtttgcgttcgccctgtttgacggcgacgcctttatgctggcccgggaccctgtcggcatcaagccgctctattacgggttcaagcaggacgcgctctatttttcctccgagctgggggccatgagttttgccggcctggacgaggtccacgagtttccggcgggtcattactacacacccaaggaggggtttgtgcagtactacaaggtgccgcccattgaggatgaccagcttaccgacatcgaggaaacctgcgaaattatccgggaaacctttattcacgccgtgaagaaaaggctgctggccgaccccgaggtgccggtgggctctttctgcagcggcgggctggacagcagcctggtggcggccattgccgcggacgagattccccggcttcacacctttgtggtgggcatgaaggacgccttcggggatgtgagtgacgatgtcaaggcggcccgtatagccgcggcccatatcggttccacccatcacgagctgattttcaccgaggacgagtactacgaggccctgcccacggtgatcaacaagctggaaagctatgatccctccctggtgcggtgcgccgtgccctgttacttcacctgcaagatggcggccgaatatgtcaccgtggtgctgaccggcgaaggggccgacgagctgttcaccggctatcattacatgaagcatttcccggaagacaagctgaacctcgaagcccggcgctgcatcggcaacctgcacaatatcaacctgcagcgggccgaccgcatgggcatgctgttcagcctggaacttcgggtgccctttctggacgaagccatggtggacctttccatgaagattccccacgaactcaagattcgggaacacaacggcgccaagatcgaaaaatggattctgcgcaaagcctttgaaaacacgcactacctgccggacgatatcctgtggcgctacaaggtgcagtacacccagggcgcgggctgcgaggacctgggcgagcgcctggccaaccggatgggcgatgacgagtacgagaaaatcaaggccgaaaatccggacgcggtgatcaacagcaaggaggcggcttactacttcaagattttccgcgagtatcatccccaggattcgattctgggctccatcggcatctggaccgggtttgattttgccgaggagcgggagaaggtcaaggggaccgtggacggggacctgaagcacgagcacgaagaagagaccgacgacacctctcaggtggcctga

SEQ ID NO: 144332 - protein, 537 aa, Candidatus Desulfococcus oleovorans Hxd3
MCGIAGCFGRKDEPTVKRMLDTLGHRGPNDRGMHAGASFVVGHTRLSIVDVATGRQPILTGDGTKGIVANGEIYNFRKLRMGIADKYQFRTRSDTEVVLHLYEEKGPACVKDLDGMFAFALFDGDAFMLARDPVGIKPLYYGFKQDALYFSSELGAMSFAGLDEVHEFPAGHYYTPKEGFVQYYKVPPIEDDQLTDIEETCEIIRETFIHAVKKRLLADPEVPVGSFCSGGLDSSLVAAIAADEIPRLHTFVVGMKDAFGDVSDDVKAARIAAAHIGSTHHELIFTEDEYYEALPTVINKLESYDPSLVRCAVPCYFTCKMAAEYVTVVLTGEGADELFTGYHYMKHFPEDKLNLEARRCIGNLHNINLQRADRMGMLFSLELRVPFLDEAMVDLSMKIPHELKIREHNGAKIEKWILRKAFENTHYLPDDILWRYKVQYTQGAGCEDLGERLANRMGDDEYEKIKAENPDAVINSKEAAYYFKIFREYHPQDSILGSIGIWTGFDFAEEREKVKGTVDGDLKHEHEEETDDTSQVA

SEQ ID NO: 144333 - DNA, 1788 bp, Pseudomonas putida GB-1
  CDS (1)..(1788): transl_table=11
atgtgcggattagcaggagagttgcgtttcacccctatcgaccaagcccctcgcccagccgacctggctgcggtagagcgcatcacccatcacctggcgccacgcggcccggatgcgtggggcttccatagccaaggcccgattgcccttggccaccggcgcctgaaaatcatggacttgtccgatggctcggcgcagccgatggtcgacaacaccctgggcttgtcactggctttcaacggtgccatctacaacttccccgaactgcgccaggaactgcaagacctgggctacagcttctggtccgacggcgataccgaggtgctgctcaagggctaccacgcctggggcgcggcactgctgcccaagctcaacggcatgtttgccctggccatctgggagcgcgataaccagcgcctgttcctggcccgcgaccgcctcggcgtgaagcccttgtacctgtcgcgcaacggcgagcgcctgcgctttgcctctaccctgccggcgctgctcaagggcggcgacatcgacccgatgctcgacccggtggcgctcaaccactacctgaacttccacgccgtggtgccagcaccgcgcaccctgctggccaacgtgcaaaagctggaacccggcacctggatgcgcattgaccggcatggcgaagtagagcgccagacctggtggcaactgcaatacggcgccaacccggacgagcgcgatctcgacctggaaggctggaccacccgcgtgctcgacgccacccgtgacgccgtggccattcgccaacgggctgccgtcgacgtgggtgtgttgctgtccggcggggtcgattccagcctgctggtgggcctgttgcgcgaagtgggcgtggacgacctgtcgaccttctccatcggcttcgaggacgccggcggcgagcgcggcgacgagttccagtattccgacctgatcgccaagcactacggcacccgccatcaccaactgcgcattgccgaacacgaaatcatcgaccagttgccggccgcgttccgcgccatgagcgagccgatggtcagccacgactgcatcgccttctacctgctgtcgcgggaagtggccaagcactgcaaaggcgtgcagagcggccagggcgcggacgaactgttcgccggttaccactggtacccgcaggtggccggcgccgaggatgcctttgccgcctaccgcgacgccttcttcgaccgcagccatgccgagtaccgcgataccgtacaggccccttggctgttggaaaccgacgccgccggtgacttcgtgcgcgagcacttcgcccgccccggcgcacgggacgcggtggacaaggccttgcgcctggacagcacggtgatgctggtcgacgacccggtcaaacgggtggacaacatgaccatggcctggggcctcgaagcacgcacgccattcctcgactaccgcctggtggaactgtcggcacgcatcccggcgcgcttcaagctgcccgacggcggcaagcaggtgctcaagcaggcagcacggcgggtgatcccgcacgaggtaatcgaccgcaaaaagggctacttcccggtgccgggcctgaaacacctggaaggtgccaccctgggctgggtgcgtgagctgctgaccgaccccagccaggaccgtgggctgttcaacccggccatgctcgaccgcctgctgagcaacccccatggccagctgacaccgctgcgcggctccaagctgtggcagctggcggcgctgaacctgtggctgagcgaacaaggaatctga

SEQ ID NO: 144334 - protein, 595 aa, Pseudomonas putida GB-1
MCGLAGELRFTPIDQAPRPADLAAVERITHHLAPRGPDAWGFHSQGPIALGHRRLKIMDLSDGSAQPMVDNTLGLSLAFNGAIYNFPELRQELQDLGYSFWSDGDTEVLLKGYHAWGAALLPKLNGMFALAIWERDNQRLFLARDRLGVKPLYLSRNGERLRFASTLPALLKGGDIDPMLDPVALNHYLNFHAVVPAPRTLLANVQKLEPGTWMRIDRHGEVERQTWWQLQYGANPDERDLDLEGWTTRVLDATRDAVAIRQRAAVDVGVLLSGGVDSSLLVGLLREVGVDDLSTFSIGFEDAGGERGDEFQYSDLIAKHYGTRHHQLRIAEHEIIDQLPAAFRAMSEPMVSHDCIAFYLLSREVAKHCKGVQSGQGADELFAGYHWYPQVAGAEDAFAAYRDAFFDRSHAEYRDTVQAPWLLETDAAGDFVREHFARPGARDAVDKALRLDSTVMLVDDPVKRVDNMTMAWGLEARTPFLDYRLVELSARIPARFKLPDGGKQVLKQAARRVIPHEVIDRKKGYFPVPGLKHLEGATLGWVRELLTDPSQDRGLFNPAMLDRLLSNPHGQLTPLRGSKLWQLAALNLWLSEQGI

SEQ ID NO: 144335 - DNA, 1863 bp, Actinomadura hibisca
  CDS (1)..(1863): transl_table=11
atgtccggattcgccggctgggtggactacgagcgcgacctgcgccgcgagggcgccacgacccgcacgatgaccgcgacgatggcctgccgcggccccgacgccgaggaggtctggctgagcgagcgcgccgcgttcgggcaccgccgcctggcggtgctggaccccaagggcggccgccagcccatgcgcgccgagcacgacggccgcgagctggcggtgctggccttcaacggcgagatctacaacgccggggaggtgcgcgccgagctggcggcgcgcggccaccgcttccgcacccgcagcgacaccgaggtgatcctggaggcgtacctggagtggggcgcgggctgcgccgcgaagctgaacggcatcttcgcgttcgccgtctgggacccgcgcagcgaggaactgctgctcgcccgcgaccagctcggcgcgaagcccgtcatctactatccgacgccgaccggcgtgctgttcgcgtccgagcccaaggcgctgctggcgcacccgtgggtggacgcggtggtcgacaccgacgggttccgcgagctgctgtcgcaggccgggacgcccggcgcggtggtgttcaagggcatgcacgaggtgcgcgccgggcacgtggtgcggatcggcgagcgcggcatcgtcaccgagaagtactggggcctggagggccgcgagcacaccgacgaccgggacgccaccatcgccaacgtccggcggctcctggaggagtcgatcggccgccagctccgcgccgacgtgccggtctgctcgctgctgtcgggcggcctggactccagcggcctcaccgcgatcgccgcgcacatcctcgccgagcgcggcgagggcccggtccgcaccttcaccgtggactacgcgggcctcgccgagaacttcgtgcccgaccaggtccgcacctcgctggacgcgccgtacgtgaaggacctcgtggcgcacgtcggctccgagcacaccgacgtcatgctggacacgagcgacctgctcgaccccgtcatgcgcgcggagacgatccgggcccgcgacctgccgagcccgctcggcgacatgcagaccggcctgtacctgctgtaccgcgcggcggccgagcactccaccgtcgcgctcaccggccagctcgccgactcgttgttcggcggcccggcctgggtgcaggaccccgagttcgccaacgccgacaccttcccgtgggtcgcgctcgcccagcgccgcgcctgccccgacgggctcggcaacgggctgctcgccccggcgctgcgccggtccctggacatccccggctacgtccgcgaccgcttccacgaggccctcgccgaggttccgcacgtcggcgaggccgacccgcaggaacgccggatgcgggagatcacctacacccacctgacccgctaccccgagaccctcatccgcaacgacgagcggctcagcgcctacgtggggctggagacgcgcgtcccgttctgcgaccccgagctgctccagtacgcgttcaacacgccctggcacctccagacgttcgacggccgcgagaagagcctgctgcgcgccgccgtcgccgacctgctgcccgagtcggtgctgaagcgcccgaagagcccgttcccggtgagcgtggaccccggctacgccaaggtgctgcgcaccgagctgtcggagatcctggcggacccgtccgcgcccgtcgcgccgttcctggacccgcagggcgcccgcgagctgctcgacgacccgaacagcctcgccgagggctggcgcgggcgcaccaacgtcgagctgatcctgcaactcgacacctggctccgcgactacggcgtccgtctcgacctggacgtctga

SEQ ID NO: 144336 - protein, 620 aa, Actinomadura hibisca
MSGFAGWVDYERDLRREGATTRTMTATMACRGPDAEEVWLSERAAFGHRRLAVLDPKGGRQPMRAEHDGRELAVLAFNGEIYNAGEVRAELAARGHRFRTRSDTEVILEAYLEWGAGCAAKLNGIFAFAVWDPRSEELLLARDQLGAKPVIYYPTPTGVLFASEPKALLAHPWVDAVVDTDGFRELLSQAGTPGAVVFKGMHEVRAGHVVRIGERGIVTEKYWGLEGREHTDDRDATIANVRRLLEESIGRQLRADVPVCSLLSGGLDSSGLTAIAAHILAERGEGPVRTFTVDYAGLAENFVPDQVRTSLDAPYVKDLVAHVGSEHTDVMLDTSDLLDPVMRAETIRARDLPSPLGDMQTGLYLLYRAAAEHSTVALTGQLADSLFGGPAWVQDPEFANADTFPWVALAQRRACPDGLGNGLLAPALRRSLDIPGYVRDRFHEALAEVPHVGEADPQERRMREITYTHLTRYPETLIRNDERLSAYVGLETRVPFCDPELLQYAFNTPWHLQTFDGREKSLLRAAVADLLPESVLKRPKSPFPVSVDPGYAKVLRTELSEILADPSAPVAPFLDPQGARELLDDPNSLAEGWRGRTNVELILQLDTWLRDYGVRLDLDV

SEQ ID NO: 144337 - DNA, 1842 bp, Oryza sativa subsp
  CDS (1)..(1842)
atggccacggcctcatggggggtgtggtggttgttgtggttgtccttgtttatgtatttttgtctctttgtgaggggttcgcataggaatcgtaaggatatgagacagctgaagcacaggggacccgactggtccgggttgtaccagtgcgagggaaacttcctcgctcagcagcgtctcgccatcgtctccccgctctccggcgaccagccgctgtacaacgcggaccggaccatcgtcgtcgtggccaatggagagatctacaaccacaagaagatcaggaagcagttcgcctccaagcacacgttcagcaccggcagcgactgcgaggtcatcatcccgctgtatgaggagtacggcgaggacttcgtcgacatgctggacggcgtgttcgccttcgtcctctacgacacccgcaccaagacgtacatggccgcccgcgacgccatcggcgtcaaccccctctacatcggcaggggcagcgacggcgccgtctggatatcgtccgagatgaaggcgctgaacgaggactgcgtggagttcgagatcttccctccgggccacctctactccagcgccgccggcgggctccggcggtggtacaagccgcagtggttcgccgagaacgtcccggcgacgccgtaccagccactcctcctcagagaggccttcgagaaggccgtcatcaagaggctcatgaccgacgtgcccttcggcgtcctcctctccggcggcctcgactcctccctcgtcgccgcggtgaccaagcgccacctcatcaagactgaagccgccgagaagttcggagctgagctccattccttcgtcgttggccttgagggttcccctgacctgatagctgcacgagaggtcgctgaccacctaggaaccatccatcacgagttccacttcactgtccaggatggcatcgacgcgatcgaggaggtcatctaccacgacgagacgtacgacgtgacgacgatacgggccagcacgccgatgttcctgatggcgcgcaagatcaaggcgctcggggttaagatggtgctgtccggtgaaggctccgacgagctcctcggcggttacctctacttccacttcgcccccaacaaggaagagttccacaaggagacctgccgcaaggtgaaagcacttcatcagtatgactgtctgcgtgctaacaaggcgacgtctgcctggggactggaggtccgtgtgccgttcctcgacaaggagttcatcaacgtcgccatgagcatggaccctgagtggaagatgtacaatgctgatcttggtcgcatcgagaagtgggttatgaggaaggcgttcgacgacgaggagcatccttacctgccgaagcacattctgtacaggcagaaagagcagttcagtgatggcgtcggctacaactggatcgatggcctgaaggctttcaccgagcagcaggtcagtgatgaaatgatgaagaacgctgccaaagtgtacccgcacaacacgcccgtcaacaaggaggcgtactactaccgcatgatatttgagaggctcttcccgcaggaatcggcgagggagacggtgccgtggggcccgagcatcgcgtgcagcacgccggcggcgatcgagtgggtggagcagtggaaggcgtcgcacgacccatccggccggctgatcgcctcccacaactccgcctccgcctccgccaaccacaccaaccacgcaaacgccaacgccaacggcaacagcaacggcaaggccaacggcaactgcgcgatggcggccaacgggacgaacggcgtcggcctggttgtggccaacgggacagccaacgggaagatggaagcataa

SEQ ID NO: 144338 - protein, 613 aa, Oryza sativa subsp
MATASWGVWWLLWLSLFMYFCLFVRGSHRNRKDMRQLKHRGPDWSGLYQCEGNFLAQQRLAIVSPLSGDQPLYNADRTIVVVANGEIYNHKKIRKQFASKHTFSTGSDCEVIIPLYEEYGEDFVDMLDGVFAFVLYDTRTKTYMAARDAIGVNPLYIGRGSDGAVWISSEMKALNEDCVEFEIFPPGHLYSSAAGGLRRWYKPQWFAENVPATPYQPLLLREAFEKAVIKRLMTDVPFGVLLSGGLDSSLVAAVTKRHLIKTEAAEKFGAELHSFVVGLEGSPDLIAAREVADHLGTIHHEFHFTVQDGIDAIEEVIYHDETYDVTTIRASTPMFLMARKIKALGVKMVLSGEGSDELLGGYLYFHFAPNKEEFHKETCRKVKALHQYDCLRANKATSAWGLEVRVPFLDKEFINVAMSMDPEWKMYNADLGRIEKWVMRKAFDDEEHPYLPKHILYRQKEQFSDGVGYNWIDGLKAFTEQQVSDEMMKNAAKVYPHNTPVNKEAYYYRMIFERLFPQESARETVPWGPSIACSTPAAIEWVEQWKASHDPSGRLIASHNSASASANHTNHANANANGNSNGKANGNCAMAANGTNGVGLVVANGTANGKMEA

SEQ ID NO: 144339 - DNA, 1593 bp, Oryza sativa subsp
  CDS (1)..(1593)
atgtgtggcatcctcgccgtgctcggcgtcgcagacgtctccctcgccaagcgctcccgcatcatcgagctatcccgccggttacgtcatagaggccctgattggagtggtatacactgctatcaggattgctatcttgcacaccagcggttggctattgttgatcccacatccggagaccagccgttgtacaatgaggacaaatctgttgttgtgacggtgaatggagagatctataaccatgaagaattgaaagctaacctgaaatctcataaattccaaactgctagcgattgtgaagttattgctcatctgtatgaggaatatggggaggaatttgtggatatgttggatgggatgttcgcttttgttcttcttgacacacgtgataaaagcttcattgcagcccgtgatgctattggcatttgtcctttatacatgggctggggtcttgatgtttgcaggataaaaattctggttttgatatatgttccttctaagaaatttaaggttttcgtcactggtcatgaagtaggattctttttcgatgtaatatcagggtccttgttcaaggctattattaagaggctaatgacagatgtgccatttggtgttctcttgtctggtggactggactcttctttggttgcatctgttgtttcgcggcacttggcagaggcaaaagttgccgcacagtggggaaacaaactgcatacattttgcattggtttgaaaggttctcctgatcttagagctgctaaggaagttgcagactaccttggtactgttcatcacgaactccacttcacagtgcaggaaggcattgatgcactggaggaagtcatttaccatgttgagacatatgatgtaacgacaattagagcaagcaccccaatgttcttgatgtcacgtaaaattaaatctttgggggtgaagatggttctttcgggagaaggttctgatgaaatatttggcggttacctttattttcacaaggcaccaaacaagaaggaattccatgaggaaacatgtcggaagataaaagcccttcatttatatgattgcttgagagcgaacaaatcaacttctgcatggggtgttgaggcccgtgttccgttccttgacaaaaacttcatcaatgtagctatggacattgatcctgaatggaaaatgataaaacgtgatcttggccgtattgagaaatgggttctccggaatgcatttgatgatgaggagaagccctatttacctaagcacattctatacaggcaaaaggagcaattcagtgatggtgttgggtacagttggattgatggattgaaggatcatgcaaatgaacataatgctgctaggttgacagtacctggaggtcctagcgtcgcgtgcagcactgctaaagctgttgaatgggacgcagcctggtccaaaaaccttgatccatctggtcgtgctgctcttggtgttcatgatgctgcatatgaagatactctacaaaaatctcctgcctctgccaatcctgtcttggataacggctttggtccagcccttggggaaagcatggtcaaaaccgttgcttcagccactgccgtttaa

SEQ ID NO: 144340 - protein, 530 aa, Oryza sativa subsp
MCGILAVLGVADVSLAKRSRIIELSRRLRHRGPDWSGIHCYQDCYLAHQRLAIVDPTSGDQPLYNEDKSVVVTVNGEIYNHEELKANLKSHKFQTASDCEVIAHLYEEYGEEFVDMLDGMFAFVLLDTRDKSFIAARDAIGICPLYMGWGLDVCRIKILVLIYVPSKKFKVFVTGHEVGFFFDVISGSLFKAIIKRLMTDVPFGVLLSGGLDSSLVASVVSRHLAEAKVAAQWGNKLHTFCIGLKGSPDLRAAKEVADYLGTVHHELHFTVQEGIDALEEVIYHVETYDVTTIRASTPMFLMSRKIKSLGVKMVLSGEGSDEIFGGYLYFHKAPNKKEFHEETCRKIKALHLYDCLRANKSTSAWGVEARVPFLDKNFINVAMDIDPEWKMIKRDLGRIEKWVLRNAFDDEEKPYLPKHILYRQKEQFSDGVGYSWIDGLKDHANEHNAARLTVPGGPSVACSTAKAVEWDAAWSKNLDPSGRAALGVHDAAYEDTLQKSPASANPVLDNGFGPALGESMVKTVASATAV

SEQ ID NO: 144341 - DNA, 1761 bp, Oryza sativa subsp
  CDS (1)..(1761)
atgtgcgggatcctggccgtgctcggcgccgccgactggctgaagcacaggggacccgactggtccgggttgtaccagtgcgagggaaacttcctcgctcagcagcgtctcgccatcgtctccccgctctccggcgaccagccgctgtacaacgcggaccggaccatcgtcgtcgtggccaatggagagatctacaaccacaagaagatcaggaagcagttcgcctccaagcacacgttcagcaccggcagcgactgcgaggtcatcatcccgctgtatgaggagtacggcgaggacttcgtcgacatgctggacggcgtgttcgccttcgtcctctacgacacccgcaccaagacgtacatggccgcccgcgacgccatcggcgtcaaccccctctacatcggcaggggcagcgacggcgccgtctggatatcgtccgagatgaaggcgctgaacgaggactgcgtggagttcgagatcttccctccgggccacctctactccagcgccgccggcgggctccggcggtggtacaagccgcagtggttcgccgagaacgtcccggcgacgccgtaccagccactcctcctcagagaggccttcgagaaggccgtcatcaagaggctcatgaccgacgtgcccttcggcgtcctcctctccggcggcctcgactcctccctcgtcgccgcggtgaccaagcgccacctcatcaagactgaagccgccgagaagttcggagctgagctccattccttcgtcgttggccttgagggttcccctgacctgatagctgcacgagaggtcgctgaccacctaggaaccatccatcacgagttccacttcactgtccaggatggcatcgacgcgatcgaggaggtcatctaccacgacgagacgtacgacgtgacgacgatacgggccagcacgccgatgttcctgatggcgcgcaagatcaaggcgctcggggttaagatggtgctgtccggtgaaggctccgacgagctcctcggcggttacctctacttccacttcgcccccaacaaggaagagttccacaaggagacctgccgcaaggtgaaagcacttcatcagtatgactgtctgcgtgctaacaaggcgacgtctgcctggggactggaggtccgtgtgccgttcctcgacaaggagttcatcaacgtcgccatgagcatggaccctgagtggaagatgtacaatgctgatcttggtcgcatcgagaagtgggttatgaggaaggcgttcgacgacgaggagcatccttacctgccgaagcacatactgtacaggcagaaagagcagttcagtgatggcgtcggctacaactggatcgatggcctgaaggctttcaccgagcagcaggtcagtgatgaaatgatgaagaacgctgccaaagtgtacccgcacaacacgcccgtcaacaaggaggcgtactactaccgcatgatatttgagaggctcttcccgcagggagacggtgccgtggggcccgagcatcgcgtgcagcacgccggcggcgatcgagtgggtggagcagtggaaggcgtcgcacgacccatccggccgctgatcgcctcccacaactccgcctccgcctccgccaaccacaccaaccacgcaaacgccaacgccaacggcaacagcaacggcaaggccaacggcaactgcgcgatggcggccaacgggacgaacggcgtcggcctggttgtggccaacgggacagccaacgggaagatggaagcataa

SEQ ID NO: 144342 - protein, 586 aa, Oryza sativa subsp
MCGILAVLGAADWLKHRGPDWSGLYQCEGNFLAQQRLAIVSPLSGDQPLYNADRTIVVVANGEIYNHKKIRKQFASKHTFSTGSDCEVIIPLYEEYGEDFVDMLDGVFAFVLYDTRTKTYMAARDAIGVNPLYIGRGSDGAVWISSEMKALNEDCVEFEIFPPGHLYSSAAGGLRRWYKPQWFAENVPATPYQPLLLREAFEKAVIKRLMTDVPFGVLLSGGLDSSLVAAVTKRHLIKTEAAEKFGAELHSFVVGLEGSPDLIAAREVADHLGTIHHEFHFTVQDGIDAIEEVIYHDETYDVTTIRASTPMFLMARKIKALGVKMVLSGEGSDELLGGYLYFHFAPNKEEFHKETCRKVKALHQYDCLRANKATSAWGLEVRVPFLDKEFINVAMSMDPEWKMYNADLGRIEKWVMRKAFDDEEHPYLPKHILYRQKEQFSDGVGYNWIDGLKAFTEQQVSDEMMKNAAKVYPHNTPVNKEAYYYRMIFERLFPQGDGAVGPEHRVQHAGGDRVGGAVEGVARPIRPLIASHNSASASANHTNHANANANGNSNGKANGNCAMAANGTNGVGLVVANGTANGKMEA

SEQ ID NO: 144343 - DNA, 1689 bp, Aedes aegypti
  CDS (1)..(1689)
atgtgcggtattttttcgatatttctcaacgagcgacaccgtcgtctttatggcggtgaaacagatctgtgtggaaggaaagagtctgcggagttggccttccgacagtcggccagacaaaggcaccgtggtccggatcacaccggtttggtggctgacgaggacgaaggatttgtgctggtccaggagagactgtgtgtgattggggtgaaaacgggaactcaaccgtttttgtcccaggatggtcaggttctgttggtggccaatggtgaaatctacaactatctgctgatggcacaggaaatcaacgacgcattgaaggcgggagagaatatgtacactccgagaagtgattgcgatgtcatcattgcatattacgagaagtttggcgttgatgcactcatgaagaatatacgaggcatgttcgcatttgttctgtacgataagaaaaatggctgtatattggtggcgcgtgacccgattggaatagttccactctacagtgggaaagacgctgagggcaacttgtggatagccagtgaaatgaagtgtttggtggaaacgtgcccagaggtggcgatattcccgccaggtcacatgtattatggctcaagagaaaagttgaaatcagtgagctattttgagtctgattggatgtacgagatccctcaagcaaaggttgatttggaacggttgaacaagagtctggaggatgcagttgaatcacatttgcagtgtgacgtcccgatgggagcattactcagtggtggtctggattcgagcctcattgcgtccatagccacaaaaattatgaaaaaacgacatgggccagattatcgattgaaaacctacagcgtgggacttgtccgtggaccagattttgaattcgcgcgcatggttgccgactacatcggaagtgatcacacagaggtgtactttacgatcgacgaaggactcaactatattcgcgatgctgttctacacggagaaacctacgacatcacgacggttcgctgcaccattccgttgctgttgctttcgaggtacatcaagagcgaaggtatcaaaatggtactctccggtgagggagctgacgagctattcggaggatacctctactttcatcaagcaccgaacgcagaagaattccacttcgaaacggtaaagcgcgtgcagaacctccattacgcggattgtcttcgtgcaaacaagggaacctccgcatggggcctggaactgcgggtcccttttctggacacggatttcgtcaactacgtgatgagcatccgcccggaagatcgcaagcccaagaacaaaatcaacggtttggttcaacccatggagaagtacatcctgcgggaagctttcgccgaggattatcttccgcaaaaagtgctctggcggcagaaggaacagttttccgatggagttggctacacgtggatcgataccatcaccaagtatgcggcgtcccacatcagtgatgctgagtttgcttcggcggccacacgataccccatcaacccgccaccgacgaaggaggctttttactacagacagatcttcgaggagctgttcccacatgagagctgtgcgtcaaccgtcaccagatgggtgcctcggacagattggggctgctccgcagatccatccggtcggaagcagacgatacacaaggagaatgtgtaa

SEQ ID NO: 144344 - protein, 562 aa, Aedes aegypti
MCGIFSIFLNERHRRLYGGETDLCGRKESAELAFRQSARQRHRGPDHTGLVADEDEGFVLVQERLCVIGVKTGTQPFLSQDGQVLLVANGEIYNYLLMAQEINDALKAGENMYTPRSDCDVIIAYYEKFGVDALMKNIRGMFAFVLYDKKNGCILVARDPIGIVPLYSGKDAEGNLWIASEMKCLVETCPEVAIFPPGHMYYGSREKLKSVSYFESDWMYEIPQAKVDLERLNKSLEDAVESHLQCDVPMGALLSGGLDSSLIASIATKIMKKRHGPDYRLKTYSVGLVRGPDFEFARMVADYIGSDHTEVYFTIDEGLNYIRDAVLHGETYDITTVRCTIPLLLLSRYIKSEGIKMVLSGEGADELFGGYLYFHQAPNAEEFHFETVKRVQNLHYADCLRANKGTSAWGLELRVPFLDTDFVNYVMSIRPEDRKPKNKINGLVQPMEKYILREAFAEDYLPQKVLWRQKEQFSDGVGYTWIDTITKYAASHISDAEFASAATRYPINPPPTKEAFYYRQIFEELFPHESCASTVTRWVPRTDWGCSADPSGRKQTIHKENV

SEQ ID NO: 144345 - DNA, 2092 bp, Elaeagnus umbellata
  CDS (93)..(1850)
cacacattcatccaatttccactccaacaacaacaccaccaccttttctgtccttgagtttcgtcattctttctctgcctcagcgattaaaaatgtgtggaatacttgctcttcttggttgctctgatgattctcaagccaaaagggttcgcgttcttgagctttcccgaagattgaagcatcgtggtccagattggagtggtctatttcaatttggggactgttacttagctcatcaacgtcttgctatcatcgatcccgcttctggtgatcaacctcttttcaatgaagacaaaactgttgttgttacggtgaatggtgagatatacaaccatgaagagttgaggaagaaattgtctcatcacaagtttagaactggtagtgactgtgatgtcattgcacatctgtatgaggagtatggggaagattttgtggacatgctcgacggcattttcgcatttgtgctacttgatactcgggacaacagcttcattgttgctcgtgatgctatcggtgtcacttccctctatattggttggggacttgatggctcaatttggatatcatcagaactaaaaggcttgaataatgattgtgaacactttgaaaccttcccacccggtcacttgtactcaagcaaagcgggtggaatgaggcgttggtacaaccctgtatggttttctgagacaattccttcagccccttatgaccctttagctttgagaagggcttttgagaatgctgtgattaaaaggctgatgactgatgtgccttttggagttttactctctggtggcttagattcatctttagttgcctcaattacggctaggcacttgtctggcaccaaagctgcaaaacaatggggcactaaacttcactcattttgtgttggtttagagggttcaccagatttgaaggctgcaaaagaagttgcagcgtatttgggaacagttcaccatgaattccacttcacagttcaggacggaatcgatgctattgaagatgtgatctaccatgttgaaacttatgatgtcactacaatcagagctagtacaccaatgtttctcatgtcacgtaagataaagtcacttggtgtcaagatggttatgtcaggtgaaggttctgatgagatttttggaggatatttgtacttccacaaggctcctaacaaggaagagttccatgaagaaacttgtcgcaagattaaagcactgtatttgtatgactgcttgagggcaaataaatctacaacagcgtggggtttggaagctcgagttccgttcttagacaaagaatttattaatgttgcaatgaatattgatccggagtacaaaaagataaagcgtgatgaaggaagaattgagaaatgggtgcttaggaaggcctttgatgatgaggaacgtccttatctgccaaagcatattctgtatcggcagaaggaacaatttagtgacggggttggttatagttggattgatggccttaaagcgcatgctgctaaacatgtgactgataagatgatacgtaatgctgctcatattttccctcacaacactccaaacacaaaggaaggctactactataggatgatatttgaacgattttatcctcagaactcagctaggctgactgtcccgggtggagcaagtgtggcatgtagcacagccaaggctgttgagtgggatgaatcatggtcaaagaacctggatccttctggaagggctgcactaggagttcatctttcagcttatgacaaccaagttcctagtggagtggtgcaaccagagatcattagcaatgtacctcagattactgtgaacactctaggactcgaaatccaaagctagtaattctatatgcattatagtaattattcccattatttatgaatgaggctagagttatataagaatggattctatgcctgatggggattttatatttacatccttgagtcatgaacttggttgatgcatagcttatagaaagtatgtaagtactctgatgttgtggtttgatcagtatattgtattctcctttgtcaataatattgaatgcacccttttcaataaaaaaaaaaaaaaaaaaa

SEQ ID NO: 144346 - protein, 585 aa, Elaeagnus umbellata
MCGILALLGCSDDSQAKRVRVLELSRRLKHRGPDWSGLFQFGDCYLAHQRLAIIDPASGDQPLFNEDKTVVVTVNGEIYNHEELRKKLSHHKFRTGSDCDVIAHLYEEYGEDFVDMLDGIFAFVLLDTRDNSFIVARDAIGVTSLYIGWGLDGSIWISSELKGLNNDCEHFETFPPGHLYSSKAGGMRRWYNPVWFSETIPSAPYDPLALRRAFENAVIKRLMTDVPFGVLLSGGLDSSLVASITARHLSGTKAAKQWGTKLHSFCVGLEGSPDLKAAKEVAAYLGTVHHEFHFTVQDGIDAIEDVIYHVETYDVTTIRASTPMFLMSRKIKSLGVKMVMSGEGSDEIFGGYLYFHKAPNKEEFHEETCRKIKALYLYDCLRANKSTTAWGLEARVPFLDKEFINVAMNIDPEYKKIKRDEGRIEKWVLRKAFDDEERPYLPKHILYRQKEQFSDGVGYSWIDGLKAHAAKHVTDKMIRNAAHIFPHNTPNTKEGYYYRMIFERFYPQNSARLTVPGGASVACSTAKAVEWDESWSKNLDPSGRAALGVHLSAYDNQVPSGVVQPEIISNVPQITVNTLGLEIQS

SEQ ID NO: 144347 - DNA, 2143 bp, Glycine max
  CDS (155)..(1900)
ggcacgagcttcaacttcacccattcatacgtggtgttgttactgctgctcttttctcttttcttttctctttagttctctcttcccctttctttttctttttcttcttcttctgagcttgtttaagctttccttccattaacatattatcacaatgtgtggtattcttgctgttcttggttgttctgatgactctcgagccaaaagggtccgcgtgcttgagctctctcgcagattgaagcaccgtggccctgactggagtgggctccatcaacatggtgactgctttttggcacatcaacggttagccatagttgatcctgcttctggggatcaacctctctttaacgaggacaaatccgtcattgttacggtaaatggagagatttacaaccatgaagagctcaggaaacagctgcctaatcacaacttccgaactggaagtgattgtgatgttattgcacacctgtacgaggaacatggagaagactttgtggacatgctggatggtatcttctcatttgttctactggacacccgtgacaacagttttatagtggctcgggatgctattggggtcacttccttgtacattggatgggggttagatggctctgtttggatttcatcagaaatgaaaggcctgaatgatgattgtgaacactttgagtgttttccacctggtcacttgtactctagcaaagaaagagggttccgcagatggtacaatcctccttggttctctgaggctattccatctgccccttatgatcctcttgttttaagacacgcctttgagcaggcagtcataaaaaggttgatgactgatgtgccttttggtgttctactctctggaggtttggactcttctttggttgcatccatcacttctcgttacttggccaacacaaaggctgctgagcagtggggatcaaagttacattcattctgtgtaggccttgagggctcaccagatttgaaggctgcaaaagaggttgctgactatctaggcactgtccaccatgagtttaccttcactgttcaggatggaatagattccattgaagatgttatctaccatattgaaacatatgatgtgactacaattagagcaagcacacctatgtttctcatgtctcggaagattaaatcacttggtgtcaaatgggttatctcaggagaaggatctgatgagatctttggagggtatttgtacttccacaaggcacccaacaaggaggagttccacagagaaacatgccgcaagatcaaagcacttcaccaatatgattgcttgcgagccaataaatcaacatttgcttggggtctagaagcccgtgtaccatttttggacaaggcgtttatcaatgctgcaatgagtattgaccctgagtggaagatgataaaaagagatgaaggacgaattgagaagtggattctgaggagagcctttgatgatgaagagcatccttatctgccaaagcacattttatacaggcagaaagaacaattcagtgatggagttggctatagttggattgatgcccttaaggcccatcctccaaaacatgtgactgaaaaaatgatgcttaatgctggtaacatttacccccacaacaccccaaaaaccaaggaagcatattactacagaatgatctttgagaggttcttccctcagaactcagctaggctcactgttcctggaggagcaagtgctgcatgtagcacagccaaagctgttgagtgggatgctgcttggtctaacaaccttgatccctctggtagagcagcacttggagtgcacatttcagcctatgaaaaccagaacaacaagggtgtagaaattgagaagataatacctatggatgctgctccccttggtgttgccatccagggctaatacaaagatgtgacaaagaatttgggcgacaatgaagataactaagctaaaggtgaatgaaaaatttgcctgcagtgtaatttcatctgggcaaagcttttatagtttatagttataaggctttctcaaaaagtgttgcgtattgtattatcttgaatgctgtgatttgaagtcttaataaaagtgtttcctttatcagttcccaaaaaaaaaaaaaaaaaaaaaaaaaaaaaaaaaaaaaaa

SEQ ID NO: 144348 - protein, 581 aa, Glycine max
MCGILAVLGCSDDSRAKRVRVLELSRRLKHRGPDWSGLHQHGDCFLAHQRLAIVDPASGDQPLFNEDKSVIVTVNGEIYNHEELRKQLPNHNFRTGSDCDVIAHLYEEHGEDFVDMLDGIFSFVLLDTRDNSFIVARDAIGVTSLYIGWGLDGSVWISSEMKGLNDDCEHFECFPPGHLYSSKERGFRRWYNPPWFSEAIPSAPYDPLVLRHAFEQAVIKRLMTDVPFGVLLSGGLDSSLVASITSRYLANTKAAEQWGSKLHSFCVGLEGSPDLKAAKEVADYLGTVHHEFTFTVQDGIDSIEDVIYHIETYDVTTIRASTPMFLMSRKIKSLGVKWVISGEGSDEIFGGYLYFHKAPNKEEFHRETCRKIKALHQYDCLRANKSTFAWGLEARVPFLDKAFINAAMSIDPEWKMIKRDEGRIEKWILRRAFDDEEHPYLPKHILYRQKEQFSDGVGYSWIDALKAHPPKHVTEKMMLNAGNIYPHNTPKTKEAYYYRMIFERFFPQNSARLTVPGGASAACSTAKAVEWDAAWSNNLDPSGRAALGVHISAYENQNNKGVEIEKIIPMDAAPLGVAIQG

SEQ ID NO: 144349 - DNA, 2108 bp, Glycine max
  CDS (151)..(1890)
ggggcattggattctcaccaacgtttgcgttactcaagccgacattctcgcttccgttggaaccgttcttcgtgttctccattccctctctcactccttcatctacttcacatattatatcatcacatatcatagtgatatcatatcacaatgtgtggcatacttgctgtgcttggttgctctgattcatctcaagccaaaagggtccgcgtccttgagctttctcgcagattgaagcaccgtggtcctgactggagtgggctccaccaatatggtgataactatttggctcatcaacggttagccatagttgatccagcttctggtgatcaacccctcttcaatgaagacaaaactgttgttgttacggtgaatggagagatctacaatcatgaagaactcaggaaacaattgcctaatcacaccttccgtacaggaagtgattgtgatgttattgctcacctgtatgaggagcacggagaaaactttatggacatgcttgatggtatatcttcatttgttctgctggatactcgtgacaacagttttatagtggcgcgggatgcaattggggtcacttccttgtacattggttggggtttagatggctctgtctggatttcctctgaattgaaggggttgaatgatgattgcgaacattttgagtcttttccacctggtcacttgtattctagcaaagagagagcgttccgcagatggtacaatcctccatggttgtctctggctattccatctgccccttatgatcctcttgctttgagacatgcctttgagaagctgtggataaaaaggttgatgactgatgtgccctttggtgttttgctctctggaggtttggactcttcattggttgcagccgtcacggctcgctacctggcaggcacaaaagctgcgaagcaatggggaactaaattacactctttctgtgtaggccttgagggtgcacccgacctaaaggctacaaaggaagtagcagagtacataggaactgtccatcatgaatttcactacactgttcaggatggcatagatgccatcgaagatgtgatctatcacattgagacatatgatgtgacaacaattagagcaagcattcccatgtttcttatgtctcggaagatcaagtcattgggagtcaaatgggttatctctggagaaggatctgatgttttttttggagggtatctatatttccacaaggcacccaacaaagaagagttccaccaagaaacatgccgcacaattattgtactccacaggtatgattgctcgcgagccaataaatcgacctttgtctggggtctagaagccagagtaccatttttggacaaagagtttatcagagttgcaatgaacattgatcctgagtgtaaaatgataaaaaaggaagaagggcgaattgagaaatgggcactgaggagggcctttgatgatgaagaacatccttatctgccaaagcacattttatataggcagaaagaacaattcagtgatggagttggctatggttggattgatggccttaaagctcatgctgagaaacatgtgactgacagaatgatgctcaatgctgccaacattttccccttcaacactccaaccaccaaagaagcataccactatagaatgatatttgagaggttcttccctcagaactcatgcaggctcactgttcctggaggaacaagtgttgcatgtagcacagcaaaagctgttgagtgggatgctgcttggtctaacaaccttgatccatcaggtagagcagcacttggagtgcatgcatcagcttatggaaaccaggtcaaagctgtagaaccagagaagatcatacccaagatggaagtttctccactaggagttgccatatagagctagtatgagccatagcaaggactagtagttgccctagaaccagcatatattattattatactaatcatcaaatcatgaaacatcaggttgctttgtagttatccagggaatggtatataaatagataaggatctctatctatctggctctctttctgggccacccagatctagcctcaacttgctttcgatgtcacctgatgcacaatcataaag

SEQ ID NO: 144350 - protein, 579 aa, Glycine max
MCGILAVLGCSDSSQAKRVRVLELSRRLKHRGPDWSGLHQYGDNYLAHQRLAIVDPASGDQPLFNEDKTVVVTVNGEIYNHEELRKQLPNHTFRTGSDCDVIAHLYEEHGENFMDMLDGISSFVLLDTRDNSFIVARDAIGVTSLYIGWGLDGSVWISSELKGLNDDCEHFESFPPGHLYSSKERAFRRWYNPPWLSLAIPSAPYDPLALRHAFEKLWIKRLMTDVPFGVLLSGGLDSSLVAAVTARYLAGTKAAKQWGTKLHSFCVGLEGAPDLKATKEVAEYIGTVHHEFHYTVQDGIDAIEDVIYHIETYDVTTIRASIPMFLMSRKIKSLGVKWVISGEGSDVFFGGYLYFHKAPNKEEFHQETCRTIIVLHRYDCSRANKSTFVWGLEARVPFLDKEFIRVAMNIDPECKMIKKEEGRIEKWALRRAFDDEEHPYLPKHILYRQKEQFSDGVGYGWIDGLKAHAEKHVTDRMMLNAANIFPFNTPTTKEAYHYRMIFERFFPQNSCRLTVPGGTSVACSTAKAVEWDAAWSNNLDPSGRAALGVHASAYGNQVKAVEPEKIIPKMEVSPLGVAI

SEQ ID NO: 144351 - DNA, 2154 bp, Vicia faba
  CDS (118)..(1878)
tacgtgttgtttcttccacactctttgtttcttgtttttcgtgtcttgttttctttatccattttctttgtttcttcaaaaaacctttcgaaaaggtttgtagaaaatactttcataatgtgtggcatacttgctgtacttggttgctctgatgattcacaagctaaacgagttcgcatacttgagctttctcgcagattgaagcatcgtgggccagactggagtgggctccaccaacatggtgataactatttggctcatcaaaggttagccattgttgatcctgcttctggtgatcaacctctcttcaatgaagacaaatccattattgtcacggtgaatggagaaatctacaatcatgaagagctcagaaaacaattgcctaatcacacgtttcgtacgcaatgcgactgtgatgttattgcacacctgtatgaggagtatggagaaaactttgtggatctgttggacggtatattttcgtttgttctgctggatactcgcgacaacagtttcatagttgcaagggatgctataggtgttacttccttgtacattggttggggactagatggttctgtttggattgcatcagaattgaaaggactgaatgatgaatgtgaacattttgaagtttttccacctggtcacttatactcgagcaaagaaagagagtttcgtcgatggtacaatcctccatggttcaacgaggctattattccgtcaacaccttatgatcctctagttttgaggaccgcctttgaaaaggctgtgataaagaggttgatgactgatgtgcctttcggtgttttactatcgggtggtttggattcttcgttggtcgcatctgtcactgctagataccttgctgatacaaaagctgctaagcagtggggagcaaagttacactctttctgtgtaggccttaagggtgcacctgacctgaaggctggaaaagaggtagcagatttcttaggaactgtccatcatgaatttcagtttactattcaggatggtatagatgcaattgaagatgtcatctatcacacagaaacctacgatgtcactacaataagggccgcaacgcctatgtttctgatgtctcgtaagatcaaatcatcaggagtcaaaatgcttatttctggagaaggatctgacgaaatctttggagggtatctgtatttccataaagcaccaaacaaagaagagtttcaccaagaaacgtgccgcaagatcaaagctcttcataggtatgattgtttgagagccaataaatcaacttatgcatggggtctagaagctagagtgccatttttggacaaggactttatcaaggctgcaatggacattgatcctgagtttaaaatgataaaacatgatgaaggaagaattgagaaatggattctaagaaaggcctttgatgatgaagagaatccatatctgcctaagcacattttatatagacagaaggaacaattcagtgatggagttggatatggctggattgatggcatcaaagaccatgcagcaaaacatgtcactgacaaaatgatgttcaatgcatctcacatctttcctttcaacactccaaataccaaagaagcatattactatagaatgatctttgaaagatttttccctcagaactcggcaaggctgacagttcctggaggacctagtgttgcatgcagcacagaaaaagctattgaatgggatgcttcttggtcaggcaaccttgatccatctggtagagcagcacttggagtgcatgtttcagcttatgaaaaccaaatcaacccaattacaaaaggtgtagagccagagaagattataccaaaaataggagtttctcctcttggagttgccattcaaacctagtatgagacatagcaaatattacttgcctaagaaataaggatattattatactattagtattcaatagagaataagataacggaaaaatttgcctgatgtgtattttatccaggcaaatttttatatgtataaggctttctacttagctgtatttatgtgttttgatgttgtgtaatccacatcttgtctttgcttttaaatcgatgtggtgatttgaacactttcatattgtaatttggctttttaagaagagtcgtgtattatgttaagtttgac

SEQ ID NO: 144352 - protein, 586 aa, Vicia faba
MCGILAVLGCSDDSQAKRVRILELSRRLKHRGPDWSGLHQHGDNYLAHQRLAIVDPASGDQPLFNEDKSIIVTVNGEIYNHEELRKQLPNHTFRTQCDCDVIAHLYEEYGENFVDLLDGIFSFVLLDTRDNSFIVARDAIGVTSLYIGWGLDGSVWIASELKGLNDECEHFEVFPPGHLYSSKEREFRRWYNPPWFNEAIIPSTPYDPLVLRTAFEKAVIKRLMTDVPFGVLLSGGLDSSLVASVTARYLADTKAAKQWGAKLHSFCVGLKGAPDLKAGKEVADFLGTVHHEFQFTIQDGIDAIEDVIYHTETYDVTTIRAATPMFLMSRKIKSSGVKMLISGEGSDEIFGGYLYFHKAPNKEEFHQETCRKIKALHRYDCLRANKSTYAWGLEARVPFLDKDFIKAAMDIDPEFKMIKHDEGRIEKWILRKAFDDEENPYLPKHILYRQKEQFSDGVGYGWIDGIKDHAAKHVTDKMMFNASHIFPFNTPNTKEAYYYRMIFERFFPQNSARLTVPGGPSVACSTEKAIEWDASWSGNLDPSGRAALGVHVSAYENQINPITKGVEPEKIIPKIGVSPLGVAIQT

SEQ ID NO: 144353 - DNA, 1665 bp, Ostreococcus tauri
  CDS (1)..(1665)
atgtttcgctctcagggcgctcgcggggcgcaaatgtgctccgtgctcgcgatgtacgacccgaacgccgctctcgagagcgggcgagaggagctcatgcgagagctcagcgcgcgcatgcgcacgcgagggccagacgggtccgggtacttcggctcaaagcgatacggtctcgcgcacgaacggctggcgatcatggatccggagggcgggaagcagccgatcgtgtacgaagacggcgcgaagacgtacgccgtgtgcgcgaacggggaaatttataacttccgtaagctccaggccaagtacggtttgacggctgcaaagacggggagcgactccgaggtgttgcttcagctgtataagcatcttggatgcgactttgtcaaggagctcaatgggatcttcggcttcgtcgtgatcggtgacgatggcgatcatatgatcgctgctcgtgatcacgctggtatcaagccgttgtacgttggctacggtgaaaacggtgtcatgtggtttgcgtccgagctcaaggccatctgcgatcaaaagtgcgagcgcatcgaagaattcccggccggctactactggaccccgaaagacggcttcgtgaagtggtacaacccggcatgggactttgatgacgccgtcggcacgaaggacacgtcccacgtccgcgccatcctagaggaggccatcttggaccaaaccatggccgacgtaccgattggactcctcctctccggcgggttggattcagctgtcgtgtcgacggtgctcaagcccttcttggaaaagagtggccaggagtacctctcttttaccgttggtcaagaaggttctccggatgtaaccgcggctcgcatgatgtccgagttcttgggaacgaagcaccacgagtacctcttcacctccgaggaggcgtgcgcaaacatcgagaacgtcatctaccacctcgaaacatacgaaccggagctcattcgttccgccatccccaactatttcttggctaagctcacgtctcaacacgtgaaggttgtgctcactggcgaaggctctgatgagcttttcgctggatatctctatttccgcgatgctccgagctcgaaacacgtgcataatgagctgcgcagaattttcggacacctacacaacgtcaactgccaacgtgctgaccgcatgactatggcgcacagtttggaggctcgagtgcccttcttggatccgcgcgtcatcgacgccgtcatggaagtggatccgcagtacaagaccatcgaaggcgaagaaaaaccggagaagcatgctcttcgcgcgctgttcgacggcgaaatcccagatcccgtgctttggcgcacgaaggccatgcagtgcgaaggcgtcggcctcaactgggtggatgatttgcaaacgttctgcaacgaacaagtgtccgacgaggattacgccaaggccgaggaaatctaccccatcaaccctcctcaaagcaaggaggaaatgtactatagaagaattttcgagaagtactaccacggcatggataagttcgtccacgtgtgggaaggtggttgtcgcgctggcggtgctgcctgggagaacaatcagtacactcgcgctggcgtcaagaatgtcaaacagctggcgaagggtctcaccggcgtgcgcggcgcgtga

SEQ ID NO: 144354 - protein, 554 aa, Ostreococcus tauri
MFRSQGARGAQMCSVLAMYDPNAALESGREELMRELSARMRTRGPDGSGYFGSKRYGLAHERLAIMDPEGGKQPIVYEDGAKTYAVCANGEIYNFRKLQAKYGLTAAKTGSDSEVLLQLYKHLGCDFVKELNGIFGFVVIGDDGDHMIAARDHAGIKPLYVGYGENGVMWFASELKAICDQKCERIEEFPAGYYWTPKDGFVKWYNPAWDFDDAVGTKDTSHVRAILEEAILDQTMADVPIGLLLSGGLDSAVVSTVLKPFLEKSGQEYLSFTVGQEGSPDVTAARMMSEFLGTKHHEYLFTSEEACANIENVIYHLETYEPELIRSAIPNYFLAKLTSQHVKVVLTGEGSDELFAGYLYFRDAPSSKHVHNELRRIFGHLHNVNCQRADRMTMAHSLEARVPFLDPRVIDAVMEVDPQYKTIEGEEKPEKHALRALFDGEIPDPVLWRTKAMQCEGVGLNWVDDLQTFCNEQVSDEDYAKAEEIYPINPPQSKEEMYYRRIFEKYYHGMDKFVHVWEGGCRAGGAAWENNQYTRAGVKNVKQLAKGLTGVRGA

SEQ ID NO: 144355 - DNA, 1950 bp, Ostreococcus tauri
  CDS (1)..(1950)
atggctctctcacacgtggctttttccggtcgacgcgcatcgctggacatgtgcgggatctttgccgttttacggctcacgggcgacgccaggaagaaccgccgacgcgtgtatgacctggcgaagcggctgcggcatcgggggccggattcgtacggaatggaggttcgagtggacgagcgaagcggcgcgcaaaccttcatggtgcacaagcgcctgagcatcgtcgctccggggaagagcggtgatcagccgctgtacacggatgcgtcgaggaagacgacgttcatcgcgaacggagaaatttataatcacgccgagctcagggagaagtacgggatcgtgagcgagaataagagcgattgccaagtcatcggtcacctgtacgagcagcacgggccgggcttcgtgagcgagctcgatgggatgttcgcgttcgtgatcgaggatcgggagaacgacgtcatcgtcgcggcgagagatcatatggggaagatcccgatgtacatggccaacggtaaggatgggagcgtttggttcagcagcgagatgaagacgttgcacgacgacccaggggtggcgagctacgaaatctttccgccaggtcacgtgtacgtcaagaagggtgatgaaccggccacgatcgagcgctggttcaatcctcaatggatcgccgaggagagctacgtgccgacgactccggcggacttaccggcgcttcgcgagtgcgtcgttgacgccgtcacaaagcgtctcatggcggacgtcccgtacgccgtgctcctgtccggtgggcttgattcatcgttaatcacctccatcgcggtgcgtcagcgcaagttagccaagaacacgtacggagctgatgagcccgtgcactcgttctccatcggtatcaagggggcgccggatctcgtcgccgcgcgcaaggtggccgaacagctcggcacgatccaccacgaggtgcactttactcccgaggaagcgctcgacgcactgccggacgtcatttggcaccttgaaacgttcgagcaagttcgtgcgtcggtgcccatgtacctactgagccgtcacatcaagtccttaggtttcaagatggtcctctcgggcgagggcgccgacgagctctttggtggctacttgtacttccacaaggcgccgaacccgaccgagttccatgctgaatgccgtcgtaagaccatgcgtttgcaccaatgggatgtgttgcgcgcgaacaagtctacgatgagctggggtatcgaagttcgcactccactcttgtcccagcaagtcatcgacatggcgatgaacatgcgtcctgaggataaaatgatcgacgtcaacaaaaaagatgcagatggtcatccattcctggaaaagtatattctccgcaaggcgttcgatacgcctgaggatccgtatcttccgcaagaggttctttggcgtcagaaggagcagttcagcgatggcgttgggtacgactgggtcgacggtttggcggcacacgctgaactcgaagtcagtgacgaaatgtttgcgaagcgcgccgagcgtttcccgctgcacccgccgacgacgaaggagtactacttgcttcgatcgattttcgaagagcactttgtgactgggttcgagaatggggactgcgcgtacgcgacatgcccgttcggcaagtccatcgcgtgctcaaccccggaggcggtttcgtgggatccggagtgggaaaagagtgtcggagacatctctggtcgggctgtcaagaacgtgcacgtcgctgccgacaagtttgacgtgaagaaggagaaggcgaacgagactgtcgccgcctccttggtgggtcgaggaaaggcgtcgtgcagcagcgagtccgcggtcacgttcgcttcgctggcttgcgtgcggcgcctatctcgagggttttacttctgtagggcgccaccctgcttgtag

SEQ ID NO: 144356 - protein, 649 aa, Ostreococcus tauri
MALSHVAFSGRRASLDMCGIFAVLRLTGDARKNRRRVYDLAKRLRHRGPDSYGMEVRVDERSGAQTFMVHKRLSIVAPGKSGDQPLYTDASRKTTFIANGEIYNHAELREKYGIVSENKSDCQVIGHLYEQHGPGFVSELDGMFAFVIEDRENDVIVAARDHMGKIPMYMANGKDGSVWFSSEMKTLHDDPGVASYEIFPPGHVYVKKGDEPATIERWFNPQWIAEESYVPTTPADLPALRECVVDAVTKRLMADVPYAVLLSGGLDSSLITSIAVRQRKLAKNTYGADEPVHSFSIGIKGAPDLVAARKVAEQLGTIHHEVHFTPEEALDALPDVIWHLETFEQVRASVPMYLLSRHIKSLGFKMVLSGEGADELFGGYLYFHKAPNPTEFHAECRRKTMRLHQWDVLRANKSTMSWGIEVRTPLLSQQVIDMAMNMRPEDKMIDVNKKDADGHPFLEKYILRKAFDTPEDPYLPQEVLWRQKEQFSDGVGYDWVDGLAAHAELEVSDEMFAKRAERFPLHPPTTKEYYLLRSIFEEHFVTGFENGDCAYATCPFGKSIACSTPEAVSWDPEWEKSVGDISGRAVKNVHVAADKFDVKKEKANETVAASLVGRGKASCSSESAVTFASLACVRRLSRGFYFCRAPPCL

SEQ ID NO: 144357 - DNA, 1740 bp, Phaeosphaeria nodorum
  CDS (1)..(1740)
atgtgtggtatcttcgcgtgctataggcaccccgatgtgcagaagttcaagccgactgccctgaaaatgggcaaggctgtccgacatcggggcccggattggagtggtaactgggtcgcaaacgacaccatccttgtccacgagcgtttgagtatcgtcggtgttgactctggcgctcagccgcttgtcaacgaggacgagaccgtctcgctcgccgtcaatggcgaaatctacaaccacagagtcctgcgtaagggcctgaaaacaccatacaacttcaagacacactcagattgcgaggttatcattcctttgtatcttgaacatgacatcgacgcgccacggaaactcgacggtatgttctcatgggttctccatgacaagaagcaagatcgcattattgccgcaagagaccctattggaatcaccacattctacatgggcaggtcaagcacaacacctggtgctgtcttctttgcatcggagctcaaatgcctgcatcccgtttgcgacaacatcatttccttccctccaggtcatgtttacgactcaaaaaccgacgagctgaagcgatactacgaccccaagtggctcgtcgagcctgaaaacattcccaccacacccgtcgactacaaggagctgaggacatcatttgagcaatcagtgcgaaagcgcatgatggcagaagtgccctttggtgtactgctctctggtggacttgactcgagtctggtagcttcaatcgcgcaaagggaaacccaacggctgaacgaggcgacaaggaaacgggctgccgagaccaagggtgcggtatccaaccaggagaacgagctcgtgggtattgatgaccagaacgagctccagacggatttgctgcttggtcagctcaactctttctccatcggtcttcccaacgccccagacgccattgctgcgcgtgaggtggccgattttctcggaaccaagcaccacaccttcacctttacgattgaagatggtctcaacgcactcacagatgtcatcttccacctcgagtcgttcgatgtcaccacaatccgtgcctccacacctatgttcttgttagcacgaaagatcaaggccatgggtgtcaagatggtgctttcaggagagggcagcgacgaaatctttggcggatacttgtacttccacaacgcgcctgacaaggctgccttccaccaggaatgtatccgccgagtcaagaacttgcatctcgcggattgcctgcgcgccaacaaatcgacctccgcatggggagtcgaggcacgcgtgcccttcctcgacaagaacttcctcaacgtctccatgaacatcgaccctgccgagaagctgcacaccaaggagcgcatcgagaagtacattttgcgaaaagccttcgacaccaccgacgagcccgagacgcagccatacctgcccgaccacatcctctggagacagaaggagcagttctctgatggtgttgggtacgggtggattgatgcgctcaaggacaacgctgagctgcatgtcacggacgagatgatgaagaaccccaagcccgaatggggcagcgatattcccgactccaaggaggcgtactggtacagaactatgttcgacgagcacttccctagctactgtgcaagcaccgtcatgcgatggacgccaacgtggagcaaccagacggatccttctggacgtgccatcggcgtccacgcgcaaaagtacgacaccgcgaaatag

SEQ ID NO: 144358 - protein, 579 aa, Phaeosphaeria nodorum
MCGIFACYRHPDVQKFKPTALKMGKAVRHRGPDWSGNWVANDTILVHERLSIVGVDSGAQPLVNEDETVSLAVNGEIYNHRVLRKGLKTPYNFKTHSDCEVIIPLYLEHDIDAPRKLDGMFSWVLHDKKQDRIIAARDPIGITTFYMGRSSTTPGAVFFASELKCLHPVCDNIISFPPGHVYDSKTDELKRYYDPKWLVEPENIPTTPVDYKELRTSFEQSVRKRMMAEVPFGVLLSGGLDSSLVASIAQRETQRLNEATRKRAAETKGAVSNQENELVGIDDQNELQTDLLLGQLNSFSIGLPNAPDAIAAREVADFLGTKHHTFTFTIEDGLNALTDVIFHLESFDVTTIRASTPMFLLARKIKAMGVKMVLSGEGSDEIFGGYLYFHNAPDKAAFHQECIRRVKNLHLADCLRANKSTSAWGVEARVPFLDKNFLNVSMNIDPAEKLHTKERIEKYILRKAFDTTDEPETQPYLPDHILWRQKEQFSDGVGYGWIDALKDNAELHVTDEMMKNPKPEWGSDIPDSKEAYWYRTMFDEHFPSYCASTVMRWTPTWSNQTDPSGRAIGVHAQKYDTAK

SEQ ID NO: 144359 - DNA, 1815 bp, Oryza sativa subsp
  CDS (1)..(1815)
atgtgcgggatcctggccgtgctcggcgccgccgactggtcgcaggcgaagagggctcacgtcctctcctgctcccgcaggctgaagcacaggggacccgactggtccgggttgtaccagtgcgagggaaacttcctcgctcagcagcgtctcgccatcgtctccccgctctccggcgaccagccgctgtacaacgcggaccggaccatcgtcgtcgtggccaatggagagatctacaaccacaagaagatcaggaagcagttcgcctccaagcacacgttcagcaccggcagcgactgcgaggtcatcatcccgctgtatgaggagtacggcgaggacttcgtcgacatgctggacggcgtgttcgccttcgtcctctacgacacccgcaccaagacgtacatggccgcccgcgacgccatcggcgtcaaccccctctacatcggcaggggcagcgacggcgccgtctggatatcgtccgagatgaaggcgctgaacgaggactgcgtggagttcgagatcttccctccgggccacctctactccagcgccgccggcgggctccggcggtggtacaagccgcagtggttcgccgagaacgtcccggcgacgccgtaccagccactcctcctcagagaggccttcgagaaggccgtcatcaagaggctcatgaccgacgtgcccttcggcgtcctcctctccggcggcctcgactcctccctcgtcgccgcggtgaccaagcgccacctcatcaagactgaagccgccgagaagttcggagctgagctccattccttcgtcgttggccttgagggttcccctgacctgatagctgcacgagaggtcgctgaccacctaggaaccatccatcacgagttccacttcactgtccaggatggcatcgacgcgatcgaggaggtcatctaccacgacgagacgtacgacgtgacgacgatacgggccagcacgccgatgttcctgatggcgcgcaagatcaaggcgctcggggttaagatggtgctgtccggtgaaggctccgacgagctcctcggcggttacctctacttccacttcgcccccaacaaggaagagttccacaaggagacctgccgcaaggtgaaagcacttcatcagtatgactgtctgcgtgctaacaaggcgacgtctgcctggggactggaggtccgtgtgccgttcctcgacaaggagttcatcaacgtcgccatgagcatggaccctgagtggaagatgtacaatgctgatcttggtcgcatcgagaagtgggttatgaggaaggcgttcgacgacgaggagcatccttacctgccgaagcacatactgtacaggcagaaagagcagttcagtgatggcgtcggctacaactggatcgatggcctgaaggctttcaccgagcagcaggtcagtgatgaaatgatgaagaacgctgccaaagtgtacccgcacaacacgcccgtcaacaaggaggcgtactactaccgcatgatatttgagaggctcttcccgcaggaatcggcgagggagacggtgccgtggggcccgagcatcgcgtgcagcacgccggcggcgatcgagtgggtggagcagtggaaggcgtcgcacgacccatccggccggctgatcgcctcccacaactccgcctccgcctccgccaaccacaccaaccacgcaaacgccaacgccaacggcaacagcaacggcaaggccaacggcaactgcgcgatggcggccaacgggacgaacggcgtcggcctggttgtggccaacgggacagccaacgggaagatggaagcataa

SEQ ID NO: 144360 - protein, 604 aa, Oryza sativa subsp
MCGILAVLGAADWSQAKRAHVLSCSRRLKHRGPDWSGLYQCEGNFLAQQRLAIVSPLSGDQPLYNADRTIVVVANGEIYNHKKIRKQFASKHTFSTGSDCEVIIPLYEEYGEDFVDMLDGVFAFVLYDTRTKTYMAARDAIGVNPLYIGRGSDGAVWISSEMKALNEDCVEFEIFPPGHLYSSAAGGLRRWYKPQWFAENVPATPYQPLLLREAFEKAVIKRLMTDVPFGVLLSGGLDSSLVAAVTKRHLIKTEAAEKFGAELHSFVVGLEGSPDLIAAREVADHLGTIHHEFHFTVQDGIDAIEEVIYHDETYDVTTIRASTPMFLMARKIKALGVKMVLSGEGSDELLGGYLYFHFAPNKEEFHKETCRKVKALHQYDCLRANKATSAWGLEVRVPFLDKEFINVAMSMDPEWKMYNADLGRIEKWVMRKAFDDEEHPYLPKHILYRQKEQFSDGVGYNWIDGLKAFTEQQVSDEMMKNAAKVYPHNTPVNKEAYYYRMIFERLFPQESARETVPWGPSIACSTPAAIEWVEQWKASHDPSGRLIASHNSASASANHTNHANANANGNSNGKANGNCAMAANGTNGVGLVVANGTANGKMEA

SEQ ID NO: 144361 - DNA, 2059 bp, Glycine max
  CDS (140)..(1849)
cgactcactatagggcaagcagtggtatcaacgcatagtacgcgggagcagtggtatcaacgcagagtacgcgggagttctgttgttgtgttgtgttgtgtgtcttcccttggtgttccagtttttatttgcagccgccatgtgcggaatcctcgcagtgttgggttgcgtcgacaactctcagaccaagcgcgctcgcatcatcgaattgtctcgcaggttgcggcatagaggtcctgattggagtggcatacattgctatgaggattgttaccttgctcatcaacgccttgctattgttgaccctacttcgggggatcaacctttgtacaacgaagacaaaactgttattgtcactgtaaatggggagatatacaatcacaagcaattgaggcagaaactgagttcccatcaatttcgaactggtagtgattgtgaagtgattgcccatctttatgaagaacatggagaagaatttgttaatatgctggatgggatgtttgcctttattcttcttgatactagggataaaagttttattgctgctcgtgatgctattggcattacccctctatacttgggctggggtcatgatggatcaacatggtttgcatctgaaatgaaagctctgagtgatgattgtgagagattcatatcttttcctccagggcacatctattccagcaaacagggaggattaagaaggtggtacaatccaccatggttttcagaggatattccatcaactccctatgatccaacccttttgcgtgagaccttcgagagggccgtagttaagagaatgatgactgatgtaccttttggagttcttttgtctggaggattggactcatcacttgttgctgcagtggtcaatcgttatttggctgaatctgaatctgctcgtcaatggggatcacagttacatactttctgcattggtttaaagggctctcctgacttgaaagctgcaaaagaggtagcagattaccttggtactcgtcaccatgaactttatttcacggttcaggaaggtatagatgcacttgaagaagtcatttaccatattgaaacatatgatgtaacgactatcagagcaagtactgcaatgtttcttatgtccagaaaaattaaagccttgggagtgaaaatggtactttctggagaaggttcagatgaaatatttggaggttacctgtattttcacaaggcacctaataagaaagagtttcatgaagaaacatgtcgaaaaattaaagctcttcatctttatgactgcctgagagccaataaatcaactgcagcatggggtgtagaggcacgtgtaccattcttggataaagaatttatcaacgtagccatgagtatagatccggaatggaaaatgataaggcctgatcttggaaggatagagaagtgggtattacgcaatgcatttgatgacgataagaatccatatttaccaaagcacatattgtacaggcagaaggaacaattcagtgatggggttggttacagctggattgatggcttgaaggatcacgcaaacaaacaagtcacagatgcgacgatgatggctgccaattttatttaccctgaaaacactcctaccacaaaagaaggatacctctacaggacaatttttgagaagttctttccaaagaatgcagcaaaggcaacagtgccaggaggtcctagtgtggcatgcagtactgcaaaagctgtggaatgggatgcagcatggtcaaaaaatcttgatccttctggtcgtgccgcacttggtattcatgatgctgcatatgatgcagtggataccaaaattgacgagcccaaaaatggaaccctttaaggcccataatcgattgtcaagagaaaaaaatgtatgcaacaactgtctagtggggatttaaacttcaagtagacaaaactaatgagaagtgggattgtttttattttcagctcaaattaatatgtaggttttgaactgtttgtgggttattttaaataaatatctatatttaaattttgtagaaaaaaaaaaaaaaaaaaaaaaaaaaaa

SEQ ID NO: 144362 - protein, 569 aa, Glycine max
MCGILAVLGCVDNSQTKRARIIELSRRLRHRGPDWSGIHCYEDCYLAHQRLAIVDPTSGDQPLYNEDKTVIVTVNGEIYNHKQLRQKLSSHQFRTGSDCEVIAHLYEEHGEEFVNMLDGMFAFILLDTRDKSFIAARDAIGITPLYLGWGHDGSTWFASEMKALSDDCERFISFPPGHIYSSKQGGLRRWYNPPWFSEDIPSTPYDPTLLRETFERAVVKRMMTDVPFGVLLSGGLDSSLVAAVVNRYLAESESARQWGSQLHTFCIGLKGSPDLKAAKEVADYLGTRHHELYFTVQEGIDALEEVIYHIETYDVTTIRASTAMFLMSRKIKALGVKMVLSGEGSDEIFGGYLYFHKAPNKKEFHEETCRKIKALHLYDCLRANKSTAAWGVEARVPFLDKEFINVAMSIDPEWKMIRPDLGRIEKWVLRNAFDDDKNPYLPKHILYRQKEQFSDGVGYSWIDGLKDHANKQVTDATMMAANFIYPENTPTTKEGYLYRTIFEKFFPKNAAKATVPGGPSVACSTAKAVEWDAAWSKNLDPSGRAALGIHDAAYDAVDTKIDEPKNGTL

SEQ ID NO: 144363 - DNA, 1692 bp, Aedes aegypti
  CDS (1)..(1692)
atgtgcggtattttttcgatatttctcaacgagcgacaccgtcgtctttatggcggtgaaacagatctgtgtggaaggaaagagtccctgcgggagttggccttccgacagtcggccagacagaggcaccgtggtccggatcacaccggtttggtggctgacgaggacgaaggatttgtgctagtccaggagagactgtgtgtgattggggtgaaaacgggaactcaaccgttcgtgtcccaagatggccaagtgctgttggtggccaatggcgaaatctacaactatctgctgatggcacaggaaatcaacgacgcacttgaggcaggggagagcacctacactccgagaagtgattgcgatgtcatcattgcatattacgagaagtttggcgttgatgtgctcatgaagaacattcgaggcatgttcgcatttgttctgtacgataagaaaaatggctgtatattggtggcgcgcgacccgattggaatagttccactctacagtgggaaagacgttgagggcaacttgtggatagccagtgaaatgaagtgtttagtggaaaagtgctcagaagtagagatattcccgccaggccacatgtactatggctcgagacaaaagttgaaaccagtgagctatttcgactctgattggatgtacgagatccctcgagcaaaggtggatttggaacggttgaaaaagagtctggaggatgcagttgaatctcatttgcagtgtgacgttccgatgggagcattgctcagtggtggtctggattcgagcttaatcgcgtccatagccacaaaaattatgaaaaaacgacatgggccagattatcgattgaaaacctacagcgtgggacttgtcggtggaccagattttgaattcgcgcgcatggttgccgactacatcggaagtgatcacacagaggtgtactttacgatcgacgaaggactcaactatattcgcgatgctgttctacacggagaaacctacgacatcacgacggttcgctgcaccattccgttgctgttgctttcgagatacatcaaaagcgaaggtatcaaaatggtactctccggtgagggagcagacgagctattcggaggatacctctactttcatcaagcgccaaatgcagaagaattccacttcgaaacggtaaagcgtgtgcagaacctccattacgcagattgtcttcgtgcaaacaagggaacttccgcatggggcctggaattgcgtgtccccttcctggatacggactttgtcaactatgtgatgagcatccgcccggaagatcgcaagccccagaacaaaatcaacggtttggtacaacccatggagaagtacatcctgcgggaagctttcgctgaggattatcttccgcaaaaagtcctctggcgacagaaggagcagttttccgatggagttggttacacgtggatcgataccatcaccaagtacgcggcgtcccacatcagtgatgccgagttttcttccgcggctgcacgattccccatcaacccgccgccaaccaaggaggcttactactaccggcagatcttcgaggagctgttcccacatgagagctgtgcgtcaaccgtcaccagatgggtgcctcggacagattggggctgctccgcagatccatccggtcggaagcagacgatacacaaggagaatgtgtga

SEQ ID NO: 144364 - protein, 563 aa, Aedes aegypti
MCGIFSIFLNERHRRLYGGETDLCGRKESLRELAFRQSARQRHRGPDHTGLVADEDEGFVLVQERLCVIGVKTGTQPFVSQDGQVLLVANGEIYNYLLMAQEINDALEAGESTYTPRSDCDVIIAYYEKFGVDVLMKNIRGMFAFVLYDKKNGCILVARDPIGIVPLYSGKDVEGNLWIASEMKCLVEKCSEVEIFPPGHMYYGSRQKLKPVSYFDSDWMYEIPRAKVDLERLKKSLEDAVESHLQCDVPMGALLSGGLDSSLIASIATKIMKKRHGPDYRLKTYSVGLVGGPDFEFARMVADYIGSDHTEVYFTIDEGLNYIRDAVLHGETYDITTVRCTIPLLLLSRYIKSEGIKMVLSGEGADELFGGYLYFHQAPNAEEFHFETVKRVQNLHYADCLRANKGTSAWGLELRVPFLDTDFVNYVMSIRPEDRKPQNKINGLVQPMEKYILREAFAEDYLPQKVLWRQKEQFSDGVGYTWIDTITKYAASHISDAEFSSAAARFPINPPPTKEAYYYRQIFEELFPHESCASTVTRWVPRTDWGCSADPSGRKQTIHKENV

SEQ ID NO: 144365 - DNA, 1692 bp, Aedes aegypti
  CDS (1)..(1692)
atgtgcggtattttttcgatatttctcaacgagcgacaccgtcgtctttatggcggtgaaacagatctgtgtggaaggaaagagtccctgcgggagttggccttccgacagtcggccagacagaggcaccgtggtccggatcacaccggtttggtggctgacgaggacgaaggatttgtgctagtccaggagagactgtgtgtgattggggtgaaaacgggaactcaaccgttcgtgtcccaggatggccaagtgctgttggtggccaatggcgaaatctacaactatctgctgatggcacaggaaatcaacgacgcacttaaggcaggggagagcacctacactccgagaagtgattgcgatgtcatcattgcatattacgagaagtttggcgttgatgcactcatgaagaatatacgaggcatgttcgcatttgttctgtacgacaagaaaaacggcaatattctggtggcgcgtgacccgattggaatagttccactctacagtgggaaagacgttgagggcaacttgtggatagccagtgaaatgaagtgtttagtggaaaagtgctcagaagtagagatattcccgccaggccacatgtactatggctcgagacaaaagttgaaaccagtgagctattttgactctgattggatgtacgagatccctcgagcaaaggtggatttggaacggttgaaaaagagtctggaggatgcagttgaatctcatttgcagtgtgacgttccgatgggagcattgctcagtggtggtctggattcgagcttaatcgcgtccatagccacaaaaattatgaaaaaacgacatgggccagattatcgattgaaaacctacagcgttggacttgtcggtggaccagatttcgaatttgcacgcatggttgccgactacatcggaagtgatcacacagaggtgtactttacgatcgacgaaggactcaactatattcgcgatgctgttctacacggagaaacctacgacatcacgacggttcgctgcaccattccgttgctgttgctttcgaggtacatcaaaagcgaaggtatcaaaatggtactctccggtgagggagcagacgagctattcggaggatacctctactttcatcaagcgccaaatgcagaagaattccacttcgaaacggtaaagcgtgtgcagaacctccattactcagattgtcttcgtgcaaacaagggaacttccgcatggggcctggaattgcgtgtccccttcctggatacggactttgtcaactatgtgatgagcatccgcccggaagatcgcaagccccagaacaaaatcaacggtttggtacaacccatggagaagtacatcctgcgggaagctttcgctgaggattatcttccgcaaaaagtcctctggcgacagaaggagcagttttccgatggagttggttacacgtggatcgataccatcaccaagtacgcggcgtcccacatcagtgatgccgaattttcttccgcggctgcacgattccccatcaacccgccgccaaccaaggaggcttactactaccggcagatcttcgaggagctgttcccacatgagagctgtgcgtcaaccgtcaccagatgggtgccccggacagattggggctgctccgcagatccatccggtcggaagcagacgatacacaaggagaatgtgtga

SEQ ID NO: 144366 - protein, 563 aa, Aedes aegypti
MCGIFSIFLNERHRRLYGGETDLCGRKESLRELAFRQSARQRHRGPDHTGLVADEDEGFVLVQERLCVIGVKTGTQPFVSQDGQVLLVANGEIYNYLLMAQEINDALKAGESTYTPRSDCDVIIAYYEKFGVDALMKNIRGMFAFVLYDKKNGNILVARDPIGIVPLYSGKDVEGNLWIASEMKCLVEKCSEVEIFPPGHMYYGSRQKLKPVSYFDSDWMYEIPRAKVDLERLKKSLEDAVESHLQCDVPMGALLSGGLDSSLIASIATKIMKKRHGPDYRLKTYSVGLVGGPDFEFARMVADYIGSDHTEVYFTIDEGLNYIRDAVLHGETYDITTVRCTIPLLLLSRYIKSEGIKMVLSGEGADELFGGYLYFHQAPNAEEFHFETVKRVQNLHYSDCLRANKGTSAWGLELRVPFLDTDFVNYVMSIRPEDRKPQNKINGLVQPMEKYILREAFAEDYLPQKVLWRQKEQFSDGVGYTWIDTITKYAASHISDAEFSSAAARFPINPPPTKEAYYYRQIFEELFPHESCASTVTRWVPRTDWGCSADPSGRKQTIHKENV

SEQ ID NO: 144367 - DNA, 1869 bp, Streptomyces griseus
  CDS (1)..(1869): transl_table=11
atgtgcggcatcgcaggctgggtggtccgccaggacggaaggccccgggaggacccggcggtggccgaggcgatggccggcgccatggcctgccggggccctgacgagcagggtgtccgcggcggccggcacgtgacgctggtgcatacgcggatggccgtcatcgacctgctcggcgggcgccagccgatggctgcggacgagagcgaggacccggccgccacgctcacctactgcggcgagatctacaacgccgccgaactacgctccgacctggccggacgggggcaccggttccgcacccgcagtgataccgaggtggtgctgcgggcgtatttggagtggggcgagcgctgccccgagcggctggaggggatgttcgccttcgccgtctgggacgcccgcacgcgctccctgttcctcgcccgcgaccgcttcggcgtcaagccgctgtactacgccgagaccggcgacgggctggtcttcgggtccgagcccaaggcgctgctcgtccactcggacgtgagccccgaggtcgacctcgacgggctgcgcgtgctgttctccatggcccgagcgcccggcgagtgcgtctaccgctccctcagcgacctgccgcccgcccacacgctgcgtttcgggcccgacggccggctgtcgctgcgccggtactggcagctggaggcccggccgcacgaggaggatctggccgggacggtcgcgaccgtgcgcgggctgctggagagcagcgtcgcccgggaactggtctcggacgtcccgctgagcgtgctgctctcgggcggcctcgactccagcaccgtggccgcgctggcggccagggccctggcggacggcgacggcggaccggtgcgcacgaccaccgtgacgtacagcggttacggcgacaacttccagcccgacctggtgcgcagcgctcccgactccccgtacgcccgtgccgtcgccgagcacatcggtgccgagcacctagagatcgagctgaccaccgccgacctgatcgacccggtggcccgccgcaccgtcctgcgcgcccaggacgtccccgccccgttcggcgacatggacacctcgacgtaccaggcgttcgcgggcgtgcgccggcactccagggtggcgctgaccggggagagcgccgacgagatcttcggcggctacagctgggtccacatccccgacctggcccatgaggagcaattcccctgggtcgccttcgagcagtggcatccgggtacgcgccgggggctgggccaggggctgctctccccggccttcaaggaccggctggacatgggctcgtactacgccgagcggtacgcgcaggccatgtcccggataccgcggctgccgagggagggcgaggaggagcgccgggcccgggagatctgcgacctgcacctgacgcactggctgccacggctgctggagcgtaacgaccggctgagcatggtctcgggcctggaggtccgggtgccgttctgcgaccaccggctggtccagtacgcgtacaacatcccctgggcgatgaagaccttcgacggacgggagaagagcgtgctgcgggccgccgcccgcgatctgctgcccgaacgtgtgctcgaccggcccaaggcgcccttcccggtgagccaggacgcgacgtacaccaaggccctccaccaggaactcaccgaggtgctggccgaccccgcctccccggtcctgccgctgctggacctggaggcggcgcgcgccgtggtcgcccgggaggggggagctgacctccaggactggctgcaccggatgaacgtggagatggtgctccaggtcgacgcctggctccgggagctcgggggcgacgtcgagctgtga

SEQ ID NO: 144368 - protein, 622 aa, Streptomyces griseus
MCGIAGWVVRQDGRPREDPAVAEAMAGAMACRGPDEQGVRGGRHVTLVHTRMAVIDLLGGRQPMAADESEDPAATLTYCGEIYNAAELRSDLAGRGHRFRTRSDTEVVLRAYLEWGERCPERLEGMFAFAVWDARTRSLFLARDRFGVKPLYYAETGDGLVFGSEPKALLVHSDVSPEVDLDGLRVLFSMARAPGECVYRSLSDLPPAHTLRFGPDGRLSLRRYWQLEARPHEEDLAGTVATVRGLLESSVARELVSDVPLSVLLSGGLDSSTVAALAARALADGDGGPVRTTTVTYSGYGDNFQPDLVRSAPDSPYARAVAEHIGAEHLEIELTTADLIDPVARRTVLRAQDVPAPFGDMDTSTYQAFAGVRRHSRVALTGESADEIFGGYSWVHIPDLAHEEQFPWVAFEQWHPGTRRGLGQGLLSPAFKDRLDMGSYYAERYAQAMSRIPRLPREGEEERRAREICDLHLTHWLPRLLERNDRLSMVSGLEVRVPFCDHRLVQYAYNIPWAMKTFDGREKSVLRAAARDLLPERVLDRPKAPFPVSQDATYTKALHQELTEVLADPASPVLPLLDLEAARAVVAREGGADLQDWLHRMNVEMVLQVDAWLRELGGDVEL

SEQ ID NO: 144369 - DNA, 1722 bp, Aspergillus oryzae
  CDS (1)..(1722)
atgtgtggcatcttcgcgtgttataaccaccctgatgtgcaaaaatttaagcctacggctttgcgcatggccaaggccgtgcgccatcgtggacccgattggagcggaaactacatcgctgataagactatccttgcacacgagcgtctgtgtatcgtcggtgtcgactccggtgctcagccccttgtgaacgatgacggttccctcgccctggccgtcaacggagagatctataaccaccgcatcatcagaaagaaccttaagaaccaatatgacttcaagacacattcggattgcgaagttgttattccgttgtacatggaacatggtcttgatgcccctaagcaccttgacggcatgttctcttgggttctttatgacagaaagcaagaccgtgttgttgcggcacgcgatcccattggtgtcactagcttctacatcggctggtcttcggagacccctggagctatctacttcgcttcggagctgaagtccctgcacccagtttgcgataagatcgaggctttccctcctggccacattttcgactccaagaccggctctatgactcgttatttcgaacctaagtggtgggaccccactaacgtccccacgactcctgtcgaccttaaggttctccgtcacaccttggagaagtctgttcggaagcgtctgatggctgaagttccttatggtgttctgctgtccggtggtctggactccagcttggtcgcctccattgctcagcgtgagactttgcgcatgcaggaggctgccaaggtagccatccagaaccagactggctcatccgatctggttggcattgacgacagcaacgagctctctaccgtcaccacattccaacagctgcattccttctccatcggtcttcctggtgctcccgatactgaggctgcccttgaggtggccaagtaccttggaaccaagcaccacgctttcaccttcaccgttgaggatggtatcaatgctctttccgatgtcatctaccacctggagacttatgatgttactaccatccgtgcatctacccccatgtatctcctcagccgcaagatcaaggcgatgggtgtaaagatggttctgagtggtgagggaagtgacgagatcttcggtggctacctctacttccacgctgcccctaacaaggaggaattccacaatgagactgtgagacgagtcaaggccctgcacctggcagattgccttagagcgaacaagtcgacttccgcttggggtctggaagcccgtgtgcctttcttggataagaacttccttgagactgctatgggtgttgatcctcaggataagatgatcactaaggagcgcattgaaaagtacatcctgcgtaaagcattcgacaccaccgatgagcccgatgtcgagccataccttccggagaagatcctctggcgccagaaggaacagtttagcgacggcgtcggctacagctggatcgacggtctgaaggatcatgctgaacttcatgtcaccgatgaaatgatgaagaaccccaagcccgagtggggcaacgatatccctgataccaaggaagcttactggtaccgtatgatgttcgatgagcacttcccaccttcctgcgcatctaccgttgagcgttgggtgccaacatggtcgaaacagaccgaccctagtggaagagctattgcgactcacaacgccaagtacgatcatgttgagtaa

SEQ ID NO: 144370 - protein, 573 aa, Aspergillus oryzae
MCGIFACYNHPDVQKFKPTALRMAKAVRHRGPDWSGNYIADKTILAHERLCIVGVDSGAQPLVNDDGSLALAVNGEIYNHRIIRKNLKNQYDFKTHSDCEVVIPLYMEHGLDAPKHLDGMFSWVLYDRKQDRVVAARDPIGVTSFYIGWSSETPGAIYFASELKSLHPVCDKIEAFPPGHIFDSKTGSMTRYFEPKWWDPTNVPTTPVDLKVLRHTLEKSVRKRLMAEVPYGVLLSGGLDSSLVASIAQRETLRMQEAAKVAIQNQTGSSDLVGIDDSNELSTVTTFQQLHSFSIGLPGAPDTEAALEVAKYLGTKHHAFTFTVEDGINALSDVIYHLETYDVTTIRASTPMYLLSRKIKAMGVKMVLSGEGSDEIFGGYLYFHAAPNKEEFHNETVRRVKALHLADCLRANKSTSAWGLEARVPFLDKNFLETAMGVDPQDKMITKERIEKYILRKAFDTTDEPDVEPYLPEKILWRQKEQFSDGVGYSWIDGLKDHAELHVTDEMMKNPKPEWGNDIPDTKEAYWYRMMFDEHFPPSCASTVERWVPTWSKQTDPSGRAIATHNAKYDHVE

SEQ ID NO: 144371 - DNA, 1752 bp, Glycine max
  CDS (8)..(1747)
ggatccaatgtgtggcatacttgctgtgcttggttgctctgattcatctcaagccaaaagggttcgcgtccttgagctttctcgcagattgaagcaccgtggtcctgactggagtgggctccaccaatatggtgataactatttggctcatcaaaggttagccatagttgatccagcttctggtgatcaacccctcttcaatgaagacaaaactgttgtggttacggtgaatggagagatctacaatcatgaagaactcaggaaacagttgcctaatcacaccttccgtacaggaagtgactgtgatgttattgctcacctgtatgaggagcacggagaaaactttgtggacatgcttgatggtatattttcgtttgttctgctagatactcgtgacaacagttttatagtggcacgagatgcaattggggtcacttccttgtacattggttggggtctagatggctctgtctggatttcatcagaattgaaggggttgaatgatgattgcgaacattttgagtcttttccacctggtcacttgtactctagcaaagagagagcgttccgcagatggtacaatcctccatggttctctgaggctattccatcagcaccttatgatcctcttgctttgaggcatgcctttgagaaggctgtggtaaaaaggttgatgactgatgttccctttggtgttttgctctctggaggtttggactcttcattggttgcagccgtcacggctcgctacctggcaggcacaaatgctgccaagcaatggggaaccaaattacactctttctgtgtaggccttgagggtgcacctgacctaaaggcagcaaaggaagtagcagactacataggaactgtacatcatgaatttcactacactgttcaggatggcatagatgccattgaggatgtgatctatcacattgaaacatatgatgtgacaacaattagagcaagcattcccatgtttcttatgtctcgtaagatcaagtcattgggagtcaaatgggttatatctggagaaggatctgatgagatctttggagggtatctatatttccacaaggcaccaaacaaagaagagtttcatcaagaaacatgccgcaagattaaagcactccacaaatatgattgcttgcgagccaataaatcgacctttgcctggggtctagaagccagagtgccatttttggacaaagattttatcagagttgcaatgaacattgatcctgagtataaaatgattaaaaaggaagaagggcgaattgagaaatgggcactgaggagggcctttgatgatgaagaacatccttatctgccaaagcacattttatacaggcagaaagaacaattcagtgatggagttggctatggttggattgatggccttaaagctcatgctgagaaacatgtgactgacagaatgatgctcaatgctgctaacattttccccttcaacacaccaaccaccaaagaagcataccactatagaatgatatttgagaggttcttccctcagaactcagccaggctgagtgttcctggaggaccaagtgttgcatgtagcacagccaaagctgttgagtgggatgctgcttggtctaacaaccttgatccatctggtagagcagcacttggagtgcatgcatcagcttatggaaatcaggtcaaagctgtagaaccagagaagatcataccaaagatggaagtttctccactaggagttgccatatagatatc

SEQ ID NO: 144372 - protein, 579 aa, Glycine max
MCGILAVLGCSDSSQAKRVRVLELSRRLKHRGPDWSGLHQYGDNYLAHQRLAIVDPASGDQPLFNEDKTVVVTVNGEIYNHEELRKQLPNHTFRTGSDCDVIAHLYEEHGENFVDMLDGIFSFVLLDTRDNSFIVARDAIGVTSLYIGWGLDGSVWISSELKGLNDDCEHFESFPPGHLYSSKERAFRRWYNPPWFSEAIPSAPYDPLALRHAFEKAVVKRLMTDVPFGVLLSGGLDSSLVAAVTARYLAGTNAAKQWGTKLHSFCVGLEGAPDLKAAKEVADYIGTVHHEFHYTVQDGIDAIEDVIYHIETYDVTTIRASIPMFLMSRKIKSLGVKWVISGEGSDEIFGGYLYFHKAPNKEEFHQETCRKIKALHKYDCLRANKSTFAWGLEARVPFLDKDFIRVAMNIDPEYKMIKKEEGRIEKWALRRAFDDEEHPYLPKHILYRQKEQFSDGVGYGWIDGLKAHAEKHVTDRMMLNAANIFPFNTPTTKEAYHYRMIFERFFPQNSARLSVPGGPSVACSTAKAVEWDAAWSNNLDPSGRAALGVHASAYGNQVKAVEPEKIIPKMEVSPLGVAI

SEQ ID NO: 144373 - DNA, 1761 bp, Medicago sativa
  CDS (1)..(1761)
atgtgtggtatacttgctgtacttggttgctctgatgactcacaagctaagagggttcgcatccttgagctttctcgcagattgaagcaccgtggtccagactggagtgggctccaccaacatggtgataactatttggctcatcaaaggttagccattgttgatcctgcttctggtgatcaacctctcttcaatgaagacaaatctattattgtcacggtgaatggagagatctacaatcatgaagacctcaggaaacaattgcctaatcacaaattccgtacacaatgtgactgtgatgttattgcacacctgtacgaggagtatggagaaaattttgtggacatgctggatggtatcttttcatttgttctgttggatactcgcgacaacagtttcattgttgcgagggatgctataggtgtcacttccttgtacattggttggggactagatggttctgtttggattgcatcagaattaaaagggctgaatgatgaatgtgaacattttgaagtttttccacctggtcacttgtactcgagcaaagaccgggagtttcgtagatggtacaatcctccgtggttcaatgaggctgttattccaacaaccccttatgatcctcttgttttgaggaacgcctttgagaaggctgtgataaaaaggttgatgactgatgtgccgttcggtgttttactatctggaggtttggattcttcattggttgcagcagtcactgctagatacctggctggcacaaaagctgctaagcaatggggagcaaaattacactcattctgtgtaggacttaagggtgcacctgaccttaaggccggaagagaagtagcagactttttaggaactgtccatcatgaatttcagtttactattcaggatggcatagatgcaatagaggatgtcatctatcatacagaaacatatgatgtaacaacaatcagggcagcaacacctatgtttctgatgtctcgaaagatcaaatcatcaggagtcaaatgggtgatttctggagaaggatctgatgagatttttggagggtatttgtatttccataaggcaccaaacaaagaagagtttcaccaagaaacatgccgcaagattaaagctcttcataggtatgattgtttgagagcaaataaatcaacatatgcatggggtctagaagctagagtaccatttttggacaaggaattcatcaaagttgcaatggacattgatcctgagtataaaatgataaaacatgaagagggaagaattgagaaatggatactaaggaaggcttttgatgatgaagagaatccttatctgcctaagcacattttatataggcagaaggagcagttcagtgatggagttggctatggttggattgatggtattaaggaccatgctgcaaaacatgtcactgatagaatgatgctcaatgcttctcacatctttcctttcaacactccacttaccaaagaagcatattactatagaatgatctttgaaaggtttttccctcagaactcggcaaggctaacagttcctggaggagctagtgttgcatgtagcacagagaaagctattgagtgggatgcttcttggtcaagcaaccttgatccatctggaagagcagcatttggagttcataattcagcttatgaaaaccaagtcaactcagttgccaaaactgtagagccagagaagattataccaaagatggaaatttctaatcttggagttgccattcaaagctaa

SEQ ID NO: 144374 - protein, 586 aa, Medicago sativa
MCGILAVLGCSDDSQAKRVRILELSRRLKHRGPDWSGLHQHGDNYLAHQRLAIVDPASGDQPLFNEDKSIIVTVNGEIYNHEDLRKQLPNHKFRTQCDCDVIAHLYEEYGENFVDMLDGIFSFVLLDTRDNSFIVARDAIGVTSLYIGWGLDGSVWIASELKGLNDECEHFEVFPPGHLYSSKDREFRRWYNPPWFNEAVIPTTPYDPLVLRNAFEKAVIKRLMTDVPFGVLLSGGLDSSLVAAVTARYLAGTKAAKQWGAKLHSFCVGLKGAPDLKAGREVADFLGTVHHEFQFTIQDGIDAIEDVIYHTETYDVTTIRAATPMFLMSRKIKSSGVKWVISGEGSDEIFGGYLYFHKAPNKEEFHQETCRKIKALHRYDCLRANKSTYAWGLEARVPFLDKEFIKVAMDIDPEYKMIKHEEGRIEKWILRKAFDDEENPYLPKHILYRQKEQFSDGVGYGWIDGIKDHAAKHVTDRMMLNASHIFPFNTPLTKEAYYYRMIFERFFPQNSARLTVPGGASVACSTEKAIEWDASWSSNLDPSGRAAFGVHNSAYENQVNSVAKTVEPEKIIPKMEISNLGVAIQS

SEQ ID NO: 144375 - DNA, 2211 bp, Glycine max
  CDS (174)..(1913)
tctctctcactcctccatctacgtttcttaaatcattttcttctttctctctttctttatcttctcatttttctcattacactcttttttttttctctcaacttttctcttattaaccatagttcacatattatatcatcacatatcatagtgatatattatatcatatcacaatgtgtggcatacttgctgtgcttggttgctctgattcatctcaagccaaaagggttcgcgtccttgagctttctcgcagattgaagcaccgtggtcctgactggagtgggctccaccaatatggtgataactatttggctcatcaaaggttagctatagttgatccagcgtctggtgatcaacccctcttcaatgaagacaaaactgtagtggttacggtgaatggagagatctacaatcatgaagaactcaggaaacagttgcctaatcacaccttccgtacaggaagtgactgtgatgttattgctcacctgtatgaggagcacggagaaaactttgtggacatgcttgatggtatattttcgtttgctctgctagatactcgtgacaacagttttatagtggcacgagatgcaattggggtcacttccttgtacattggttggggtctagatggctctgtctggatttcatcagaattgaaggggttgaatgatgattgcgaacattttgagtcttttccacctggtcacttgtactctagcaaagagagagcgtttcgcagatggtacaatcctccatggttctctgaggctattccctcagcaccttatgatcctcttgctttgaggcatgcctttgagaaggctgtggtaaaaaggttgatgactgatgttccctttggtgttttgctctctggaggtttggactcttcattggttgcagccgtcacggctcgctacctggcaggcacaaatgctgccaagcaatggggaaccaaattacactctttctgtgtaggccttgagggtgcacctgacctaaaggcagcaaaggaagtagcagactacataggtactgtacatcatgaatttcactacactgttcaggatggcatcgatgccattgaggatgtgatctatcacattgaaacatatgatgtgacaacaattagagcaagcattcccatgtttcttatgtctcgtaagatcaagtcattgggagtcaaatgggttatatctggagaaggatctgatgagatctttggagggtatctatatttccacaaggcaccaaacaaagatgaatttcatcaagaaacatgccgcaagattaaagcactccacaaatatgattgcttgcgagccaataaatcgacctttgcctggggtctagaagccagagtgccatttttggacaaagattttatcagagttgcaatgaacattgatcctgagtataaaatgattaaaaaggaagaagggcgaattgagaaatgggtactaaggagggcctttgatgatgaagaacatccttatctgccaaagcacattttatacaggcagaaagaacaattcagtgatggagttggctatggttggattgatggccttaaagctcatgctgagaaacatgtgactgatagaatgatgctcaatgctgctaacattttccccttcaacacaccaaccaccaaagaagcatactactatagaatgatatttgagaggttcttccctcagaattcagccaggctgagtgttcctggaggaccaagtgttgcatgtagcacagccaaagctgttgagtgggatgctgcttggtctaacaaccttgatccatctggtagagcagcacttggagtgcatgcatcagcttatggaaatcaggtcaaagctgtagaaccagagaagatcataccaaagatggaagtttctccactaggagttgccatatagagctagtatgagccatagcaaaaactagtagttgccctagaaccaaaatatattattatactagtcatcaatgactcattaatcatcataaatgaaaatttggcctgctgtgtagtttattcaggcaaggctatatataaatagataaggctctctatctagctgtcttaagtgttgttccatccacatcttgtcttcgttttctatttatgtcatctgagcactatcatgatgtactggatttccaagaaaatgttcagttaaatttgaatgcaaagttcactatttcagactttca

SEQ ID NO: 144376 - protein, 579 aa, Glycine max
MCGILAVLGCSDSSQAKRVRVLELSRRLKHRGPDWSGLHQYGDNYLAHQRLAIVDPASGDQPLFNEDKTVVVTVNGEIYNHEELRKQLPNHTFRTGSDCDVIAHLYEEHGENFVDMLDGIFSFALLDTRDNSFIVARDAIGVTSLYIGWGLDGSVWISSELKGLNDDCEHFESFPPGHLYSSKERAFRRWYNPPWFSEAIPSAPYDPLALRHAFEKAVVKRLMTDVPFGVLLSGGLDSSLVAAVTARYLAGTNAAKQWGTKLHSFCVGLEGAPDLKAAKEVADYIGTVHHEFHYTVQDGIDAIEDVIYHIETYDVTTIRASIPMFLMSRKIKSLGVKWVISGEGSDEIFGGYLYFHKAPNKDEFHQETCRKIKALHKYDCLRANKSTFAWGLEARVPFLDKDFIRVAMNIDPEYKMIKKEEGRIEKWVLRRAFDDEEHPYLPKHILYRQKEQFSDGVGYGWIDGLKAHAEKHVTDRMMLNAANIFPFNTPTTKEAYYYRMIFERFFPQNSARLSVPGGPSVACSTAKAVEWDAAWSNNLDPSGRAALGVHASAYGNQVKAVEPEKIIPKMEVSPLGVAI

SEQ ID NO: 144377 - DNA, 1743 bp, Brassica rapa subsp
  CDS (1)..(1743)
atgtgtgggattctcgctgttctaggctgcgtcgataactctcaagccacacgttctcgtatcatcaaactctctcgcagattgaggcatagaggtcctgattggagtgggctccattgttatgaggattgttacttggctcatgagcgtttggccatcattgaccccatttctggagaccagcctctctacagcgaagataagaccgtcgttgtcacggtgaatggagagatatacaaccacaaggcattgcgtgaaagtgaaagtctgaagtctcacaagtaccataccgggagtgattgtgaagtgcttgcccatctttatgaagaacatggagaggaattcatcaacatgttggacggcatgtttgcatttgtccttcttgatactaaggacaaaagttatattgctgtaagggacgccattggtgtcatcccactctacattggctggggtctcgatggttctgtctggtttgcttctgagatgaaagcacttagtgatgattgtgaacagtttatggctttcccaccaggccatatctattcgagtaaacaaggtggtcttaggaggtggtacaaccctccatggttctctgagctggttccttcaaccccttatgatcccttagtattgcgtgatactttcgagaaggctgtgataaagagactaatgaccgatgtgccttttggtgtcctactctctggaggactagactcatcccttgttgcttcagtggctatacgccatttggaaaaatcagatgctcgtcagtggggttccaagctgcacacgttttgtattggtttaaagggatctcctgatcttaaagctggtaaagaagttgctgactacctaggaactcgccatcacgagcttcatttcacagttcaggaagggatagatgccatagaagaagttatatatcacgttgagacctatgacgtgactaccataagagcaagcactcccatgtttctcatgtcgaggaaaatcaaatcgcttggtgtgaagatggttctctctggtgaaggctctgatgagatctttggagggtatttgtacttccataaagcacctaacaagaaagaattacacgaggaaacatgccgaaagatcaaagcgctttatcaatatgattgcttgagggctaacaaatcaacttctgcgtggggtgttgaggctcgtgtgcctttccttgataaagcgtttttagatgtagcaatgggcattgatccagagtggaagatgatcaggcctgacttgggaaggattgagaaatgggtgttacgcaatgcctttgatgatgagaagaacccttatctaccaaagcacattctgtacaggcagaaggaacagttcagtgatggagttggatacagctggattgacggtctgaaagatcatgcaaacaaacatgtctctgacgcaatgctgacgaacgcaaactttgtcttcccggagaacacacctttgacaaaggaggcttactactacagagccatctttgaaaagttcttccctaagagcgctgctagagcaactgtaccaggaggtccaagtgtagcatgtagtaccgcaaaagctgtggagtgggacgcagcttggaaagggaaccttgacccgtcgggtcgtgcggctcttggagttcatgttgcagcttatgaaggagataaagctgaagctcctcgtcctgagaaggtacagaagctggcagagaaaactgcagaagccattgtttga

SEQ ID NO: 144378 - protein, 580 aa, Brassica rapa subsp
MCGILAVLGCVDNSQATRSRIIKLSRRLRHRGPDWSGLHCYEDCYLAHERLAIIDPISGDQPLYSEDKTVVVTVNGEIYNHKALRESESLKSHKYHTGSDCEVLAHLYEEHGEEFINMLDGMFAFVLLDTKDKSYIAVRDAIGVIPLYIGWGLDGSVWFASEMKALSDDCEQFMAFPPGHIYSSKQGGLRRWYNPPWFSELVPSTPYDPLVLRDTFEKAVIKRLMTDVPFGVLLSGGLDSSLVASVAIRHLEKSDARQWGSKLHTFCIGLKGSPDLKAGKEVADYLGTRHHELHFTVQEGIDAIEEVIYHVETYDVTTIRASTPMFLMSRKIKSLGVKMVLSGEGSDEIFGGYLYFHKAPNKKELHEETCRKIKALYQYDCLRANKSTSAWGVEARVPFLDKAFLDVAMGIDPEWKMIRPDLGRIEKWVLRNAFDDEKNPYLPKHILYRQKEQFSDGVGYSWIDGLKDHANKHVSDAMLTNANFVFPENTPLTKEAYYYRAIFEKFFPKSAARATVPGGPSVACSTAKAVEWDAAWKGNLDPSGRAALGVHVAAYEGDKAEAPRPEKVQKLAEKTAEAIV

SEQ ID NO: 144379 - DNA, 1827 bp, Brassica campestris
  CDS (1)..(1827)
atgtgtgggattctcgctgttctaggctgcgtcgataactctcaagccacacgttctcgtatcatcaaactctctcgcagattgaggcatagaggtcctgattggagcgggctccattgttatgaggattgttacttggctcatgagcgtttggccatcattgaccccatttctggagaccagcctctctacagcgaagataagaccgtcgttgtcacggtgaatggagagatatataatcacaaggcattgcgtgaaagtgaaagtctgaagtctcacaagtaccataccgggagtgattgtgaagtgcttgcccatctttatgaagaacatggagaggaattcatcaacatgttggacggcatgtttgcatttgtccttcttgatactaaggacaaaagttatattgctgtaagggacgccattggtgtcatcccactctacattggctggggtctcgatggttctgtctggtttgcttctgagatgaaagcacttagtgatgattgtgaacagtttatggctttcccaccaggccatatctattcgagtaaacaaggtggtcttaggaggtggtacaaccctccatggttctctgagctggttccttcaaccccttatgatcccttagtattgcgcgatactttcgagaaggctgtgataaagagactaatgaccgatgtgccttttggtgtcctactctctggaggactagactcatcccttgttgcttcagtggctatacgccatttggaaaaatcagatgctcgtcagtggggttccaagctgcacacgttttgtattggtttaaagggatctcctgatcttaaagctggtaaagaagttgctgactacctaggaactcgccatcacgagcttcatttcacagttcaggaagggatagatgccatagaagaagtgatataccatgttgagacctatgacgtgactactataagagccagcactccaatgtttctcatgtcgagaaagatcaaatcgcttggtgtgaagatggttctttctggtgaaggctctgatgagatttttggagggtatttgtacttccacaaagcacctaacaagaaggagttacacgaggaaacatgccgaaaggcaacgcccttagagtttttagaccatgacgtttcttgtgcctacttactctgccttaaccttgtttgtttgcttctgatgcagatcaaagcactttatcaatatgattgcttgagggctaacaaatcaacttctgcgtggggtgttgaggctcgtgtgcctttccttgataaagcgtttctagatgtagcaatgggcattgatccagagtggaagatgatcaggcctgacttgggaaggattgagaaatgggtgttacgcaatgcctttgatgatgagaagaatccttatctaccaaagcacattctgtacaggcagaaggaacagttcagtgatggagttggatacagctggattgacggtctgaaagatcatgcaaacaaacatgtctctgacgcaatgctgacgaacgcaaactttgtcttcccggagaacacacctttgacaaaggaggcttactactacagagccatctttgaaaagttcttccctaagagcgctgctagagcaactgtaccaggaggtccaagtgtagcatgtagtactgcaaaagctgtggagtgggacgcagcttggaaagggaaccttgacccgtcgggtcgtgcggctcttggagttcatgttgcagcttatgaaggagataaagctgaagctcctcgtcctgagaaggtacagaagctggcagagaaaactgcagaagccattgtttga

SEQ ID NO: 144380 - protein, 608 aa, Brassica campestris
MCGILAVLGCVDNSQATRSRIIKLSRRLRHRGPDWSGLHCYEDCYLAHERLAIIDPISGDQPLYSEDKTVVVTVNGEIYNHKALRESESLKSHKYHTGSDCEVLAHLYEEHGEEFINMLDGMFAFVLLDTKDKSYIAVRDAIGVIPLYIGWGLDGSVWFASEMKALSDDCEQFMAFPPGHIYSSKQGGLRRWYNPPWFSELVPSTPYDPLVLRDTFEKAVIKRLMTDVPFGVLLSGGLDSSLVASVAIRHLEKSDARQWGSKLHTFCIGLKGSPDLKAGKEVADYLGTRHHELHFTVQEGIDAIEEVIYHVETYDVTTIRASTPMFLMSRKIKSLGVKMVLSGEGSDEIFGGYLYFHKAPNKKELHEETCRKATPLEFLDHDVSCAYLLCLNLVCLLLMQIKALYQYDCLRANKSTSAWGVEARVPFLDKAFLDVAMGIDPEWKMIRPDLGRIEKWVLRNAFDDEKNPYLPKHILYRQKEQFSDGVGYSWIDGLKDHANKHVSDAMLTNANFVFPENTPLTKEAYYYRAIFEKFFPKSAARATVPGGPSVACSTAKAVEWDAAWKGNLDPSGRAALGVHVAAYEGDKAEAPRPEKVQKLAEKTAEAIV

SEQ ID NO: 144381 - DNA, 1815 bp, Triticum aestivum
  CDS (22)..(1779)
tgttgccgtcgatccaggaaaatgtgcggcatactggcggtgctgggctgcgctgatgacacccaagggaagagagtgcgcgtgcttgagctctcgcgcaggctcaagcaccgcggccccgactggagcggcatgcaccaggttggcgactgctacctctcccaccagcgcctcgccatcatcgaccctgcctctggcgaccagccgctctacaacgaggacaagtccatcgtcgtcacagtgaatggagagatctacaaccatgaacagctccgggcgcagctctcctcccacacgttcaggacaggcagcgactgcgaggtcatcgcacacctgtacgaggagcatggggagaacttcatcgacatgctggatggtgtcttctccttcgtcttgctcgatacacgcgacaacagcttcattgctgcacgtgatgccattggcgtcacacccctctatattggctggggaattgatgggtcggtgtggatatcatcagagatgaagggcctgaatgatgattgtgagcactttgagatctttcctcctggccatctctactccagcaagcagggaggcttcaagagatggtacaacccaccttggttctccgaggtcattccttcagtgccatatgacccacttgctctcaggaaggctttcgaaaaggctgtcgtcaagaggcttatgacggacgttccattcggtgttctactctctggtggccttgactcatcattggttgcagccgttacagttcgccacctggcaggaacaaaggctgcaaagcgctgggggactaagcttcactctttttgtgtcggacttgaggggtcacctgatctgaaggctgcaaaggaggtagccaattacctgggcaccatgcaccatgagttcaccttcactgttcaggacggcattgatgcaattgaggatgtgatttatcacaccgaaacatatgatgtgacgacaatcagggcaagcacgccaatgttcctgatgtcacgcaagatcaagtcacttggggtcaagatggtcatctctggtgagggctccgatgagattttcggagggtacctctacttccacaaggcacccaacaaagaggagctccaccgtgagacatgtcaaaagatcaaagctctgcatcagtacgattgcttgagggccaacaaggcaacatctgcatggggcctcgaagcacgtgtgccattcttggacaaggagtttatcaatgaggcaatgagcattgatcctgagtggaagatgatccggcctgatcttggaagaattgagaaatgggtgctgaggaaagcatttgatgacgaggagcaaccattcctgccgaagcatattctgtacaggcagaaagagcagttcagtgatggtgttggctacagctggattgatggcctaaaggctcacgcagaatcgaatgtgacagataagatgatgtcaaatgcaaagttcatctacccacacaacaccccgactacaaaagaggcctactgttacaggatgatatttgagaggttcttcccccagaactcggcgatcctgacggtgccaggtgggccaagcgttgcatgcagcacggcgaaggcggtagagtgggatgcccagtggtcagggaacctggatccctcagggagagcagcacttggagtccatctctcggcctatgaacaggagcatctcccagcaaccatcatggcaggaaccagcaagaagccgaggatgatcgaggttgcggcgcctggtgtcgcaattgagagttgatggtgtcctgtcctgcttgccaatctctagaggatt

SEQ ID NO: 144382 - protein, 585 aa, Triticum aestivum
MCGILAVLGCADDTQGKRVRVLELSRRLKHRGPDWSGMHQVGDCYLSHQRLAIIDPASGDQPLYNEDKSIVVTVNGEIYNHEQLRAQLSSHTFRTGSDCEVIAHLYEEHGENFIDMLDGVFSFVLLDTRDNSFIAARDAIGVTPLYIGWGIDGSVWISSEMKGLNDDCEHFEIFPPGHLYSSKQGGFKRWYNPPWFSEVIPSVPYDPLALRKAFEKAVVKRLMTDVPFGVLLSGGLDSSLVAAVTVRHLAGTKAAKRWGTKLHSFCVGLEGSPDLKAAKEVANYLGTMHHEFTFTVQDGIDAIEDVIYHTETYDVTTIRASTPMFLMSRKIKSLGVKMVISGEGSDEIFGGYLYFHKAPNKEELHRETCQKIKALHQYDCLRANKATSAWGLEARVPFLDKEFINEAMSIDPEWKMIRPDLGRIEKWVLRKAFDDEEQPFLPKHILYRQKEQFSDGVGYSWIDGLKAHAESNVTDKMMSNAKFIYPHNTPTTKEAYCYRMIFERFFPQNSAILTVPGGPSVACSTAKAVEWDAQWSGNLDPSGRAALGVHLSAYEQEHLPATIMAGTSKKPRMIEVAAPGVAIES

SEQ ID NO: 144383 - DNA, 1719 bp, Saccharomyces cerevisiae
  CDS (1)..(1719)
atgtgtggtatctttgcagccttcaagcatgaagatattcacaacttcaaaccaaaagctctacaactatctaaaaaaatcagacaccgtggcccagattggtcaggaaatgccgttatgaattccaccattttcgttcacgagaggttggctattgttggtttagactccggtgcccagccaatcacttcagctgatggcgaatatatgcttggcgttaatggtgagatctacaaccacatccaactaagggagatgtgctctgattacaagtttcaaactttcagtgactgtgaacccatcataccgttatatttggaacatgatatcgatgctccaaaatatctggacggtatgttcgcattttgtctgtatgattccaagaaagaccgtattgtcgctgcaagagaccctatcggtgttgtcactttatacatggggcgttcttctcagtctccagagaccgtttattttgcctccgaattaaaatgtctaactgacgtttgtgacagtatcatttcgttccctcctggtcatgtctacgattctgaaacggacaagattactcgttactttaccccagactggttggatgaaaagcgtatcccatccaccccagttgactaccatgctatcagacacagtttagaaaaggccgttagaaagaggctaatggctgaagttccatacggtgttcttctatccggtgggctggactcttctttgattgctgcgattgctgctcgtgaaacggaaaaagctaatgctgatgctaacgaagacaacaatgttgacgagaagcaacttgcaggtatcgatgaccaaggccatctacacacatccggttggtctcgtttgcattcgtttgcgattggtctaccaaatgcacctgatttacaagcggctagaaaagtcgccaaattcattggttctatccaccatgaacacacttttacattacaagaaggtttggatgctttggacgacgtgatctaccatttggaaacttacgacgttaccactatcagagcttctacaccaatgttcttactatctagaaagattaaggcccaaggtgtcaaaatggttctttctggtgaaggctcggacgaaatattcggtggctatctatatttcgcacaagcaccttctgctgcagaatttcacaccgaatctgtgcaacgtgtcaagaacttgcatttggcagattgtttgagagctaataagtccacgatggcttggggtctagaagctcgtgttcccttcttagacaaagactttttgcagctatgtatgaacattgatccaaatgaaaagatgatcaagccaaaggaaggacgtatcgaaaaatacattttaagaaaggcattcgacactacagatgaaccagatgttaagccatacctacctgaagaaatcttatggagacaaaaggaacaattttccgatggtgttggctactcatggattgacggcctaagagacactgctgaaagggccatttctgacgccatgtttgccaatccaaaggctgattggggcgacgatattccaaccaccaaagaagcttactggtacaggctgaagtttgatgcttggtttcctcaaaagactgcggcagacactgtcatgagatggattccaaaggccgattggggttgtgccgaagatccttcaagtagatacgccaaaatacacgaaaagcacgtcagtgcttaa

SEQ ID NO: 144384 - protein, 572 aa, Saccharomyces cerevisiae
MCGIFAAFKHEDIHNFKPKALQLSKKIRHRGPDWSGNAVMNSTIFVHERLAIVGLDSGAQPITSADGEYMLGVNGEIYNHIQLREMCSDYKFQTFSDCEPIIPLYLEHDIDAPKYLDGMFAFCLYDSKKDRIVAARDPIGVVTLYMGRSSQSPETVYFASELKCLTDVCDSIISFPPGHVYDSETDKITRYFTPDWLDEKRIPSTPVDYHAIRHSLEKAVRKRLMAEVPYGVLLSGGLDSSLIAAIAARETEKANADANEDNNVDEKQLAGIDDQGHLHTSGWSRLHSFAIGLPNAPDLQAARKVAKFIGSIHHEHTFTLQEGLDALDDVIYHLETYDVTTIRASTPMFLLSRKIKAQGVKMVLSGEGSDEIFGGYLYFAQAPSAAEFHTESVQRVKNLHLADCLRANKSTMAWGLEARVPFLDKDFLQLCMNIDPNEKMIKPKEGRIEKYILRKAFDTTDEPDVKPYLPEEILWRQKEQFSDGVGYSWIDGLRDTAERAISDAMFANPKADWGDDIPTTKEAYWYRLKFDAWFPQKTAADTVMRWIPKADWGCAEDPSSRYAKIHEKHVSA

SEQ ID NO: 144385 - DNA, 2110 bp, Pinus sylvestris
  CDS (90)..(1871)
aagcaatccatcccatccagggaatactcaccagtatcgtaacgtccctgctccattcattcaatttcggttttctgtcactagtcgccatgtgtggaatcctagcagtgttcggttgcttggacgcatcgcaggccaagcgtgttcgggtactggagctctcgcgcaggttacgacatagagggcctgactggagtggactgtatcagagcgggcattcctttcttgctcaccagaggttggccatcgtagatcctgcctctggggatcaacccttgtacaatgaagatagacaaatagttgttactgttaatggagaaatatataaccacgagaaactgagggaacagctcaaatctcacaagtttcggactggaagcgattgtgaaattgtagctcatctctatgaggactatggcgaggagttcgtgaacatgttggatggaatgttctctttcgttttgcttgacacgcgtgaccagagcttcatagctgctcgagatgcttttggaatcactcccctctacatcggttggggatttgatggatctgtttggtttgcgtcagagatgaaagctttgcacgatgactgtgaaagttttgagtcatttcctcctggacatatatattccagcaaacaaggcggactacggagatggtacaacccaccttggtattcagaaaatgttataccatcttctccatatgaccctttggttttaagacgagcatttgagaaagcagtcataaaaaggctgatgacggatgttccatttggagtgctgttatcaggagggcttgactcatccttagttgcagctgttgcgtcgcgctatttggctgctaccaaggctggaaaacaatggggagacaaactacattctttctgtgttggattaaagggatcaccagatttaaaggctgccaaagaggtagcagagtaccttggtactgttcatcacgaattccatttcactgtgcaggatggtatagatgcaatcgaggacgttatataccatgtcgaaacatatgatgtgacaactatcagagcgagcacgcccatgttcttgatgtctcgaaaaatcaagtccttgggagtgaagatggttctgtctggagaaggatcagatgagatatttggtgggtatttgtacttccacaaggctcctaacaaagaggaattccaccaggaaacatgtcgtaagataaaggcccttcacatgtatgattgcttgagggcaaataagtccacatctgcatggggtgtggaggcccgtgtgccatttctagataaggaattcgtcaatgttgccatggacattgatcccgagcggaagatggtaaagcctgacattgggcgcattgagaagtgggtcttgcggagggcattcgacgacgagcagaatccttatcttcccaagcacattctgtacagacagaaggggcaattcagcgatggggttggctacagctggattgatggcttgaaatcacatgcggcagagcatgtgacagatacgatgctgcgtaatgcgaaatacatattcccccataatactccaactacaaaggaggcgtactactacaggatgatatttgaaagattctatcctcagaacgcggcacggttgacggtcccgggcgggccaagcgtggcttgtagcaccgcaaaggcagtggaatgggatgctgcgtgggctcacaatctggacccctccggcagggccgctctaggcgtccatgcctccgcgtaccaagagtgtaacgcaggtgctaatgatggcaccggcaatgggaacgtcaatacattcagcaagatgccaggaagggaagcgagtgtagacgcccgcgaagtgctgatcaaaggttgaattgtaaagtgttcgtatcgactagggtagccacgttactatgtaataatctgtacacagaaatggttggggaagagtatgtctctgttgtacatcaaagtgagagcttgtgattactgtatttgcattggctggttttagttttcaaagatttcaatgtcgcagcactttgtgacagcactttgtaatatttaaagaacggttttatttggatgggtaaaaaaaaaaaaaaaaaaaaa

SEQ ID NO: 144386 - protein, 593 aa, Pinus sylvestris
MCGILAVFGCLDASQAKRVRVLELSRRLRHRGPDWSGLYQSGHSFLAHQRLAIVDPASGDQPLYNEDRQIVVTVNGEIYNHEKLREQLKSHKFRTGSDCEIVAHLYEDYGEEFVNMLDGMFSFVLLDTRDQSFIAARDAFGITPLYIGWGFDGSVWFASEMKALHDDCESFESFPPGHIYSSKQGGLRRWYNPPWYSENVIPSSPYDPLVLRRAFEKAVIKRLMTDVPFGVLLSGGLDSSLVAAVASRYLAATKAGKQWGDKLHSFCVGLKGSPDLKAAKEVAEYLGTVHHEFHFTVQDGIDAIEDVIYHVETYDVTTIRASTPMFLMSRKIKSLGVKMVLSGEGSDEIFGGYLYFHKAPNKEEFHQETCRKIKALHMYDCLRANKSTSAWGVEARVPFLDKEFVNVAMDIDPERKMVKPDIGRIEKWVLRRAFDDEQNPYLPKHILYRQKGQFSDGVGYSWIDGLKSHAAEHVTDTMLRNAKYIFPHNTPTTKEAYYYRMIFERFYPQNAARLTVPGGPSVACSTAKAVEWDAAWAHNLDPSGRAALGVHASAYQECNAGANDGTGNGNVNTFSKMPGREASVDAREVLIKG

SEQ ID NO: 144387 - DNA, 2401 bp, Lotus japonicus
  CDS (88)..(1995)
tatactcgataaattaagcgatctctctgcagtgcacacgcgctgtatctcaagtcctcagtccattcagtcagtttgtcagtttcaatgtgtggcatctgttgtgtgatcggcgtacccgccggtgctgaaagcatccgttccaccgtcctcgaccgcgccaaacgcatccgtcaccgcgggcctgattggaccggtgtatatgcgaagggcaaaaacatcatcgtacacgagcgcctgtccattgtcgacgtcgagaccggcaaccagcccctgaagtccgctgacggcaagcaggtgctcgtgtgcaacggcgaaatctacaaccacctgcagctgcgtcagtccctcaaagcaccggtgcagttcgcgacgaactcggattccgaatgcattctccatctctacaacgaacgcggcgttggtttcgtcaactctttgaacggcatcttcggctttgtgctgatcgatgaagccaaagacacattcatcgttgctcgcgatcacgagggcatcattccgctgtactacggttgggatgagactggcgcgttgtgggtggcgtcggaactcaaagcgctgcacgacgtctgcgttcggtttgaggagttcccgcccggtcacgtgctgcacggcaaagtcggcagcgccggcaaactggagaaatggtaccaacccgtatggcacgacgaagcgtatgtgccggccgccaccgcggcatgcgacatcaaaggcctgcgcgaaagcttggaagccgctgtggagcgtcagatgatgacggacgtgccgtacggtgtgctgctgtcgggtggtttggattcgtctgtcatttccgctgtggccgtgcgcgtggctgcaaagagggctgccgccaaagcggactccaaacacacagagctcggtcatgtggacccgaagtctgttgtgcactcgttttcggtgggtctgaagggctcaccggacctgaaggctgcgcgcgaagtggctgcgttcatcggcactgaacaccacgagttcgtgttcacagtggacgatggcatcaacgcactgcgcgatgtgatctatcatttggagacgtttgacaccaccaccatccgcgcgtctacggccatgtacttgatgtcacgtaagatcaaggcgttgggtgtgaaaatggtgttgtccggtgaaggctctgacgaagtgtttggcggatatctctacttccataaggcacctgatcgcgtggagttccacaaagagacagtgcgtaagctcaaggctctgaacaaattcgattgtttgcgtgcgaacaaaagcacgatggcgtggggcttggaagcgcgcgtgccatttttggataaggaatttctcgatttcgcgatgacgctggatccgacgcataagatgtgcggcaaacacgcgggcgggcggatagagaaatggatcgtacgtaaggcgttcgaagggtatctgccgcccgccattctgtggcgtcagaaggagcagttcagcgatggcgtgggctacagctggatcgactctctcaaggcctttgccgatgcgaaggtgtcggacgcacagctggccgcagcggcgtttaagttccccgaaaacacgcctctgaccaaagagtcgtatctgtaccgttccatctttgagacgcactaccccgagccggccgcacgcgcctgtgtgcccggtggcccgtccgtggcgtgctccacaccggccgccatcgcatgggacgcggcgtttcaaaaaatggccgacccgtccggtcgcgcggtggccggagtgcacgccgacgcgtacgccgttgcggcggacgacaaaacgccagacacatcggctgacgcaaaacacggtacagcggctgagcataaggcctcgggtgcgacccgcgcgccgttcatcgcagccgcaaacggcatcaaatgctcagccgaagcagcgctaccgcatgcgctgcccaaaccggtcgctttggcgagcggcaaagcggaagcggagtaaccgcgcggctgcgagcgtggctgatagcacgcattcgttcgcgaactcactcattgcagtgccgcgtcgggcatccacggatcgcactgaactgcgaccaattcgcagacataccgctctgcaagtgttcgcgcctgtccctactgctgttgatatgtctgtttgtctgtgtagtttgaccgatcgattgccattccgttctgagttctgactcatcacgtcgttcgccagcgctcattccaagcgctcgtacggttcgactgttactgtccatcgacttcaccccctatctgcatgccttcacatgcacgtcaccgtttgtcaagtctgtgtgttgcctgtcgcatgtgatgctgtgtcttgaatgaagaaaaacacatcagtttcaaaaaaaaaaaaaaaaaaa

SEQ ID NO: 144388 - protein, 635 aa, Lotus japonicus
MCGICCVIGVPAGAESIRSTVLDRAKRIRHRGPDWTGVYAKGKNIIVHERLSIVDVETGNQPLKSADGKQVLVCNGEIYNHLQLRQSLKAPVQFATNSDSECILHLYNERGVGFVNSLNGIFGFVLIDEAKDTFIVARDHEGIIPLYYGWDETGALWVASELKALHDVCVRFEEFPPGHVLHGKVGSAGKLEKWYQPVWHDEAYVPAATAACDIKGLRESLEAAVERQMMTDVPYGVLLSGGLDSSVISAVAVRVAAKRAAAKADSKHTELGHVDPKSVVHSFSVGLKGSPDLKAAREVAAFIGTEHHEFVFTVDDGINALRDVIYHLETFDTTTIRASTAMYLMSRKIKALGVKMVLSGEGSDEVFGGYLYFHKAPDRVEFHKETVRKLKALNKFDCLRANKSTMAWGLEARVPFLDKEFLDFAMTLDPTHKMCGKHAGGRIEKWIVRKAFEGYLPPAILWRQKEQFSDGVGYSWIDSLKAFADAKVSDAQLAAAAFKFPENTPLTKESYLYRSIFETHYPEPAARACVPGGPSVACSTPAAIAWDAAFQKMADPSGRAVAGVHADAYAVAADDKTPDTSADAKHGTAAEHKASGATRAPFIAAANGIKCSAEAALPHALPKPVALASGKAEAE

SEQ ID NO: 144389 - DNA, 1867 bp, Hordeum vulgare
  CDS (1)..(1746)
atgtgtggcatactggcagtgctggggtgcggcgacgagtcgcaggggaagagggtgcatgtgctcgagctctcgcgcaggctcaagcaccgcggcccggactggagcggcctgcaccaggtcgccgacaactacctctgccaccagcgcctcgccatcatcgacccggcctccggcgaccagccgctctacaacgaggacaagtccgttgctgttgccgtcaacggggagatctacaaccatgaggagctccgggaacggctctccggccacaggttccggaccggcagtgactgcgaggtcatcgcccatctgtatgaggaacatggagaaagcttcattgacatgttggatggtgttttctcgttcgtgttgcttgacgcacgagatcacagcttcattgctgctcgtgatgccattggtgtcacgtctctctacattggctggggaatcgatgggtcagtgtggatatcttcggagatgaaaggactaaacgatgattgtgagcacttcgagatcttcccacctggtaatctttactccagcaaagaaaaatgcttcaagagatggtataaccctccttggttctctgaggtcatcccctcggttccctatgacccactacgtctcagatcggcatttgaaaaggctgtcatcaagaggctcatgacagatgttccattcggtgtcctcctctctggtggcctcgactcatcactggtggcagccgtcgcagcccgtcatttcgcagggacgaaggctgcaaagcgctggggaactaggctccactccttctgtgttgggcttgagggatcaccggatctcaaggctgcaaaggaggtcgcggatcacctgggtacggtgcaccatgagttcaacttcacagttcaggtacgcatcgatgcaattgaagacgtgatatatcacattgaaacatatgatgtgacgacgatcagggcaagcacactaatgttccagatgtcacgcaagatcaaggcgcttggggtcaagatggtcatctctggtgagggtgctgatgaaatcttcggggggtacttgtatttccacaaggcccccaacaaggaggagttccaccaagaaacatgtcggaagatcaaagctctccatcagtacgattgcttgagggccaataaagcaacatctgcatggggccttgaggttcgtgtgccattcttggacaaggagttcatcgatgaggctatgagcatagatcctgaatggaagatgatccggcctgatcttggaagaattgaaaaatggatactgaggaaagcgttcgacgatgaggagaaaccgttcttgccgaagcacattctgtacaggcagaaggagcagtttagtgatggtgttgggtatagctggattgatggccttaaggatcatgcagcatcaaatgtgagtgataagatgatgtccaatgcaaagttcatctacccacacaacaccccaacaactaaagaggcctactattacaggatgatcttcgagaggtacttccctcagagctcggcgatcctcacggtgccaggcgggccaagcgtggcgtgcagcacagccaaggcaatagagtgggacgcgcagtggtctgggaacctggacccctctgggagagcagcgcttggagtccatctctcagcctacgagcaggacacgatcgctgtgggtggtagcaataagcctgggccgatggagaccgtggtgaatggtgttgccatagagagctgatgaatgacacgtatatcgtgtcctactaaagacatatatgatgcataagttcttgtcggtgttgtaataagacaggcctatgtttctcctgtttaatttaaaagattctcttggcctggcc

SEQ ID NO: 144390 - protein, 581 aa, Hordeum vulgare
MCGILAVLGCGDESQGKRVHVLELSRRLKHRGPDWSGLHQVADNYLCHQRLAIIDPASGDQPLYNEDKSVAVAVNGEIYNHEELRERLSGHRFRTGSDCEVIAHLYEEHGESFIDMLDGVFSFVLLDARDHSFIAARDAIGVTSLYIGWGIDGSVWISSEMKGLNDDCEHFEIFPPGNLYSSKEKCFKRWYNPPWFSEVIPSVPYDPLRLRSAFEKAVIKRLMTDVPFGVLLSGGLDSSLVAAVAARHFAGTKAAKRWGTRLHSFCVGLEGSPDLKAAKEVADHLGTVHHEFNFTVQVRIDAIEDVIYHIETYDVTTIRASTLMFQMSRKIKALGVKMVISGEGADEIFGGYLYFHKAPNKEEFHQETCRKIKALHQYDCLRANKATSAWGLEVRVPFLDKEFIDEAMSIDPEWKMIRPDLGRIEKWILRKAFDDEEKPFLPKHILYRQKEQFSDGVGYSWIDGLKDHAASNVSDKMMSNAKFIYPHNTPTTKEAYYYRMIFERYFPQSSAILTVPGGPSVACSTAKAIEWDAQWSGNLDPSGRAALGVHLSAYEQDTIAVGGSNKPGPMETVVNGVAIES

SEQ ID NO: 144391 - DNA, 1761 bp, Securigera parviflora
  CDS (1)..(1761)
atgtgtggcatacttgctgtgcttggttgctctgatgactctcaagccaaaagggttcgagtgcttgagctttctcgcagattgaagcaccgtggccctgactggagtgggctccaccaacatggtgattgctttttggctcatcaacgtctagccatagttgatccagcttctggtgatcaacctctcttcaatgaagatcagtctattatcgttacggtgaatggagagatatacaatcatgaagaactcaggaaacaaatgccaaatcacaagtttaggacaggaagtgactgtgatgttattgcacacctgtatgaggagcatggagaaaacttcgtcgacatgttggatggaattttttcatttgttctgcttgatacccgtgacaacagttttatagtggcacgggatgctataggggtcacttccttgtacattggttggggactagatggatctgtctggattgcatcagaactgaaagggctgaatgatgattgtgagcatttcgagacttttccacccggccacttgtactcgagcaaagaaagagagttccgtagatggtacaatcctccatggttctcagagtccattccatcagccccttatgatcctctagctttgaggcaagcatttgagaaggctgtcgtaaaaaggttgatgactgatgttccttttggagttctgttgtctggaggtttggattcttcattggttgcgtccatcactgcccgtcacctggccgacacaaaggctgccaagcagtggggagcaaaactacactcattctgtgtaggccttgagggttcaccagacttgaaggctggaaaagaggtagcagactatttaggaactgtccatcatgagtttcagtacactgttcaggatggaatagatgcccttgaggatgtcatctatcatatagaaacttatgatgttacaacaatccgagcaagcaccccgatgtttctcatgtctcgcaagatcaaatcactaggagtcaaatgggtaatctctggagaaggatctgatgagatctttggagggtatctgtattttcacaaggcacccaacaaagaagagttgcacaaagaaacgtgccgcaagattaaagcactccacaaatatgattgtttgcgggcaaacaaatctacatttgcttggggtttggaagcgcgagtgccatttttagacaaggagttcatcaatgttgcgatgaacattgatcccgaaaataaaatgataaaactagatgaaggacgaattgagaagtggatcctgaggaaggcctttgatgatgaagagaatccttatctgccaaagcacattttgtataggcagaaggaacaattcagtgatggagtcggctacggttggattgatggcctcaaagaccatgctgcaaagcatgtgactgatagaatgatgctcaatgcatctaacatttacccctttaacactcccactaccaaagaagcatattattacagaatgatctttgagaggttctaccctcagaactcagccaggctcagtgttcctggaggagctagtgttgcatgcagcacagagaaggctcttgagtgggatgctgaatggtccaaaaaccttgatccttctggcagagcagcacttggagttcatgtttcagcttatgaaaaccagttgagtagttctgtcagcaaaggggtagaaccagagaaaattatacccaagatggagatttctcctcttggagttgccatacagagctag

SEQ ID NO: 144392 - protein, 586 aa, Securigera parviflora
MCGILAVLGCSDDSQAKRVRVLELSRRLKHRGPDWSGLHQHGDCFLAHQRLAIVDPASGDQPLFNEDQSIIVTVNGEIYNHEELRKQMPNHKFRTGSDCDVIAHLYEEHGENFVDMLDGIFSFVLLDTRDNSFIVARDAIGVTSLYIGWGLDGSVWIASELKGLNDDCEHFETFPPGHLYSSKEREFRRWYNPPWFSESIPSAPYDPLALRQAFEKAVVKRLMTDVPFGVLLSGGLDSSLVASITARHLADTKAAKQWGAKLHSFCVGLEGSPDLKAGKEVADYLGTVHHEFQYTVQDGIDALEDVIYHIETYDVTTIRASTPMFLMSRKIKSLGVKWVISGEGSDEIFGGYLYFHKAPNKEELHKETCRKIKALHKYDCLRANKSTFAWGLEARVPFLDKEFINVAMNIDPENKMIKLDEGRIEKWILRKAFDDEENPYLPKHILYRQKEQFSDGVGYGWIDGLKDHAAKHVTDRMMLNASNIYPFNTPTTKEAYYYRMIFERFYPQNSARLSVPGGASVACSTEKALEWDAEWSKNLDPSGRAALGVHVSAYENQLSSSVSKGVEPEKIIPKMEISPLGVAIQS

SEQ ID NO: 144393 - DNA, 2278 bp, Striga hermonthica
  CDS (247)..(1962)
  misc_feature (2048)..(2048): n is a, g, c or t
gaaaactccaaaggcggaatctattgggaagctcccaaaagcagcggcccagattctccgtcctttgcatacgaatataattaaataaatagtaattaaaataggccctttcactattcaagttcagcagccatttttgagcgtttggcttttgtagagcaactctctctccctctctctctgtctctcattcagtcatcggaaaaaccaaaaggttagaggcgcatacagcgacaccctgcagccatgtgtgggattctggccgtcctcggcgtctccgagaactctcaggcgaaaaggtccaggattattgagctgtccagaaggttgcgccacagagggcctgattggagtggtcttcacaatcatcagaattgctatcttgctcatcaacgtttagctattatagatcctacttcgggggatcaaccactctataatgaagagaaaacagtttttgtcacggttaatggggaaatatataaccataaagaactcagggagaagctgaagtctcatgtgtttagaacaggaagtgactgcgaagtcattgctcatctgtatgaagaatatggagaagagtttgtgaatatgttggatggaatgttctcttttgtgctgcttgacacccgtgataatagtttcattgctgctcgtgatgccattggtattactcctctttacatcggctggggtcttgatggatctacttggtttgcttcggaaatgaaagctttaagtgatgactgcgagcgattcatgacttttctacctggtcacatctattcaagcaaaagtggagggctcagaagatggtacaacccaccatggtatgcggagcagataccttcggctccttatgagccccttgtactgcgagcggcctttgaaaaggctgttatcaagagacttatggcagatgtaccttttggggtacttctatcaggcggtcttgactcatcccttgttgcttctgtggcctctcggtatttggctgattctccagctgcccagtggggtacacagttgcataccttttgcattggcttaaagggttctccagatttgagagctgcaagggaagtggcagactaccttggtactcgtcaccatgagttccatttcacagtgcaggaaggaattgatgctttggaggaggtgatctatcatattgagacatatgatgtgactaccatcagggccagcacacctatgttccttatgtctcgaaaaatcaaatcactgggagttaaaatggttttatctggtgaaggctctgatgaaatctttggtggttatctgtattttcacaaggcgcccaacaaggaggagtttcatgaagaaacatgtcgaaagatcaaagcgcttcatctgtatgactgtttgagagctaataaagcaacttctgcgtggggtcttgaagctcgtgttccgtttttggacaaggaatttatcgatgttgcgatgggtattgatccggaatggaaaatgataagacctgatcttggacgaattgagaagtggattctgcgcaacgcgtttgatgatgaggagaaaccttatttgccaaagcacatattatacagacagaaagaacagtttagcgatggagttggatacagttggattgatggcttgaaagatcacgctaaccaacaggttacggatgcaatgttagcgaatgcaaattttgtttatcccgagaatacccctacaacgaaagaggcatactactatcgaaccgtctttgagagatttttccctaagaatgcggcgagatcgacagttccagggggtcctagtgtagcgtgcagtaccgcaaaggctgtagaatgggacgcgtcgtggtccaagaatctcgacccgtctggtcgagcagccctcggagttcacgttgctgcgtatgatgaggcaaagatggccggtgagggtccgaccgcaaatggctctcccaaagagtagagtgtggaagaatactgttactgtttgatgaactgtgctaccatttgtttgggctgacttttatttaaaaatcctcatgtattccnaaataactatatattgttttcgatgtgatctcagtttgtagtaagtagtacgtgttgtcttgggcttttgaactgaacatattttgcaagattattagtgttcaaaaaaaaaaaaaaaaaaccgtcagagacgctcctctaaagtgttcagaaacgaaattatcagatctgattaatcctaaataaataccaagggtgtaattattgttggataaaaaaaaaaaaaaaaa

SEQ ID NO: 144394 - protein, 571 aa, Striga hermonthica
MCGILAVLGVSENSQAKRSRIIELSRRLRHRGPDWSGLHNHQNCYLAHQRLAIIDPTSGDQPLYNEEKTVFVTVNGEIYNHKELREKLKSHVFRTGSDCEVIAHLYEEYGEEFVNMLDGMFSFVLLDTRDNSFIAARDAIGITPLYIGWGLDGSTWFASEMKALSDDCERFMTFLPGHIYSSKSGGLRRWYNPPWYAEQIPSAPYEPLVLRAAFEKAVIKRLMADVPFGVLLSGGLDSSLVASVASRYLADSPAAQWGTQLHTFCIGLKGSPDLRAAREVADYLGTRHHEFHFTVQEGIDALEEVIYHIETYDVTTIRASTPMFLMSRKIKSLGVKMVLSGEGSDEIFGGYLYFHKAPNKEEFHEETCRKIKALHLYDCLRANKATSAWGLEARVPFLDKEFIDVAMGIDPEWKMIRPDLGRIEKWILRNAFDDEEKPYLPKHILYRQKEQFSDGVGYSWIDGLKDHANQQVTDAMLANANFVYPENTPTTKEAYYYRTVFERFFPKNAARSTVPGGPSVACSTAKAVEWDASWSKNLDPSGRAALGVHVAAYDEAKMAGEGPTANGSPKE

SEQ ID NO: 144395 - DNA, 2109 bp, Securigera parviflora
  CDS (151)..(1902)
catggactgaaggagtagaaaatgcccaagtttcattgaggccttcaatttccaaccattatatgtggtcttgttcttcattgaagctcttctgagtttgcttcaatctctttctttctctttgatttcatcatataaacacatactacaatgtgtggtatacttgctgtgctttgtgctgagaactctcaagccaagagggttcgcgtcctcgaactttctcgcaggttgaagcaccgtggtccagattggagtgggctccaccaacacggtgactgctatttggcacaccaacggctagcgatagttgatcctgcttctggagatcaacctctgttcaatgaagacaaatctcttattgtcacggtgaatggagagatttacaaccatgaagagctcaggaaacagctgcctaaccacaagttccgaaccggaagtgactgtgatgtcattgcacacctgtacgaggaacatggagaaaactttgtggacatgcttgatggaatcttttcatttgttctgctggacacccgtgacaacactttcatagtggcaagagatgctataggagtcacttccctctacattggttggggattagatggctctgtttggatttcatctgaaatgaaaggcctgaatgatgattgtgaacattttgagtgcttcccacctggtcacttgtactctagcaaagatagagcgttccgcagatggtacaaccctccatggttctctgagaccattccttcagctccttatgatcctctagctttgagacacgcctttgagaaggcagtgataaaaaggttgatgactgatgtgccttttggagtgctgctatctggaggtttggactcatcattggttgcgtccatcacttctcgctacttggcaaccacaaaagctgctgaacaatggggatcaaaattgcattcattctgtgtaggccttgagggatcacctgatctgaaggctgcaaaggaagttgcagattatcttgggactgtccaccatgagtttacctttactgttcaggatggaatagatgctattgaggatgttatataccatgtggagacatatgatgtgactacaattagagcaagcacacctatgtttctgatgtctaggaagataaaatcacttggtgtcaagtgggtaatctctggagaaggatctgatgagatctttggtgggtatctgtacttccacaaggcacctaacaaggaagagtttcacagagaaacatgccgcaagatcaaagcattgtaccaatatgattgcttgagagccaataaatcaacatttgcttggggactagaagccagagtgccatttttggacaaggaattcatcaatgttgcaatgaacattgatcctgagaacaagatgattaagcgcgacgaaggacggatggagaagtatattctgaggagggcctttgatgatgaagaacatccttatctgccaaagcacattttgtataggcagaaagaacaattcagtgatggagttggctatagttggattgatggccttaaagaacatgctgcaaaacatgtgactgataagatgattttcaatgctgctaacatcttcccccacaacaccccaacaaccaaggaagcgtattactaccgaatgatctttgagaggttcttccctcagaactcagctaggctcaccgttcccggaggagcaagtgttgcatgtagcacagcaaaagctgttgagtgggatgctgcttggtctaataaccttgacccttcaggtagagcagcactaggagtgcatctttctgcttatgacaaccagaacaacttggctaacaaacctgtagaatttgagaagattatacctatggaagctccttctcttggtgttgccatccagagctaatttgagctgtggcaaggaataattgtgcaagaatgaagatgataaaactaagcatgaatggaaaaatttgcctgctgtgttgttttatttgggcagtgctatgtatggataaggtttccaaaaattattgtatcttgtattatttcaatgctgttatttgaagttttaccttaatctatttgatttgagttcaaaaaaaaaaaaaaa

SEQ ID NO: 144396 - protein, 583 aa, Securigera parviflora
MCGILAVLCAENSQAKRVRVLELSRRLKHRGPDWSGLHQHGDCYLAHQRLAIVDPASGDQPLFNEDKSLIVTVNGEIYNHEELRKQLPNHKFRTGSDCDVIAHLYEEHGENFVDMLDGIFSFVLLDTRDNTFIVARDAIGVTSLYIGWGLDGSVWISSEMKGLNDDCEHFECFPPGHLYSSKDRAFRRWYNPPWFSETIPSAPYDPLALRHAFEKAVIKRLMTDVPFGVLLSGGLDSSLVASITSRYLATTKAAEQWGSKLHSFCVGLEGSPDLKAAKEVADYLGTVHHEFTFTVQDGIDAIEDVIYHVETYDVTTIRASTPMFLMSRKIKSLGVKWVISGEGSDEIFGGYLYFHKAPNKEEFHRETCRKIKALYQYDCLRANKSTFAWGLEARVPFLDKEFINVAMNIDPENKMIKRDEGRMEKYILRRAFDDEEHPYLPKHILYRQKEQFSDGVGYSWIDGLKEHAAKHVTDKMIFNAANIFPHNTPTTKEAYYYRMIFERFFPQNSARLTVPGGASVACSTAKAVEWDAAWSNNLDPSGRAALGVHLSAYDNQNNLANKPVEFEKIIPMEAPSLGVAIQS

SEQ ID NO: 144397 - DNA, 1758 bp, Hordeum vulgare var
  CDS (1)..(1758)
atgtgtggcatactggcagtgctgggctgcgccgatgacacccaggggaagagagtgcgcgtgctcgagctctcgcgcaggctcaagcaccgcggccccgactggagtggcatgcaccaggtcggtgactgctacctctcccaccagcgcctcgccatcatcgaccctgcctcaggcgaccagccactttacaacgaggacaagtccatcgtcgtcactgtgaatggagagatctacaaccatgaacagctccgggcgcagctctcctcccacacattcaggacaggcagcgactgcgaggtcatcgcacacctgtacgaggagcatggggagaatttcatcgacatgctggatggtgtcttctccttcgtcttgctcgacacacgcgacaacagcttcattgctgcccgtgatgccattggtgtcacacccctgtatgttggctggggaattgatgggtcggtgtggatatcatcagagatgaagggcctgaatgatgattgtgagcactttgagatctttccacctggtcatctctactccagcaaggagggaggcttcaagagatggtacaacccaccttggttctcggaggtcattccttcagtgccatatgatccacttgctctcaggaaagctttcgaaaaggctgtcaccaagaggcttatgacagacgttccattcggtgttctactctctggtggccttgactcatcattggttgcagcggttacagttcgtcacctggcagggacaaaggctgcaaagcgctgggggactaagcttcactctttttgtgtcggacttgaggggtcacctgatctgaaggctgcaaaggaggtagccaattacctgggcaccatgcaccatgagttcaccttcactgttcaggatggcattgatgcaattgaggatgtgatttatcacaccgaaacatatgatgtgacaacaatcagggcaagcacaccaatgttcctgatgtcacgaaagatcaagtcacttggggtcaagatggtcatctctggtgagggttccgatgagatttttggagggtacctctacttccacaaggcacccaacaaagaggagctccaccgtgagacatgtcaaaagatcaaagctctgcatcagtacgattgcttgagggccaacaaggcaacatctgcatggggcctcgaagcacgtgtgccattcttggacaaggagtttatcaatgaggcaatgagcattgatcctgagtggaagatgatccggcctgatcttggaagaattgagaagtgggttctgaggaaagcatttgatgacgaggagcaaccattcctgccgaagcacattctgtacaggcagaaagagcagttcagtgatggtgttggctacagctggattgatggcctaaaggcccacacagaatcaaatgtgaccgataagatgatgtcaaatgcgaagttcatttacccacacaacaccccgactacaaaagaggcctactgttacaggatgatatttgagaggttcttcccccagaactcggcaatcctgacagtgccaggcgggccaagcgtcgcatgcagcacggcgaaggcagtagagtgggatgctcggtggtcggggaacctggatccctcagggagagcagcacttggagtccatctctcggcctatgagcaggagcatctcccagcaaccatcatggcaggaaccagcaagaagccgaggatgatcaaggttgcggcacctggtgtcgcaattgagagttga

SEQ ID NO: 144398 - protein, 585 aa, Hordeum vulgare var
MCGILAVLGCADDTQGKRVRVLELSRRLKHRGPDWSGMHQVGDCYLSHQRLAIIDPASGDQPLYNEDKSIVVTVNGEIYNHEQLRAQLSSHTFRTGSDCEVIAHLYEEHGENFIDMLDGVFSFVLLDTRDNSFIAARDAIGVTPLYVGWGIDGSVWISSEMKGLNDDCEHFEIFPPGHLYSSKEGGFKRWYNPPWFSEVIPSVPYDPLALRKAFEKAVTKRLMTDVPFGVLLSGGLDSSLVAAVTVRHLAGTKAAKRWGTKLHSFCVGLEGSPDLKAAKEVANYLGTMHHEFTFTVQDGIDAIEDVIYHTETYDVTTIRASTPMFLMSRKIKSLGVKMVISGEGSDEIFGGYLYFHKAPNKEELHRETCQKIKALHQYDCLRANKATSAWGLEARVPFLDKEFINEAMSIDPEWKMIRPDLGRIEKWVLRKAFDDEEQPFLPKHILYRQKEQFSDGVGYSWIDGLKAHTESNVTDKMMSNAKFIYPHNTPTTKEAYCYRMIFERFFPQNSAILTVPGGPSVACSTAKAVEWDARWSGNLDPSGRAALGVHLSAYEQEHLPATIMAGTSKKPRMIKVAAPGVAIES

SEQ ID NO: 144399 - DNA, 1830 bp, Streptomyces aureofaciens
  CDS (1)..(1830): transl_table=11
atgtgcggaatcgtgggggtggtcgactacgacgccccggccgaacaccgccgggacctgctccaggcgatgaccgacaccatggcctgccgggggccggacgccgagggcctctggttcggccgcgcggccgggctcggtcaccggcgcctgtcggtgatcgaccccgagcacggccggcagccgatgaccgcggaacacgagggccgcggcgcggcgatcaccttcagcggcgagatctacaacttccgtgagctgcgcgccgaactcacctcgcacggccaccggttcaggacgtcctgcgataccgaggtcgtcctgcgcggctacctccagtggggcgccgcgctggtcgagaggctcaacgggatgttcgccttcgccgtctgggacgagcacagcgaggaactcctgctggtccgcgaccggatgggcgtcaagccgctctactactggccgaccgccgccggcgtgcgcttcggctcggagcccaaggccgtcctggcggaccggaccctgtcccgccgggtcggcccggacgggctgtgcgaggtgctggacatggtgaagacgcccgaggcggccgtcttctccgggctcgtcgaggtccgtccgggtcagctcgtccgggtggggcgcggcggggtgcgccggcagacgtactggcggctggaggcccgcgagcacaccgacgacctgccgacgaccatcggcaccgtccgtgacctgctcgccgacaccgtcacccgtcagctggtctcggacgtcccgctgggcacgctgctctccggcggcctggactcgtcggccgtgacggcgctggccgcccgcagcgggccggtgcgctccttctcggtggacttccggggcgccgccgacgccttcgcctccgacgccgtccggcgggaggcggacgcgccgtacgtgcgcgagctggcggggcacgtcggagcggaccacctggaggtgctgctggacagccccggcctgtcggacccggcggtgcgttccgcggtgctgcgcgccaccgacctgccgcccgcgtactggggcgacatgtggccctcgctctacctgttcttccgcgcggtgcgggagaacgtcacggtggcgctgtccggcgaggccgcggacgaactcttcggcggctaccggtggttccgcaacccgttggccttgcgggcggccaccttcccgtggctcaccccgggttcggcgcgctacttcggcggcagctcgctgttccaggcgggtctgctggacaagctcgacctggacggctaccgggcggcccggtacgccgaggcgctcgccgaagtgccggtgctgccgggtgagtcggcgcccgagaggcggatgcgcgagatcggtcacctgaacctgacccgcttcgtgcagaccctgctcgaccgcaaggaccggatgagcatggcggtcggcctcgaggtgcgggtgccgttctgcgaccaccggctcgtggagtacgtcttcaacgtgccctgggagatgaagagtttcgacggccgggagaagagcctgctgcgggcggcggtggccgacctgctgccgcgctcggtggtcgagcgggtgaagaccccgtacccggcgacccaggatccgggctacgagggcgccctgcgggccgaactggccggggtgctcgccgatccggacgctccggtgctgccgctgctggaccgcgagcgggccctggccgcggctgcccgtccgaccggggcggtgagccggccctacgaccggggcagtctggagctggtgctgtggctcaactcctggctcgccgagtacgaggtcacgctggacctgtga

SEQ ID NO: 144400 - protein, 609 aa, Streptomyces aureofaciens
MCGIVGVVDYDAPAEHRRDLLQAMTDTMACRGPDAEGLWFGRAAGLGHRRLSVIDPEHGRQPMTAEHEGRGAAITFSGEIYNFRELRAELTSHGHRFRTSCDTEVVLRGYLQWGAALVERLNGMFAFAVWDEHSEELLLVRDRMGVKPLYYWPTAAGVRFGSEPKAVLADRTLSRRVGPDGLCEVLDMVKTPEAAVFSGLVEVRPGQLVRVGRGGVRRQTYWRLEAREHTDDLPTTIGTVRDLLADTVTRQLVSDVPLGTLLSGGLDSSAVTALAARSGPVRSFSVDFRGAADAFASDAVRREADAPYVRELAGHVGADHLEVLLDSPGLSDPAVRSAVLRATDLPPAYWGDMWPSLYLFFRAVRENVTVALSGEAADELFGGYRWFRNPLALRAATFPWLTPGSARYFGGSSLFQAGLLDKLDLDGYRAARYAEALAEVPVLPGESAPERRMREIGHLNLTRFVQTLLDRKDRMSMAVGLEVRVPFCDHRLVEYVFNVPWEMKSFDGREKSLLRAAVADLLPRSVVERVKTPYPATQDPGYEGALRAELAGVLADPDAPVLPLLDRERALAAAARPTGAVSRPYDRGSLELVLWLNSWLAEYEVTLDL

SEQ ID NO: 144401 - DNA, 2088 bp, Raphanus sativus
  CDS (53)..(1810)
gcgatcaaacaagcaaataccaataatattattttgcgaacaaacaagaaaaatgtgtggaattcttgccgttttaggatgctccgatgattctcaggccaagagagttcgcgttcttgagctttctcgcagattaaggcacagaggacctgactggagtggaatatatcagaacggtggcaattacttggcccatcaacgtcttgctatcatcgatcctgcttccggtgatcaacctctctttaacgaggacaagtccattgttgtcacggtgaatggagagatttataaccatgaggagctgagaaagggtttgaaaaatcacaagttccacaccggtagtgattgtgacgtcattgctcacctgtacgaggagcatggtgagaattttgtggatatgttggatggaatcttctcctttgtgttgctagacacaagagataactcattcatggtggctcgtgacgcggttggtgtcacttcgctctacattggttggggactagacggatctctctgggtctcttcggagatgaaaggcttacacgaagattgtgagcatttcgaagcgtttccaccaggtcatttgtattcaagcaaatcaggaggagggtttaagcaatggtacaatcctccttggttcaatgaatctgttccttccacgccttatgagcctctcgcaattagacgcgcctttgaagacgctgtgataaagcgattgatgactgatgttccattcggagttttgctctctggtggtcttgattcttctcttgttgcatccatcactgcccgtcacttggccggtactaaggccgctaagcgatggggtcctcagctccattccttttgcgtcggtcttgagggctcgccagacttgaaggcggggaaagaagtggcggagtatttggggacggtgcaccatgagttccatttcacggtgcaggacgggattgatgcgatcgaagacgtgatctaccatgtcgagacatatgatgtgacgactattagagctagcacacccatgttcttaatgtccaggaaaatcaagtctctaggtgttaagatggttctctccggtgaaggttctgatgagatctttggagggtatctttacttccacaaggcacctaacaagcaagagtttcaccaagaaacatgtcgcaagatcaaggctcttcacaagtacgattgtttaagagccaacaaagctacctctgcttttggtctagaggcgcgtgtcccttttctagacaaagagtttatcaacaccgctatgtctctcgaccctgaatccaagatgatcaaaccagaggaaggaaggatcgagaagtgggttttaaggagagcctttgacgatgaagaacgtccttatttgccaaaacacattctctacagacagaaagagcagtttagtgatggtgttgggtacagctggatcgatggcctcaaagcccatgctgctgaaaatgtcaatgacaaaatgatgtccaacgctgcatatatcttccctcacaacaccccactcaccaaagaagcttactattacagaatgatcttcgagaggttcttcccacagaactcggcaaggctaactgttccaggaggtgcgaccgtggcctgctcgaccgcaaaagccgtggagtgggatgcaagctggtccaacaatatggatccatcgggaagagctgcgattggagtccacctctccgcctacgacggcagcaaagtggcattgcccttgccgccacataaggcaattgacgacatgccaatgatgatgggacaagaagttgtgattcagacatgagtcgaaggatatatgggggaattggagttctttaaagttgtcctaatgggtttaagtgtttttgtatgatttcaaaataaaattggtttcctgttcctagggaagatatggatgtataaattaattttcttgtacttttagcaaagattcgaatgtactgtttcttcaaaatcgatgtacaccaatcttacttaattaaatgatatgtattgtaatatgaaatgaaaaaattcgattgtgcttgttctcaaaaaaaaaaaaaaaaaaaaaaaaaaaaa

SEQ ID NO: 144402 - protein, 585 aa, Raphanus sativus
MCGILAVLGCSDDSQAKRVRVLELSRRLRHRGPDWSGIYQNGGNYLAHQRLAIIDPASGDQPLFNEDKSIVVTVNGEIYNHEELRKGLKNHKFHTGSDCDVIAHLYEEHGENFVDMLDGIFSFVLLDTRDNSFMVARDAVGVTSLYIGWGLDGSLWVSSEMKGLHEDCEHFEAFPPGHLYSSKSGGGFKQWYNPPWFNESVPSTPYEPLAIRRAFEDAVIKRLMTDVPFGVLLSGGLDSSLVASITARHLAGTKAAKRWGPQLHSFCVGLEGSPDLKAGKEVAEYLGTVHHEFHFTVQDGIDAIEDVIYHVETYDVTTIRASTPMFLMSRKIKSLGVKMVLSGEGSDEIFGGYLYFHKAPNKQEFHQETCRKIKALHKYDCLRANKATSAFGLEARVPFLDKEFINTAMSLDPESKMIKPEEGRIEKWVLRRAFDDEERPYLPKHILYRQKEQFSDGVGYSWIDGLKAHAAENVNDKMMSNAAYIFPHNTPLTKEAYYYRMIFERFFPQNSARLTVPGGATVACSTAKAVEWDASWSNNMDPSGRAAIGVHLSAYDGSKVALPLPPHKAIDDMPMMMGQEVVIQT

SEQ ID NO: 144403 - DNA, 2035 bp, Helianthus annuus
  CDS (49)..(1818)
atcatcttcttcataaaaacttgtaacctgtgcattgctagttgtaccatgtgtggaattctagctttgttgggttgctccgatgattctcaagccaaaaggtttcgtgtcctcgagctttctcgcagattgaagcaccgtgggccggattggagtgggttatatcagcacggtgataattatttatcgcatcaacgtctcgcggttatcgatccggcttcgggtgatcagcctctttataatgaggatgaaacggttgttgtaacggttaatggtgagatatataatcatatggagctccgggaaaagttgatgggtcacaagtttaaaaccgggagcgattgtgacgttatcgcgcatttatatgaagaacatggggaaaattttgtcgatatgttggatggaatgttttcgtttgtgttattgggcacacgcgataacagttacctcgttgctcgtgatgctatcgggatcacttcgctctacattggttggggactcgatggttcggttttgatttcatcgggactaaaaggtttaaatgatgattgtgagcattttgaggtgtttctcgcgggacacttgtactctagcaaaatcagggggtttaggcggtggtacaatctcccgtggttctcggagagtatcccatcgacaccgtatgatccacttgttctacgatgtgcgtttgaaaacgcggtgattaaacggctaatgacggatgtgccctttggtgttctcttatcgggtgggctagactcgtcgttggtcgcatctgttacggcccgtcacttggctggttcgaaagccgcgaagcaatggggagctcaactacattcattttgtgttggccttgagggctccccggatctcaaggcggctagagaggtagccgattatttaggaacccttcatcacgaattccacttcaccgtacaggatggtattgatgcaatagaagatgtgatataccatatcgagacatacgatgtgacaacgatccgggctagcacgcctatgtttctcatgtcccgaaagatcaaatctctcggcgtgaaaatggtcatctccggtgaaggctcggacgagatatttggcgggtacttatactttcacaaggcacccaacaaggaagagttccatcaagaaacctgtcgaaagatcaaagcccttcatcaatacgattgcttgcgagccaataagtcgacatccgcttggggtttggaagcccgagtcccctttttggataaagagttcatcaatgtggccatgagcatcgaccctgaagcgaaaatgatcaatatggatcaaaaacggatcgagaaatggatccttagacgggcttttgatgatgaagaaaaaccgtatctgcctaagcatattttgtatagacagaaagaacagtttagcgatggagtcggatatagctggattgatggactcaaatctcatgccgaacaacacgtaaccaacaaaatgatgcttaatgccgagcgtattttccctcacaacacacctgtcacgaaagaagcttactattaccgaatgatattcgagcggtttttccctcagaattcggctaagttgactgtcccgggtggagcaagcgtggcttgcagcactgcaaaagcaatcgagtgggacgcttcttggtcaaacaaccttgacccgtcgggaagggctgcactcggggtccataatgctgcatacaagaagaactcgggttcgattagttcggcaaacttagcaccaagcatcgctgacaacgtgccacggatgatggatattacgggtcctgaactcgtgattcggagttaacggtttatggttgaataaaatagacgagtcgcaacgtgtttttatgatgtgttggttgctagctcgttagtaactcgatgtatagcttggtttcttggaaaatgttgttattccagtagttcgtcatgtgcataaataatcggcaaataaataaaattatgaaggaacgttatatattttcagacgattgattacacctaaaaaaaaaaaaaaaaaa

SEQ ID NO: 144404 - protein, 589 aa, Helianthus annuus
MCGILALLGCSDDSQAKRFRVLELSRRLKHRGPDWSGLYQHGDNYLSHQRLAVIDPASGDQPLYNEDETVVVTVNGEIYNHMELREKLMGHKFKTGSDCDVIAHLYEEHGENFVDMLDGMFSFVLLGTRDNSYLVARDAIGITSLYIGWGLDGSVLISSGLKGLNDDCEHFEVFLAGHLYSSKIRGFRRWYNLPWFSESIPSTPYDPLVLRCAFENAVIKRLMTDVPFGVLLSGGLDSSLVASVTARHLAGSKAAKQWGAQLHSFCVGLEGSPDLKAAREVADYLGTLHHEFHFTVQDGIDAIEDVIYHIETYDVTTIRASTPMFLMSRKIKSLGVKMVISGEGSDEIFGGYLYFHKAPNKEEFHQETCRKIKALHQYDCLRANKSTSAWGLEARVPFLDKEFINVAMSIDPEAKMINMDQKRIEKWILRRAFDDEEKPYLPKHILYRQKEQFSDGVGYSWIDGLKSHAEQHVTNKMMLNAERIFPHNTPVTKEAYYYRMIFERFFPQNSAKLTVPGGASVACSTAKAIEWDASWSNNLDPSGRAALGVHNAAYKKNSGSISSANLAPSIADNVPRMMDITGPELVIRS

SEQ ID NO: 144405 - DNA, 2133 bp, Astragalus sinicus
  CDS (87)..(1847)
attttatccatttcttcttctttcatcatctcatttcttctattcaaaaaaccttctcaattttggcttcatattaattaatcacaatgtgtggcatacttgctgtacttggttgttctgatgattctcaagctaagagggttcgcatccttgagctttctcgcagattgaagcaccgtggtccggattggagtgggctccaccaacatggtgataactatttggctcatcaaaggttagccatagttgatccagcttctggtgatcaacccctcttcaatcaagagaaatctattattgtcacggtgaatggtgagatctacaatcatgaagaactgaggaaacaattgcctaatcacaaattccgtacagactgtgactgtgatgttattgcacatctgtatgaagagtatggtgagaactttgtagacatgttggacggcatattttcctttgttgtcttggatacacgtgacaacagcttcttagttgcacgtgatgctataggagtcacttccttatacattggttggggacttgatggctctgtttggattgcatcagagttgaaaggtctaaatgatgagtgtgaacattttgaggtttttccacctggtcatttatactcaagcaaagaaagagagtttcgtagatggtataatcctaaatggttttctgagactgttccatcatccccttatgatcctctagttttgagacatgcctttgaaaaggctgttataaagagattgatgagtgatgtaccttttggtgttttactctctggaggtttagactcttctcttgttgcatctgtcactgctagatacttggaagataccaaggctgctaaacaatggggagccaaattacacactttttgtgtcggccttaagggtgcaccagatttgaaggctggaagagaagtagcagattatttaggaactgtgcatcatgaatttgagtttactattcaggatggtatagatgcaattgaggatgtcatataccatacagaaacatttgatgtgacaacaataagggcaagcacaccaatgtttctgatgtctcgtaagatcaaatctctaggggtaaaaatggtattgtctggtgaaggatctgatgaaatctttggaggctatctttatttccataaggcaccaaacaaaaaagagtttcatgaagaaacatgtcgcaagatcaaggcactttataaatatgattgtttgagagctaataaatcaacatatgcttggggtttggaagctagagtaccatttctagataaggatttcatcaatgttgctatggacattgatcctgaggaaaaaatgataaaacgtgatgaaggaagaattgagaaatgggtactaaggaaagcttttgatgatgaaaacaaaccttatctgccaaggcacattttatataggcagaaagaacaattcagtgatggagttggctatggctggattgatggcataaaggaccatgctgcaaaacatgttactgctaaaatgatgctcaatgcatctcacatctttccagacaacactccaacctcaaaggaaggatattattaccgaatgatcttcgagaggtttttccctcagaactcggcgaggttgactgttcctggaggggcaagtatagcatgtagtactgagaaagctatagagtgggatgcttcatggtcaaacaatcttgacccatctggaagagcagcacttggtgtgcatgtttcagcttatgagaatcaagtgaactcatcagttgggaaaggtgtagaacctgagaagattatacctaagatgaaagtttcacctcttggagttgctattctaggctagtatgagccatggcaaggagtatttgttataattatattataattataatttatactagtcaacataaaagaaatttgcctattgtgtattattttatccaggcaaatgctgctgctatgtataaggttttctacctacctagttcttgtattaagtgttgtagtgttgtataatccacatcttttcctttactttgaatgatgttgtgatttgaacaccattgtaatgtattttgtttttaataagaaaaatgttgtgtacttgtcaaaaaaaaaaaaaaaaaaaa

SEQ ID NO: 144406 - protein, 586 aa, Astragalus sinicus
MCGILAVLGCSDDSQAKRVRILELSRRLKHRGPDWSGLHQHGDNYLAHQRLAIVDPASGDQPLFNQEKSIIVTVNGEIYNHEELRKQLPNHKFRTDCDCDVIAHLYEEYGENFVDMLDGIFSFVVLDTRDNSFLVARDAIGVTSLYIGWGLDGSVWIASELKGLNDECEHFEVFPPGHLYSSKEREFRRWYNPKWFSETVPSSPYDPLVLRHAFEKAVIKRLMSDVPFGVLLSGGLDSSLVASVTARYLEDTKAAKQWGAKLHTFCVGLKGAPDLKAGREVADYLGTVHHEFEFTIQDGIDAIEDVIYHTETFDVTTIRASTPMFLMSRKIKSLGVKMVLSGEGSDEIFGGYLYFHKAPNKKEFHEETCRKIKALYKYDCLRANKSTYAWGLEARVPFLDKDFINVAMDIDPEEKMIKRDEGRIEKWVLRKAFDDENKPYLPRHILYRQKEQFSDGVGYGWIDGIKDHAAKHVTAKMMLNASHIFPDNTPTSKEGYYYRMIFERFFPQNSARLTVPGGASIACSTEKAIEWDASWSNNLDPSGRAALGVHVSAYENQVNSSVGKGVEPEKIIPKMKVSPLGVAILG

SEQ ID NO: 144407 - DNA, 1931 bp, Astragalus sinicus
  CDS (9)..(1763)
atacaaaaatgtgtggcatacttgctgttcttggttgtgctgatgcctctagagccaaaagggttcgagttcttgagctttctcgcagattgaagcatcgtggaccagattggagtggactccaccaacatggtgactgctatttagcacaccaacggttagccatagttgatcctgcttctggggatcaaccactctttaatgaagacaaatctgttatcgtcacggtaaatggagagatttacaatcatgaagatctcaggaaacagcttcctaatcacactttcagaactggaagtgattgtgatgttattgcacatctgtacgaggaatatggagaagactttgtggacatgttggatggtatcttttcatttgttctactggatactcgtgacaacagttacatagtggctcgagatgctattggagtcacttcactatacattggatggggattagatggttctgtttggatttcatcagaaatgaaaggcttgaatgatgattgtgaacattttgagtgtttcccacctggtcacttgtactcaagcaaaaatggtgggtttagaagatggtacaatcctctttggtactctgaagctattccttcagctccttatgatccaatagttttaagacaagcctttgaaaaggcggtcataaaaaggttgatgactgatgtgccttttggtgttctactatctggaggtttagattcgtcattggttgcatcgattacttctcgctaccttgcaaccacaaaggctgctgaacaatggggatcaaaattacattcattctgtgttggccttgagggttcacctgatctgaaggctggaaaagaagttgcagactacctaggaactgtccaccatgagtttacctttacagtccaggatggtatagatgctattgaggatgttatataccatgttgaaacatatgatgtgactacaattagagcaagcacaccaatgtttctaatgtctcgtaagattaagtcacttggtgtcaaatgggtgatttctggtgaaggttctgatgagatctttggtgggtatctgtacttccacaaggcaccaaacaaggaagagtttcacagagaaacatgtcgcaagatcaaagcactctaccaatatgattgcttaagggccaataagtcaacatttgcttggggtttagaagccagagtaccatttttggacaaggagtttatcaatgttgcaatgaatattgatcctgcaaataaaatgataaatctagacgaaggaagaattgagaaatatattctgaggaaggcctttgatgatgaagagcatccttatctgccaaagcatattttatttaggcagaaagaacagttcagtgatggtgttggctatagctggattgatggccttaaagctcatgctgcaaaacatgtgactgataaaatgatgcgtaatgctgctaatatctaccctcacaacactccatcaactaaggaaggatactactacagaatgatctttgagaggttcttccctcagaactcagcaagactaactgttccgggaggaccaactgttgcatgtagcacagctaaagcagttgaatgggatgctgcttggtccaagaaccttgatccttctggtagagctgcacttggagttcatgcttcagcttatgagaatcagaacaactcagtgaacaaatcaatagaatttgagaagattatacctttggaagcttcttctgttggtgttgccatccaaacctagtttgagatttggcaaggagtgattgttcaccaatgaagatcataactacaacttgacctgaatgaagaatttgtctcatgtataattttatttgtggggcaatgatgctatgtttagatataaggctttaaataagtattgcatcttgtatggttttgaaaaaaaaaa

SEQ ID NO: 144408 - protein, 584 aa, Astragalus sinicus
MCGILAVLGCADASRAKRVRVLELSRRLKHRGPDWSGLHQHGDCYLAHQRLAIVDPASGDQPLFNEDKSVIVTVNGEIYNHEDLRKQLPNHTFRTGSDCDVIAHLYEEYGEDFVDMLDGIFSFVLLDTRDNSYIVARDAIGVTSLYIGWGLDGSVWISSEMKGLNDDCEHFECFPPGHLYSSKNGGFRRWYNPLWYSEAIPSAPYDPIVLRQAFEKAVIKRLMTDVPFGVLLSGGLDSSLVASITSRYLATTKAAEQWGSKLHSFCVGLEGSPDLKAGKEVADYLGTVHHEFTFTVQDGIDAIEDVIYHVETYDVTTIRASTPMFLMSRKIKSLGVKWVISGEGSDEIFGGYLYFHKAPNKEEFHRETCRKIKALYQYDCLRANKSTFAWGLEARVPFLDKEFINVAMNIDPANKMINLDEGRIEKYILRKAFDDEEHPYLPKHILFRQKEQFSDGVGYSWIDGLKAHAAKHVTDKMMRNAANIYPHNTPSTKEGYYYRMIFERFFPQNSARLTVPGGPTVACSTAKAVEWDAAWSKNLDPSGRAALGVHASAYENQNNSVNKSIEFEKIIPLEASSVGVAIQT

SEQ ID NO: 144409 - DNA, 1833 bp, Pseudomonas chlororaphis
  CDS (1)..(1833): transl_table=11
atgtgcggtctcacaggatgggtagactatacgcgcaggctcgaaggggaagaccccgcgattcgcgcgatgaccaataccctcgcacttcgcgggcctgatgccgaaggcatatggaaacatcgccacgcccttctggggcatcggcggctggcggtcatcgacctgagcggcggtacccagccgatggtctatcgctttgcggacggccaggaagtctcgctggtctacacaggggaggtctacaaccacgacgcattgcgcgaccagctacggcaggcggggcatgtgtttcagactcgcagcgataccgaggtggtgctgcatgcctacctggaatggggcgagcgttgctgtgatcacctgacaggcatgttcgccttcgccctgttcgacggacgcgacggccacctgctcctggtacgcgaccgccttgggatcaagccgctgttctatgcccgccatcgtgaagggctgctcttcggctcggagaccaaggccatcctggctcacccggagttcactacggggctggaggtgacggggttggtcgacgtgctcacgctgtcgaagggaaccgcccagacgcctttcaggaacctgatggagctgcttcccggccacttcctgtcctggcgccccaatgggcagatgaagatccagagctactggaaggtacgccgtcaggagcaccagcacgacctgcagacgaccgtgcaacagacccgcgagctggtcacccacgcgttgggttcgcagttgcatgccgacgttcccgtgtgctcgctgctgtccggcggactcgactccaccaccctcacggctatcgcgcaacgtattgtgaaggcgaagaccggcgggaatatcaattccttttcggtggacttcactggccaggccgagcagttcaagagcgacgacctgcgtcccgaccaggaccagccctttgccctgttggccgcggagttcatcggtagccggcaccagaccgtcctcatcgacaacgaggaactggtctcctacctggcgcgcgaggaggtgttccgcgccagggaactgcctttcaccttcggcgacatggatacctcgctgaacctgttgttcagggaaattcgcaagcactccacggtggccatctcgggggaaggcgccgatgaggtcttcggtggctatggctggttccgtgaccccaaggtcatagcctccgcgtcctttccatggtcgtcgcgggtgaagttgccggccggttttatcaatgccgacttcaaccgccaatgcgatctcgcccagtaccaacaggcgagctacgacgatgcgctgctgcaggtcgaacacctggcacaagacagcccgcacgagcgccggatgcgcgagctttgccacatgcacctgaaacgctggatggtgatgctgctggatcgcaaggaccgcctgagcatgtgcaacagccttgaggtacgtgtgccgttcaccgatcacgaactggtcgagtacatctataacgtgccttggtcgatcaagagcaaggatggcgaggagaagtggctgctcaagcaggcctgtgccgacttcgtaccggaggcggtgctcaagcgccggaaaagtccctatccgacctcggccgacctgggctacgaacgcttccttcgccagagtgcccggcagcttctgcaggacacggggaacccggtgttcggcatcgtctcccacgcctatatggccgaggaactgcgccagcccgagggctacttcaatacgcaaataagccggcacagcctggaaacagcactggcgctggatgcctggctacgcttgcacaagatctcgctctga

SEQ ID NO: 144410 - protein, 610 aa, Pseudomonas chlororaphis
MCGLTGWVDYTRRLEGEDPAIRAMTNTLALRGPDAEGIWKHRHALLGHRRLAVIDLSGGTQPMVYRFADGQEVSLVYTGEVYNHDALRDQLRQAGHVFQTRSDTEVVLHAYLEWGERCCDHLTGMFAFALFDGRDGHLLLVRDRLGIKPLFYARHREGLLFGSETKAILAHPEFTTGLEVTGLVDVLTLSKGTAQTPFRNLMELLPGHFLSWRPNGQMKIQSYWKVRRQEHQHDLQTTVQQTRELVTHALGSQLHADVPVCSLLSGGLDSTTLTAIAQRIVKAKTGGNINSFSVDFTGQAEQFKSDDLRPDQDQPFALLAAEFIGSRHQTVLIDNEELVSYLAREEVFRARELPFTFGDMDTSLNLLFREIRKHSTVAISGEGADEVFGGYGWFRDPKVIASASFPWSSRVKLPAGFINADFNRQCDLAQYQQASYDDALLQVEHLAQDSPHERRMRELCHMHLKRWMVMLLDRKDRLSMCNSLEVRVPFTDHELVEYIYNVPWSIKSKDGEEKWLLKQACADFVPEAVLKRRKSPYPTSADLGYERFLRQSARQLLQDTGNPVFGIVSHAYMAEELRQPEGYFNTQISRHSLETALALDAWLRLHKISL

SEQ ID NO: 144411 - DNA, 1668 bp, Vibrio marinus
  CDS (1)..(1668): transl_table=11
atgtgctcaatattcggaattctagacatcaaatcagacattaaacctcttcgcgaacaagcactagaactatcaaagttactacgtcaccgcggcccagattggtcaggtatctatacaagtgacaatgctattttagttcatgaacgtcttgctattgtcgatgtaaataatggtgcacagccgctatataatgaagaaaagacacacgtacttgctgttaatggtgaaatttataaccacaaagatttaaagaaaacgctgaacgtagactttgaattccaaacagaatcagattgcgaagtgatacttgcgctatataaagaaaaaggcacacaatttttagatgatctaaatggtatttttgctttcgctttatatgacgaaacagaggacgcttacctgattggccgtgaccatatcggtatcatccctctttatacgggctatgatgaacacggtaacttttatgttgcctctgaaatgaaagcactagtgccaatttgtactcaaattgaagaattcccagcaggtcattacctgtggagtaaggatggtgtagtcacgccttattatcaacgtgattggaaagattttgataacgttgcacaaaatggtggtgataaaagcgttgttaagcaaggtttggaagatgcagttaaacgtcaattaatgtgtgatgtaccttacggcgtattattatcaggcgggttagattcatctgttatttcagcaatcacccaacagtatgcaaaacgtcgtattgaagacggtggtaaaaccgaagcatggtggccacaactacactctttctctgtaggcctaaatggttctccagatttagccgctgcacaaaaagtggcagatcacttaggtactatccatcattcaattgaatttactgtgcaagaaggtatcgacgctttacgcgacgtgatttaccacattgaaacctacgatgtaacaacaattcgtgcatcaacccctatgtacctaatggcacgtaaaattaaagccatggggattaagatggtgctttctggtgaaggtgctgatgaactgttcggtggttacttgtacttccacaaagcgccaaatgcgaaagaattccatgaagagacggtacgtaaagtaaataaattacatatgtttgattgcttacgtgcaaacaaatctatggcagcttggggcatcgaagcacgtgttcctttcttagataaagaatttgttgatgcgtcaatgcgtctaaaccctgaactaaaaatgatcacgggcgaccgcattgagaaaaacatcattcgagaagcatttgaagatttactacctgaagaaattgtatggcgtcaaaaagaacaattctctgatggtgttggttattcttggattgaccaacttaaagtacacgttgaagaagcggtaactgatcaaatgttagcaagtgcagcatttaagttcccaattaacacaccagatacgaaagaaggttactactatcgtgccatctttgaagatcacttcccaggtgattcagcagcgaaatgcgtaccgtttggtaaatccgttgcttgttcaactgtagaagcattagcttgggatgaaagtttccaaaacaatgctgatccatcgggtcgtgcagctggcgtacataatgaagcatacgaagactaa

SEQ ID NO: 144412 - protein, 555 aa, Vibrio marinus
MCSIFGILDIKSDIKPLREQALELSKLLRHRGPDWSGIYTSDNAILVHERLAIVDVNNGAQPLYNEEKTHVLAVNGEIYNHKDLKKTLNVDFEFQTESDCEVILALYKEKGTQFLDDLNGIFAFALYDETEDAYLIGRDHIGIIPLYTGYDEHGNFYVASEMKALVPICTQIEEFPAGHYLWSKDGVVTPYYQRDWKDFDNVAQNGGDKSVVKQGLEDAVKRQLMCDVPYGVLLSGGLDSSVISAITQQYAKRRIEDGGKTEAWWPQLHSFSVGLNGSPDLAAAQKVADHLGTIHHSIEFTVQEGIDALRDVIYHIETYDVTTIRASTPMYLMARKIKAMGIKMVLSGEGADELFGGYLYFHKAPNAKEFHEETVRKVNKLHMFDCLRANKSMAAWGIEARVPFLDKEFVDASMRLNPELKMITGDRIEKNIIREAFEDLLPEEIVWRQKEQFSDGVGYSWIDQLKVHVEEAVTDQMLASAAFKFPINTPDTKEGYYYRAIFEDHFPGDSAAKCVPFGKSVACSTVEALAWDESFQNNADPSGRAAGVHNEAYED

SEQ ID NO: 144413 - DNA, 2086 bp, Phaseolus vulgaris
  CDS (148)..(1887)
tctacgtgttgtccgttccatgtctcactccttcatcttcgtttcttaaatcatttccttctttctccctttgtcttgtttttttctctttgcattctctctgttcttctttttctctcttcgtcgtagttcacatatcataacgcaatgtgtggcatacttgctgtgcttggttgctctgattcatcacaagccaagagggtccgcgtccttgagctttctcgcaggttgaagcaccgtggtcctgactggagtgggctccaccaatatggagactgctatttggctcatcaacgtttagccatagttgatccagcttctggtgatcaacctctcttcaatgaagacaaaactattgctgttacggtgaatggtgagatctacaatcatgaagaactcaggaaacaattgcctaatcacacgttccgtacaggaagtgactgtgatgttattgctcacctgtacgaggagcacggagaaaactttgtggacatgcttgatggtatattttcatttgttctgttggatacccgtgacaacagttttatagtggcacgtgatgctattggagtcacttccttatacattggttggggtctagatggctctgtctggatttcatcagaattgaaggggctaaatggtgattgtgaacatttcgagtcttttccacctggtcacttgtactctagcaaagagagggagtttcgtagatggtacaatcctccatggttctctgaggctattccttcagctccttatgaccctctagctttgaggcatgcctttgagaaggctgtgatcaaaaggttgatgactgatgtgccttttggtgttttactctctggaggtttggactcttcactggttgcagctgtcacggctcgctacctggaaggcacaaatgctgccaagcattggggaacaaaactacactctttctgtgtaggacttgagggtgcaccagacctaaaggctgcaagagaagtagcagattacataggaactgtacatcatgaatttcactattctgttcaggatggcatagatgccattgaagatgtgatctaccatattgaaacatatgatgtgactacaattagagcaagcattcccatgtttcttatgtcgcgtaagattaagtcactaggagtcaagtgggatatctgtggagaaggatctgatgagatctatggagggtatctatatttccacaaggcacccaacaaagaagagtttcaccaagaaacatgccgcaagattaaagcactccacaaatatgattgcttgcgagccaataaatcgacctttgcctggggtctagaagccagagtaccatttttggacaaagagtttatcgaagttgcaatgaacgttaatcctgagtacaaaatgataaaaaaagaagaagggagaattgagaaatgggtactgaggagggcatttgatgatggagagcatccttatctgccaaagcatattttatataggcagaaagaacaattcagtgatggagttggttatggttggattgatggccttaaaggacatgctgagaaacatgtgactgatagaatgatgctcaatgctgctaacattttccccttcaacactccaaccaccaaagaagcatactactatagaatgatatttgagaggttcttccctcaagactcagctagactcagtgttcctggagggccaagtgttgcatgtagcacagcaaaagctgttgagtgggatgctgcctggtctaacaaccttgatccatcaggtagagcagcacttggagtgcatgcatcagcttatggcaaccaggtcaaagctgtagaaccagagaagaccatacccaagatggaagtttctcccttaggagttgccatctagaggaagcatgagccatagcaaaggagtattagaaaactagttatcattaatcaaaattttgcctgctgtgtattttatccaggcaatgttatgtgttaagtgttgttatcttcttcttctctttactttcaattaatgtcacctcacactatcataatgtacttggtttccagcaaaaaaaaaaaaaaaaaaaaaaaaa

SEQ ID NO: 144414 - protein, 579 aa, Phaseolus vulgaris
MCGILAVLGCSDSSQAKRVRVLELSRRLKHRGPDWSGLHQYGDCYLAHQRLAIVDPASGDQPLFNEDKTIAVTVNGEIYNHEELRKQLPNHTFRTGSDCDVIAHLYEEHGENFVDMLDGIFSFVLLDTRDNSFIVARDAIGVTSLYIGWGLDGSVWISSELKGLNGDCEHFESFPPGHLYSSKEREFRRWYNPPWFSEAIPSAPYDPLALRHAFEKAVIKRLMTDVPFGVLLSGGLDSSLVAAVTARYLEGTNAAKHWGTKLHSFCVGLEGAPDLKAAREVADYIGTVHHEFHYSVQDGIDAIEDVIYHIETYDVTTIRASIPMFLMSRKIKSLGVKWDICGEGSDEIYGGYLYFHKAPNKEEFHQETCRKIKALHKYDCLRANKSTFAWGLEARVPFLDKEFIEVAMNVNPEYKMIKKEEGRIEKWVLRRAFDDGEHPYLPKHILYRQKEQFSDGVGYGWIDGLKGHAEKHVTDRMMLNAANIFPFNTPTTKEAYYYRMIFERFFPQDSARLSVPGGPSVACSTAKAVEWDAAWSNNLDPSGRAALGVHASAYGNQVKAVEPEKTIPKMEVSPLGVAI

SEQ ID NO: 144415 - DNA, 1850 bp, Helianthus annuus
  CDS (26)..(1702)
tggttttcattatctgccagccgccatgtgtggaatactcgccgttttcggttgtgtcgattgctctcaggctaaacgggccagaatccttgaactctcttcacggttgcgccatagaggtcccgactggagtgggctgcacagcgaagaagactgttatcttgctcatcagcgtttagcgatcgtcgaccctgcttctggagatcaaccgctttataatgaagacaaatcgatcatcgtcacagtgaacggggagatttacaaccataaagagtttagggaacaactgaagtctcataagttcaataccggaagcgactgtgaagtgatcgcccatctttatgaagaacatggagaagactttgtgcatatgttggatggaatgttctcctttgtgcttctcgacactcgcaataaaagttacatagcagcgagggacgcgatcgggatcactccactttacatcggttggggcctcgatggttcagtgtggtttgcatcggaaatgaaggcgttgagtgatgattgtgaacagtttatgtcgttccttcctgggcacatatattctagcaaaaacggtgggctgagacggtggtataaccccccatggtggtcagaactcgttccgtcaactccatatgatccccttgttctacgcaacgcgtttgagaaggctgtgattaaaagacttatgaccgatgtccccttcggtgttcttctttccggaggccttgattcgtctctcgttgccgctgttgcttcacgtcatctcgttgattcggaagcttattgccagtggggatcgcagttgcatactttttgcatcggattgaagggttctcctgatttggttgctgccagagaggtagctgattatcttggcactcgccaccatgagttctactttacggttcaggaaggaattgatgcgcttgaggaggtgatttaccatatcgaaacctatgatgtaaccaccattagagctagcacaccaatgtttctcatgtcgcgcaaaatcaagtctttgggtgtaaaaatggttctttccggtgaaggatcggatgaaatatttggtggttacttgtatttccacaaggctccaaacaaggaagagtttcatgaagaaacatgtagaaagatcaaggctcttcatttgtacgattgcttgagggcaaataagtccacatcagcatggggtcttgaggcgcgtgtgccttttctcgataaggagttcattaacgttgcaatgagcattgacccaaagtggaagatgattgaccgtgataatgggaggattgagaaatgggtgttgcgcaacgcgttcgatgatgacgagaagccgtatctgccaaagcatatattatacaggcaaaaggaacagttcagtgacggagttggatacagctggatcgatgggttgagggatcacgcaaacaaacaggttaccgattcgatgctagcaaatgcaaactttgtttatcctgaaaacacccctgcaactaaagaagcgtactactatcgcaaaatctttgaaaagttcttccccaagaatgctgcaaggttaacggttccagggggtccaagtgtggcatgcagcacggctaaggcggtagagtgggatgcatcgtggtccaaaaatcttgacccgtcgggccgagctgctcttggggttcatgcagcggcctacgaagacgccaagtgaatctggttaatgatggcagtcagtttagttgtttttggttcatctgtttggtgatgggaataagagtagaggaatgaaataaaaatgtgaaaatgattgtttcaaattccaaaatacctctcttatttttaaaaaaaaaaaaaaaaaa

SEQ ID NO: 144416 - protein, 558 aa, Helianthus annuus
MCGILAVFGCVDCSQAKRARILELSSRLRHRGPDWSGLHSEEDCYLAHQRLAIVDPASGDQPLYNEDKSIIVTVNGEIYNHKEFREQLKSHKFNTGSDCEVIAHLYEEHGEDFVHMLDGMFSFVLLDTRNKSYIAARDAIGITPLYIGWGLDGSVWFASEMKALSDDCEQFMSFLPGHIYSSKNGGLRRWYNPPWWSELVPSTPYDPLVLRNAFEKAVIKRLMTDVPFGVLLSGGLDSSLVAAVASRHLVDSEAYCQWGSQLHTFCIGLKGSPDLVAAREVADYLGTRHHEFYFTVQEGIDALEEVIYHIETYDVTTIRASTPMFLMSRKIKSLGVKMVLSGEGSDEIFGGYLYFHKAPNKEEFHEETCRKIKALHLYDCLRANKSTSAWGLEARVPFLDKEFINVAMSIDPKWKMIDRDNGRIEKWVLRNAFDDDEKPYLPKHILYRQKEQFSDGVGYSWIDGLRDHANKQVTDSMLANANFVYPENTPATKEAYYYRKIFEKFFPKNAARLTVPGGPSVACSTAKAVEWDASWSKNLDPSGRAALGVHAAAYEDAK

SEQ ID NO: 144417 - DNA, 1971 bp, Helianthus annuus
  CDS (22)..(1797)
cgacctcgttttacggcaatcatgtgtggaatacttgctgtcttgggttgctccgacgactctcaggccaaacgggtccgggtcctcgagctttctcgcagattgaagcatcggggacctgactggagcgggttgtaccagcacggtgataattatctttcgcatcagcgccttgctattatcgaccctgcttctggggatcaaccgctttttaacgaagatcagacgatcgttgtaacggtcaacggcgagatatacaaccacgaggagctccggaaaagattgaccgcagccggtcacaagttccgaaccggcagcgattgcgatgttatcgcgcatttatatgaagaacacggggaagatttcgtcgatatgctcgacggaatgttctcgtttgtgttgttggatacgcgcaacaacacgtacattgctgcccgtgatgctatcgggatcacatcgctctacatcggttggggactcgatggttctgtttggatatcatcagaactaaaaggtttaaatgatgattgtgaacattttgaggtgtttccaccgggacatttgtattccagcaaaacgggcgggtttaaacggtggtacaacccgctgtggtttgcggagactatcccgtctacaccttatgacccgcttgttcttcggtgcgcgtttgaaaatgctgtgattaagcggttgatgaccgatgtcccgtttggggttttgttatcgggagggctggactcgtcgctggtggcgtcgattactgctcgttacctggcgggtacgaaagcggctaagcagtggggagctcagctccattcgttttgtgtcgggcttgagggttcgccggatctcaaggcggcacgagaagtagccgattatttgggaaccgttcatcacgagttccacttcactgttcaggatggaattgatgcaatagaagatgtgatttaccatatcgagacatacgatgtgacgacaatccgggctagcacgcccatgttcctgatgtcgcgaaagatcaagtctctcggcgtgaagatggtcatctcgggtgaaggctcggacgagatctttggtgggtacttgtacttccacaaggcactcaacagggaagagttccatcaagaaacttgtcgcaagatcaaagcgcttcatcaatatgattgcttgagagcaaacaagtcgacatccgcgtgggggttggaagcccgagtcccctttttagacaaagagttcatcaatgtggccatgagcatcgacccggaagccaaaatgatcaacatggatcagaaacggatcgagaaatgggtacttagacgggcttttgaggacgaagagcatccgtatttaccaaagcatattttgtatagacaaaaagaacagtttagtgacggagttgggtatagctggatcgacgggctcaaagctcacgctgaactacacgtaacagacaagatgatgcttcatgccgaacacatcttccctcacaacacgccggtcacaaaagaagcctactattaccgaatgatctttgagcggcttttccctcagaattcggctaagttgaccgtcccgggtggagccagtatagcttgcagcaccgcaaaggccatcgagtgggacgcgtcttggtctaacaatctggacccctcaggcagggctgcacttggagcccataatgctgcttacaagaagaacatgggtccggtcggtcaagttaagttaggaccaaacattattgacaacgtgccacggatgatggatatctctgcttccgaactcgtgattcagggctagcggcttaccattgtataagttatctgtgtttgttattaagatatgttggttgttagttacttgttttgttttgagttatgtataactattaagtcaaatgtattgttatgtaagcattggcttttaaataaatttgttttttagtaaaaaaaaaaaaaaaaaaaaaaaaaaaaa

SEQ ID NO: 144418 - protein, 591 aa, Helianthus annuus
MCGILAVLGCSDDSQAKRVRVLELSRRLKHRGPDWSGLYQHGDNYLSHQRLAIIDPASGDQPLFNEDQTIVVTVNGEIYNHEELRKRLTAAGHKFRTGSDCDVIAHLYEEHGEDFVDMLDGMFSFVLLDTRNNTYIAARDAIGITSLYIGWGLDGSVWISSELKGLNDDCEHFEVFPPGHLYSSKTGGFKRWYNPLWFAETIPSTPYDPLVLRCAFENAVIKRLMTDVPFGVLLSGGLDSSLVASITARYLAGTKAAKQWGAQLHSFCVGLEGSPDLKAAREVADYLGTVHHEFHFTVQDGIDAIEDVIYHIETYDVTTIRASTPMFLMSRKIKSLGVKMVISGEGSDEIFGGYLYFHKALNREEFHQETCRKIKALHQYDCLRANKSTSAWGLEARVPFLDKEFINVAMSIDPEAKMINMDQKRIEKWVLRRAFEDEEHPYLPKHILYRQKEQFSDGVGYSWIDGLKAHAELHVTDKMMLHAEHIFPHNTPVTKEAYYYRMIFERLFPQNSAKLTVPGGASIACSTAKAIEWDASWSNNLDPSGRAALGAHNAAYKKNMGPVGQVKLGPNIIDNVPRMMDISASELVIQG

SEQ ID NO: 144419 - DNA, 2044 bp, Phaseolus vulgaris
  CDS (20)..(1774)
ctgccattaacacatcacaatgtgtggtattcttgctgttcttggttgttctgatcactctcgagccaaaagggttcgcgttctagagctctctcgcagattgaagcaccgtgggcctgattggagtgggctccatcaacatggtgactgctttttggcacatcaacgtttagccattgtagatccagcttctggggatcaacctctcttcaacgaggacaaatccgtcattgtcacggtaaatggagagatttacaaccatgaagaactcaggaaacagcttcctggtcacaagtttcgaactggaagtgactgtgatgttattgcacacttgtacgaggaacatggagaaggctttgtggacatgctggatggtatcttctcgtttgttcttctggatacccgtgacaacagttttatagtggctcgagatgctataggggtcacttccttgtacattggttggggattagatggctctgtttggatttcatctgaaatgaaaggcctgaatgatgattgtgaacattttgagtgttttccacctggtcacttgtactctagcaaagacagagggtttcgcagatggtacaaccctccttggttctctgaagctattccatctgccccttatgaccctctagttttgagacgtgcctttgagcaggcagtgataaaaaggttgatgactggtgtgcctttcggtgttctactttctggaggtttggactcttcactggtggcatccatcacttctcgctacttggccaacacaaaggctgctgagcagtggggatcaaagttacattcgttctgtgtaggacttgagggctcaccagatttaaaggctgcaaaagaagttgctgactatctaggcactgtccaccacgagtttcacttcactgttcaggatggaatagatgccattgaggatgttatataccatgtcgaaacttatgatgtgaccacaattagagcaagcacgcccatgtttctcatgtctcggaagattaaatcactaggtgtcaaatgggttatctccggagaaggatcagatgagatctttggagggtatctgtactttcacaaggcacccaacaaggaggagtttcacagagaaacatgccgcaagatcaaagcactccaccaatatgactgcttgcgagcgaataaatcaacatttgcttggggtctagaagcccgagtaccatttttggacaaggagtttatcaatgctgcaatgaacattgaccccgagcataaaatgataaaaagagatgaaggacgaattgagaagtggattctgaggagagcctttgatgatgaagaccagccttatctgccaaagcacattttatacaggcagaaagaacaattcagtgatggagttggctatagttggattgatggccttaaggctcatgctgcaaaacatgtgactgacaaaatgatgcttaatgctggtaacatctatccccacaacaccccagtaaccaaggaagcatactactatagaatgatctttgagaggttcttccctcagaactcagctaggctcactgttcctggaggagcaagtgttgcttgcagcacagccaaagctgttgaatgggatgctgcttggtctaacaaccttgacccttctggtagagcagcacttggagtgcacatttcagcttatgagaatcagaacaatttagccaacaaaggtgtagaaatagagaagattatacctatggatgctgctcctcttggtgttgccatccagagctaatatgaagctgcgactcagaataattgggcgagaatgaagatgattaagctaaacactgatgaaaaaaccccctgctgtgtaatttcacttggctaagcttgatatacaaggctttccaaagagtgttaagtgtagtactaccttgagttatgtgatttgaactcttaataagagtgtttattttctcagttatgcacgcaaaatccattatctcagtagtatagtggttaccgtatttaattgcaaaaaaaaaaaaaaaaaaaaaaaaaa

SEQ ID NO: 144420 - protein, 584 aa, Phaseolus vulgaris
MCGILAVLGCSDHSRAKRVRVLELSRRLKHRGPDWSGLHQHGDCFLAHQRLAIVDPASGDQPLFNEDKSVIVTVNGEIYNHEELRKQLPGHKFRTGSDCDVIAHLYEEHGEGFVDMLDGIFSFVLLDTRDNSFIVARDAIGVTSLYIGWGLDGSVWISSEMKGLNDDCEHFECFPPGHLYSSKDRGFRRWYNPPWFSEAIPSAPYDPLVLRRAFEQAVIKRLMTGVPFGVLLSGGLDSSLVASITSRYLANTKAAEQWGSKLHSFCVGLEGSPDLKAAKEVADYLGTVHHEFHFTVQDGIDAIEDVIYHVETYDVTTIRASTPMFLMSRKIKSLGVKWVISGEGSDEIFGGYLYFHKAPNKEEFHRETCRKIKALHQYDCLRANKSTFAWGLEARVPFLDKEFINAAMNIDPEHKMIKRDEGRIEKWILRRAFDDEDQPYLPKHILYRQKEQFSDGVGYSWIDGLKAHAAKHVTDKMMLNAGNIYPHNTPVTKEAYYYRMIFERFFPQNSARLTVPGGASVACSTAKAVEWDAAWSNNLDPSGRAALGVHISAYENQNNLANKGVEIEKIIPMDAAPLGVAIQS

SEQ ID NO: 144421 - DNA, 1845 bp, Bacillus subtilis
  CDS (1)..(1845): transl_table=11
atgtgtggaattacgggttgggtcgattttaaaaagcagctcgtccaggaaaaacaaacgatggacagaatgacagacactctttccaaacgagggcctgatgattcaaacgtttggggggagcaccatgttttattcggacataaaagacttgcggttgttgatattgaaggcggacgccagccgatggcgtgtacctataaaggcgatacgtacaccattatttacaatggcgagctttataacacggaagatttgcgcaaagaattgcgggcgcggggccatcaattcgagcgtacgtcagataccgaggtgcttctgcacagctacatcgagtggcaggaagactgtgtcgaccatctcaatggcatattcgctttcgctgtgtgggatgaaaagcgtaatctgttgtttgccgcgagagaccgtctcggtgtaaagccgtttttttacacgaaggaaggctcttcatttctcttcgggtcggaaatcaaagcaatcctcgcgcaccctgatataaaagcgcgagtggacagaacgggactttctgaaattttcggtcttggaccgtccagaaccccgggcactggcatatttaaaggcataaaagaaatccgcccggctcacgcgctgacattttccaaagacggacttaatatttggcgttattggaatgttgaaagcgaaaaacatacggacagttttgatgacacggttgccaatgtcagatcgttatttcaggacgcggtgacgcggcagcttgtgtcggatgtgcctgtttgcacattcctatcaggcggtctggactcaagcgcgattacagcgattgcggcgggccattttgaaaaggaaggaaaagcaccgcttcatacttattcgattgattacgaagagaacgataaatattttcaagcaagcgcttttcagccgaatgatgacggaccatggattgaaaaaatgacagaggctttcggcacaacgcaccacaaatgcgtcatcagccaaaaagacctcgttgatcatttggaggaagctgtactggtcaaagacttgccgggaatggcagatgtcgactcatccctgctgtggttttgccgggaaatcaaaaaggactttgtcgtcagcctatcgggagaatgcgcggatgagattttcggcgggtacccgtggttccatacggcagatgttgagtctggctttccatggatgagatcaacggaggagcggatcaagctgctttctgactcatggcagaaaaaattgaatctgaaagaatacgtaaatgccaaatatgaagaaaccttggcagaaacgccattattagacggagaaacgggtgtggataaagcaagaagacagctgttctatttaaatatgctttggtttatgacgaaccttttggatcggaaggatcgcatgagcatgggggcgagcctggaagtgcgggtgccgttcgccgatcaccggcttgtggaatatgtttggaatattccgtgggaaatgaaaatgcatgataatcgggaaaaaggcattttgcgcaaagcgcttgagggcattttgcctgatgacattttgtatcgcaaaaaaagcccatatccgaaaacacatcatccggaatatacaaaaggcgtcagcgagtggctgaaaacgatcagaagccaaaaggactccgtgctccataccttactggacagaaaacaattagatcagcttttagaaacggaaggctcctccttcaaggtcccgtggttcgggcagctcatgaaggggcctcagctgatcgcccatcttgctcaaattcatacatggtttgaagcgtatcgcattgatattgacgagaggtag

SEQ ID NO: 144422 - protein, 614 aa, Bacillus subtilis
MCGITGWVDFKKQLVQEKQTMDRMTDTLSKRGPDDSNVWGEHHVLFGHKRLAVVDIEGGRQPMACTYKGDTYTIIYNGELYNTEDLRKELRARGHQFERTSDTEVLLHSYIEWQEDCVDHLNGIFAFAVWDEKRNLLFAARDRLGVKPFFYTKEGSSFLFGSEIKAILAHPDIKARVDRTGLSEIFGLGPSRTPGTGIFKGIKEIRPAHALTFSKDGLNIWRYWNVESEKHTDSFDDTVANVRSLFQDAVTRQLVSDVPVCTFLSGGLDSSAITAIAAGHFEKEGKAPLHTYSIDYEENDKYFQASAFQPNDDGPWIEKMTEAFGTTHHKCVISQKDLVDHLEEAVLVKDLPGMADVDSSLLWFCREIKKDFVVSLSGECADEIFGGYPWFHTADVESGFPWMRSTEERIKLLSDSWQKKLNLKEYVNAKYEETLAETPLLDGETGVDKARRQLFYLNMLWFMTNLLDRKDRMSMGASLEVRVPFADHRLVEYVWNIPWEMKMHDNREKGILRKALEGILPDDILYRKKSPYPKTHHPEYTKGVSEWLKTIRSQKDSVLHTLLDRKQLDQLLETEGSSFKVPWFGQLMKGPQLIAHLAQIHTWFEAYRIDIDER

SEQ ID NO: 144423 - DNA, 2053 bp, Lotus japonicus
  CDS (99)..(1859)
atgtggtcttgttcttcgtttctttcttcaattctcttctccttcttctgattgtctccttctttctctttgattctatcttataagcatacacaacaatgtgtggtatacttgctgtacttggctgttctgatttcactcaagccaaaagggtccgcgtcctagagctttctcgcagattgaagcaccgtgggccagattggagtggactccaccaacatggtgactgctatttggcacaccaacggttagccatagttgatcctgcttctggagatcaacctctttttaatgaagacaaatctattatcgtcacggtaaatggagagatttacaaccatgaagagctcaggaagcagctgcctaatcaccagttcagaactggaagtgactgtgatgttattgcacacctgtatgaggaacatggagaaaactttatggacatgctggatgggatcttttcatttgttctactggacactcgggacaacactttcatagtggcccgggatgctataggagtcacttccctgtacattggttggggattagatgggtctgtttggatttcatcagaaatgaaaggcttgaatgatgattgtgaacattttgaggtctttccacctggtcacttgtactccagcagagaaagagcatttcgcagatggtacaaccctacttggttctctgagtctattccttcagctccttatgatcctctagctgtgagacacgcctttgagaaggcagtgataaaaaggttgatgactgatgtgccttttggagtgctgctatctggaggtttggactcatcattggttgcttccatcacttctcgctacttggcaaccacaaaagctgctgaacaatggggatcaaaattgcactcattctgtgtaggccttgagggttcacctgatctgaaggctgcaaaagaagttgcagactatcttggaactgtccaccatgagtttacctttactgttcaggatggaatagatgcaattgaggaagttatataccatgttgaaacatatgatgtgactacaattagagctagcacacccatgtttctcatgtctagaaagattaaatcacttggtgtcaaatgggtaatttctggagaaggatctgatgagatttttggtgggtacttgtacttccataaggcacctaacaaggaagagtttcacacagaaacatgccgcaagatcaaagcactccaccaatatgattgcttgcgagctaataaatcaacatttgcttggggtctagaagccagagtgccatttttggacaaggaatttatcaatgtcgcaatgaatattgatcccgagtataagatgattaaacgagacgaaggacgcattgagaagtatattctgaggagggcctttgatgatgaagagaaaccttatctgccaaagcacattctgtataggcagaaagaacaattcagtgatggagttggctatagttggattgatggccttaaagaccatgctgcaaaacatgttactgataaaatgattcttaatgctggtaatatcttccgccacaacaccccactaaccaaggaagcatattactacagaatgatctttgaaaggttcttcccacagaactcagctaggctaactgttcctggaggaccaactgttgcatgtagcacagcaaaggcagttgagtgggatgctgcttggtctaataaccttgatccttcaggtagagcagcactaggagtgcatctttcagcttatgatgacaaacagaacaacttgatcaacaacaaacctgtggaatttgagaagctcatacctatggaagctccttctcttggtgttgccatccacagttaaggtaagctgtggcaagaaatgatgatgatgatgatgatgatgaagctaagcatgaatggaaaatttgcctgctgtgtaattttatttgggcagtgctttatatagataaggtttccaaaaagtgttctatcctttattattctgaatgctgctatttgaagcgttgttttaatctatttggtttcaaaaaaaaa

SEQ ID NO: 144424 - protein, 586 aa, Lotus japonicus
MCGILAVLGCSDFTQAKRVRVLELSRRLKHRGPDWSGLHQHGDCYLAHQRLAIVDPASGDQPLFNEDKSIIVTVNGEIYNHEELRKQLPNHQFRTGSDCDVIAHLYEEHGENFMDMLDGIFSFVLLDTRDNTFIVARDAIGVTSLYIGWGLDGSVWISSEMKGLNDDCEHFEVFPPGHLYSSRERAFRRWYNPTWFSESIPSAPYDPLAVRHAFEKAVIKRLMTDVPFGVLLSGGLDSSLVASITSRYLATTKAAEQWGSKLHSFCVGLEGSPDLKAAKEVADYLGTVHHEFTFTVQDGIDAIEEVIYHVETYDVTTIRASTPMFLMSRKIKSLGVKWVISGEGSDEIFGGYLYFHKAPNKEEFHTETCRKIKALHQYDCLRANKSTFAWGLEARVPFLDKEFINVAMNIDPEYKMIKRDEGRIEKYILRRAFDDEEKPYLPKHILYRQKEQFSDGVGYSWIDGLKDHAAKHVTDKMILNAGNIFRHNTPLTKEAYYYRMIFERFFPQNSARLTVPGGPTVACSTAKAVEWDAAWSNNLDPSGRAALGVHLSAYDDKQNNLINNKPVEFEKLIPMEAPSLGVAIHS

SEQ ID NO: 144425 - DNA, 2200 bp, Pisum sativum
  CDS (94)..(1854)
ctacgtgttgcttcttccacactctttgctcctagtttttcgtgtcttgttttctttatcctcttctcattctctttggttcttcaaatcataatgtgtggcatacttgctgtacttggttgctctgatgattcacaagctaaacgagttcgcatactcgagctttctcgcagattgaagcaccgtgggccagactggagtgggctccaccaacatggtgataactatttggctcatcaaaggttagccattgttgatcctgcttctggtgatcaacctctcttcaatgaagacaaatcaattattgtcacggtgaatggagaaatctacaatcatgaagagctcagaaaacaattgcccaatcacaagttttttacacaatgtgactgtgatgttattgcacacctgtacgaggaacatggagaaaattttgtggatatgttagacggtatattttcgtttgttctgctggatactcgtgacaacagtttcatagttgcgagggatgctataggtgttacttccttgtacattggttggggactagatggttctgtttggattgcatcagaattgaaaggactgaatgatgaatgtgaacatttcgaagtttttccgcccggtcacttatactcgagcaaagaaagagagtttcgtcgatggtataatcctccatggttcaatgaggctattattccgtcaacaccttatgatcctctagttttgaggaacgcgtttgagaaggctgtgataaagaggttgatgaccgatgtgcctttcggggttttactatcgggaggtttggattcatcgttggtcgcgtctgtcactgctagataccttgctggtacaaaagctgctaagcagtggggagcaaaattgccctctttctgtgtaggccttaagggcgcacctgacctaaaggctggaaaggaggtagcagatttcttaggaactgtccatcatgaatttgagtttactatccaggacggtatagatgcaattgaagatgtcatctatcacacagaaacatatgatgttactacgataagggctgcaacacctatgtttctgatgtctcgtaagatcaaatcatccggagtcaaatgggtgatttctggagaaggatctgatgagatctttggagggtatttgtatttccataaggcgccaaacagggaagagtttcaccaagaaacatgccgcaagatcaaagctcttcatagatatgattgtttgagagccaataaatcaacatatgcatggggtctagaagctagagtaccatttttggacaaggactttatcaaggttgcaatggacattgatcctgagtttaaaatgataaaacatgatgaaggaagaattgagaaatggattctaagaaaggcctttgatgatgaagagaatccatatctgcctaagcacattttatataggcagaaggaacaattcagtgatggagttggatatggctggatagatggcatcaaggaccatgctgcaaaacatgtcactgacagaatgatgttcaatgcttctcacatctttcctttcaacactccaaataccaaagaagcatattactatagaatgatctttgaaaggtttttccctcagaactcggcaaggcttacagttcctggaggacctagtgttgcatgcagcacagagaaagctattgaatgggatgcttcatggtcaaacaacctggatccttctggtagagcagcacttggagtgcatgtttcagcttatgaacaccaaatcaacccagttacaaaaggtgtagagccagagaagattataccaaagataggagtttctcctcttggagttgccattcaaacctagtatgagacatagcaagtattacttgcttaaaaaaccaagatattattatactattagtattcaataaaaagaataacataaagggaaaatttgcctgttatgtattttatccaggtacaggtacatttgtatgtataagcctttctacttagctgtatttatgtgttttgatgttgtgtaatccacatcttgtctttgcttttaattgatgtggtgatttgaacactttcagattgtaatttggctttttaagaagagttgtgtattatgttaaatttgagtgcaagtttcactatttgaatactacttataaatatatgtctttacattaaaaaaaaaaaaaaaa

SEQ ID NO: 144426 - protein, 586 aa, Pisum sativum
MCGILAVLGCSDDSQAKRVRILELSRRLKHRGPDWSGLHQHGDNYLAHQRLAIVDPASGDQPLFNEDKSIIVTVNGEIYNHEELRKQLPNHKFFTQCDCDVIAHLYEEHGENFVDMLDGIFSFVLLDTRDNSFIVARDAIGVTSLYIGWGLDGSVWIASELKGLNDECEHFEVFPPGHLYSSKEREFRRWYNPPWFNEAIIPSTPYDPLVLRNAFEKAVIKRLMTDVPFGVLLSGGLDSSLVASVTARYLAGTKAAKQWGAKLPSFCVGLKGAPDLKAGKEVADFLGTVHHEFEFTIQDGIDAIEDVIYHTETYDVTTIRAATPMFLMSRKIKSSGVKWVISGEGSDEIFGGYLYFHKAPNREEFHQETCRKIKALHRYDCLRANKSTYAWGLEARVPFLDKDFIKVAMDIDPEFKMIKHDEGRIEKWILRKAFDDEENPYLPKHILYRQKEQFSDGVGYGWIDGIKDHAAKHVTDRMMFNASHIFPFNTPNTKEAYYYRMIFERFFPQNSARLTVPGGPSVACSTEKAIEWDASWSNNLDPSGRAALGVHVSAYEHQINPVTKGVEPEKIIPKIGVSPLGVAIQT

SEQ ID NO: 144427 - DNA, 2611 bp, Saccharomyces cerevisiae
  CDS (768)..(2486)
ttgttacattccttaagaatgacaaggacgcttttataaaattctgattcttttttctttcattcttttgttgtttttgacttgggagtagtcatctcatctgtacacaagtagctttttatatgttcttaaattgtagactagtcaaaacttgtgtcctttaaaccgtgccgaaacagtttaaagtggacatccagggaaacttgccgttaacaataagtgaccttgcatggaagactgtcgattggtctctgtggaaaccagtgcatatctaaattaaatctattgtcatcacgaatgccgcccgtgttcgtgcaacgtgagcgcaaatacgcctggggtctgtctttctgcgctggaaagcaccttcgggcatcaactaccgtttcttatcgctggcactatctatccaccaatcacacggcagcagtactgctgcgtggacggcaaattaggtacagggcctatgactgttatcatttggcaggctcagacagagagagagagcacaaggaaaagagccttaactcatgtaacatttgactcattctgtaaactgaaaatttgctgcccactcgagatgacaaatagttcgttcttgaatttatgcgcatttatagatacgcatatataaccctatagtgaacgccactaggagacagattctgtttggaccctgatcgcatactcttcttacctttacataataaaataagaaaaagtataacttgctttacgctaaggatataaatcggacgtaacttaagatgtgtggtattttcgccgctttcaggcacgaagacgtgcatagatataagccaaaggctctacaactatcaaaaagaatcagacaccgtggtccagattggtccggtaatgctatcaagaactccactatatttgttcatgaaagactagccattgtcggtgtggaatccggtgctcaaccaattacttcttcagacggagagtacatgctatgtgttaacggtgaaatctacaaccacattcaattaagagaagaatgcgcagactacgagtttggaacactgagtgactgtgagcctatcatcccaatgtacttaaagcacgatatcgacgctcctaagtacttggatggtatgtttgcttggactctttacgacgctaaacaagatcgtattgtggcagccagagacccaatcggtattacgacattatatatgggacgctcttccgcttctccaaagaccgtttattttgcatccgaactaaaatgtttgactgacgactgtgacactatcactgcattcccaccgggccacgtatacgattctaagactgacaagatcacccgttacttcacaccagattggctggacgaaaaacgcattccttccaccccaatagattacatggcaattagacactccttagaaaaagccgttagaaagagattaatggccgaagtcccatacggtgttctattgtcgggtggtttggactcctctttaatcgcttccattgctgcccgtgaaactgcaaaggccactaacgatgtcgaaccatcaacttacgatagtaaggcaagacatctagcaggtatcgacgatgacggtaagctacacactgctggttggacaagtctccattcctttgccatcggtttaccaaatgctccagatttgcaagccgcaagaaaggttgccaaattcatcggctctattcatcatgaacacacctttacattacaagaaggtttggatgctttggacgacgtgatctaccatttggaaacttacgacgttaccactatcagagcttccactccaatgttcttactatccagaaagattaaggcccaaggggtcaagatggttctttccggtgaaggttccgatgaaatcttcggtggttatctatatttcgcacaagctccttctgcggcagaatttcacactgaatccgtgcaacgtgtcaagaacttgcatttggcagattgtttgagagctaacaagtctacgatggcttggggtctagaagctcgtgttccattcttagacagagaatttttgcaattgtgtatgaacatcgatccaaatgaaaagatgattaaaccaaaggaaggacgtattgaaaagtacattctaaggaaggcattcgacaccacaggagaaccagatgctaagccatatttaccagaagaaattttatggagacaaaaagaacaattttccgacggtgttggttactcctggatcgacggattaaaagataccgccgaagcagtcatttcagatgaaatgtttgccagtccaaaggccgaatggggtagtgacattccaaccacaaaagaggctttctggtacagactaaaattcgatgctttgttccctcaaaagaccgtggctgacaccgttatgagatggattccaaaggccgactggggttgtgctgaagatccttctggtagatatgcccaaattcatgaaaaacatatcgaataaataacattaaaaaatagaaaaagaattatggattaatcttatagatatttttatagaaaaacaaacactaacaataataataataataaatagaatatagaaatacatatttttcataatagttt

SEQ ID NO: 144428 - protein, 572 aa, Saccharomyces cerevisiae
MCGIFAAFRHEDVHRYKPKALQLSKRIRHRGPDWSGNAIKNSTIFVHERLAIVGVESGAQPITSSDGEYMLCVNGEIYNHIQLREECADYEFGTLSDCEPIIPMYLKHDIDAPKYLDGMFAWTLYDAKQDRIVAARDPIGITTLYMGRSSASPKTVYFASELKCLTDDCDTITAFPPGHVYDSKTDKITRYFTPDWLDEKRIPSTPIDYMAIRHSLEKAVRKRLMAEVPYGVLLSGGLDSSLIASIAARETAKATNDVEPSTYDSKARHLAGIDDDGKLHTAGWTSLHSFAIGLPNAPDLQAARKVAKFIGSIHHEHTFTLQEGLDALDDVIYHLETYDVTTIRASTPMFLLSRKIKAQGVKMVLSGEGSDEIFGGYLYFAQAPSAAEFHTESVQRVKNLHLADCLRANKSTMAWGLEARVPFLDREFLQLCMNIDPNEKMIKPKEGRIEKYILRKAFDTTGEPDAKPYLPEEILWRQKEQFSDGVGYSWIDGLKDTAEAVISDEMFASPKAEWGSDIPTTKEAFWYRLKFDALFPQKTVADTVMRWIPKADWGCAEDPSGRYAQIHEKHIE

SEQ ID NO: 144429 - DNA, 2187 bp, Lotus japonicus
  CDS (145)..(1905)
cattctacgtgtcgccccttctttccactctgctccaatttcttcgtttctttgcttcttttctctctttatctaatccattttcttctctttttcaattccttttgtgagtattggcttcaaaagcttgaatattttatcacaatgtgtggcatacttgctgtgcttggttgttctgatgactctcaagccaaaagggttcgcgtccttgagctttctcgcagattgaagcaccgtggccctgactggagtgggctccaccaacatggtgataactttttggctcatcaacgtttagcaatagttgatccagcttctggtgatcaacctctcttcaatgaagatcaatctatcattgtcacggtgaatggagagatattcaatcatgaagaactcaggaaacaattgccaaatcacaagttcagaacaggatgtgactgtgatgtcattgcacacctgtatgaggagcatggagaaaactttgtggacatgctggatggtatattttcatttgttctgctggacacccgcgacaacagttttttagttgcaagggatgctataggggtcacttccttatacattggttatggactagatgggtccgtttggattgcatcagaattgaaagggctgaatgatgattgtgaacattttgagttatttccacccggtcacttgtactctagcaaggaaaaagagttccgtagatggtacaaccctccatggttctctgaggctattccatcagccccttatgatccactagctttgaggcaggcctttgaaaaggctatcataaaaaggttgatgactgatgtgccttttggagttctattgtctggaggtttggactcttcattggttgcatccgtcactgcccgctacctggcagacacaaaggctgccaagcaatggggatcaaaattacactcattctgtgtgggcctggagggagcaccagatctgaaggctgcaagagaagtagctgactatataggaactgtccatcacgagtttcaatatactattcaggatgggattgatgccattgaggatgtcatctatcatgttgaaacttatgatgtcacaaccatccgtgctggcactccaatgtttctgatgtcccgaaagatcaaatcattgggagtcaaaatggtactctctggagaaggatctgatgagatctttgcggggtatctgtacttccacaaggcacccaacaaagaagagctccaccaagaaacatgcagcaagatcaaagcactccacaaatatgattgtttgcgtgccaacaaatctacatatgcttggggtttggaagcgcgagtgccgtttttagataagaagtttatcgatgttgctatgggcattgatcctgaaaataaaatgataaaacgagacgaaggacgaattgagaaatgggtactgaggaaggcctttgatgatgaagagaatccttatcttcctaagcacattctgtataggcagaaagaacaattcagtgatggagttggctatggttggattgatgggctgaaagaccatgctgcaaaacatgtgactgataaaatgatgctcaatgcatctaacatttaccccttcaacactcccaataccaaagaagcctattattacaggatgatctttgagaggttctttcctcagaactcggccaggctcagtgttcctggaggagccagtattgcatgtagcacagagaaagctattgagtgggatgctgcatggtccaacaaccttgatccttctggaagagcagcacttggagtgcatgattcagcttatgacgaccagttgaataagtcagtgagcaaaggtgttgaaccagagaaaattatacccaagatggaagtttctcctcttggagttgccatcttgagctagtagtatgaaattttgcctgctgtttattttatccaggcaaatgctatatatgtatattgataaggcttctctcaacctagttgtctagagccagtttggatttctgttaatacgtgatccaaatagtgttcacctgaaagccaaaaatagttagaatgtgtactgagctcaggaatcttgtacacaaactatgagtgttatgttgctgtgatatctacatgttgtaatcatcttgagttgctgtaatttgaataatcataatgcattttctatgcaataaaa

SEQ ID NO: 144430 - protein, 586 aa, Lotus japonicus
MCGILAVLGCSDDSQAKRVRVLELSRRLKHRGPDWSGLHQHGDNFLAHQRLAIVDPASGDQPLFNEDQSIIVTVNGEIFNHEELRKQLPNHKFRTGCDCDVIAHLYEEHGENFVDMLDGIFSFVLLDTRDNSFLVARDAIGVTSLYIGYGLDGSVWIASELKGLNDDCEHFELFPPGHLYSSKEKEFRRWYNPPWFSEAIPSAPYDPLALRQAFEKAIIKRLMTDVPFGVLLSGGLDSSLVASVTARYLADTKAAKQWGSKLHSFCVGLEGAPDLKAAREVADYIGTVHHEFQYTIQDGIDAIEDVIYHVETYDVTTIRAGTPMFLMSRKIKSLGVKMVLSGEGSDEIFAGYLYFHKAPNKEELHQETCSKIKALHKYDCLRANKSTYAWGLEARVPFLDKKFIDVAMGIDPENKMIKRDEGRIEKWVLRKAFDDEENPYLPKHILYRQKEQFSDGVGYGWIDGLKDHAAKHVTDKMMLNASNIYPFNTPNTKEAYYYRMIFERFFPQNSARLSVPGGASIACSTEKAIEWDAAWSNNLDPSGRAALGVHDSAYDDQLNKSVSKGVEPEKIIPKMEVSPLGVAILS

SEQ ID NO: 144431 - DNA, 2002 bp, Pisum sativum
  CDS (102)..(1853)
ttccaaagccattattagtattacaactacatacatattttcttcttagtttattccaaattctgtctttgatttcattatcgtataaaacataaacaacaatgtgtggtatacttgctgttcttggttgttctgatccttctcgagccaagagagttcgtgtgttggaactttcacgcagattgaagcaccgaggccctgaatggagtgggctccaccaacatggtgattgttatttggcacaacaacggttagccatagttgatcctgcttctggtgatcaacctctcttcaatgaagacaatccgtcaattgtcacggtaaacggagagatttacaatcatgaagatctcaggaaacagttgtctaatcacacgtttaggaccggaagtgattgtgatgttattgcgcatttgtacgaggaatatggagaagactttgtggatatgttggatggtatattttcgtttgttccattggatactcgtgacaacagttatattgtggctagagatgcgattggtgtaacttctctatacattggttggggattagatggttcggtttggatttcgtcggaaatgaaaggtttgaacgatgattgtgaacatttcgagtgttttccacctggtcatttgtattcgagcaaagatagtggctttagaagatggtataatccttcttggtactctgaggctattccgtcggctccttatgatcctcttgctttgaggcacgccttcgagaaggcggtggtaaaaaggttgatgacagatgtacctttcggtgttctactatccggaggtttggactcgtcattggttgcatccatcacttctcgctacctagcaaccacgaaagcggctgaacaatggggatcaaaactacattcattctgcgttggactcgagggctcacctgatcttaaggctggaaaagaagttgcagattatctcggaaccgttcatcatgagtttacctttactgttcaggatggtatagatgcaattgaggatgttatataccatgttgaaacatatgatgttacttcaattagagcaagcacgcctatgtttctcatgtcgaggaagattaaatcacttggtgtcaaatgggtgatctccggtgaaggatccgatgagatctttggcggatatctgtactttcacaaggcaccgaacaaggaagagtttcacgaagaaacttgccgcaagatcaaagcactgcaccaatatgattgccagagagctaataaatcgacttatgcttggggtttagaagctagagttccgtttctggacaaggcgtttatcaatgttgcgatgaatattgatcctgagaataaaatgataaaacgagatgaaggacgaattgagaagtatattttgaggaaggcatttgatgacgaagagaatccttatctgccaaagcacattttgtataggcagaaagaacaattcagtgatggagttggttatagctggattgatggtcttaaagctcatgctgcaaaacatgtgaccgataaaatgatgcttaatgctggtaatatcttcccgcacaacacaccaaacacaaaggaagcatactactacagaatgatctttgagcggttcttccctcagaactcggcaagactaactgttcccggaggaccaacggttgcatgtagcacagcaaaagctgttgagtgggatgctgcttggtcaaacaacctcgatccttctggtagagcagcactcggagttcatgattcagcttatgaaaaccataacaaagtcaacaaaactgtagagtttgagaagattataccactggaagccgctcctgtcgagcttgccatccagggctagtttcagctatggcaaggaatgactgtgctagaagaatgaagataataattgaaaacttaacatatatgaagaatttgccttctgtttaattttatccggggcgaaacaatgctatataatatagataaagctttaaataaaaaaaaaaa

SEQ ID NO: 144432 - protein, 583 aa, Pisum sativum
MCGILAVLGCSDPSRAKRVRVLELSRRLKHRGPEWSGLHQHGDCYLAQQRLAIVDPASGDQPLFNEDNPSIVTVNGEIYNHEDLRKQLSNHTFRTGSDCDVIAHLYEEYGEDFVDMLDGIFSFVPLDTRDNSYIVARDAIGVTSLYIGWGLDGSVWISSEMKGLNDDCEHFECFPPGHLYSSKDSGFRRWYNPSWYSEAIPSAPYDPLALRHAFEKAVVKRLMTDVPFGVLLSGGLDSSLVASITSRYLATTKAAEQWGSKLHSFCVGLEGSPDLKAGKEVADYLGTVHHEFTFTVQDGIDAIEDVIYHVETYDVTSIRASTPMFLMSRKIKSLGVKWVISGEGSDEIFGGYLYFHKAPNKEEFHEETCRKIKALHQYDCQRANKSTYAWGLEARVPFLDKAFINVAMNIDPENKMIKRDEGRIEKYILRKAFDDEENPYLPKHILYRQKEQFSDGVGYSWIDGLKAHAAKHVTDKMMLNAGNIFPHNTPNTKEAYYYRMIFERFFPQNSARLTVPGGPTVACSTAKAVEWDAAWSNNLDPSGRAALGVHDSAYENHNKVNKTVEFEKIIPLEAAPVELAIQG

SEQ ID NO: 144433 - DNA, 1755 bp, Arabidopsis thaliana
  CDS (1)..(1755)
atgtgtggaatacttgccgtgttaggatgttccgatgattctcaggccaagagagttcgtgttcttgagctttctcgcagattgaggcacagaggacctgactggagtggcttatatcagaacggagataattacttggcccatcaacgtcttgccgtcatcgatcctgcttccggtgatcaacctcttttcaacgaggacaagaccattgttgtcacggtgaacggagagatttataaccatgaggagctgagaaaacgtctgaagaatcacaagttccgtactggtagtgattgtgaagtcattgctcacttgtacgaggagtatggtgtggattttgttgatatgttggatggaatattctcctttgtgttgctcgacacacgagataactctttcatggtggctcgtgatgcgattggtgtcacttcgctctacattggttggggactagacggatctgtgtggatatcttcagagatgaaaggcctaaacgatgactgtgagcatttcgaaacgtttcctccaggtcatttttattcaagcaaattaggagggtttaagcaatggtataatcctccttggttcaatgaatctgttccttcaacgccttatgagcctcttgcgataagacgcgcctttgaaaacgctgtgattaagcggttgatgactgatgttccatttggagttttgctctctggtggtcttgattcttcccttgttgcctccatcactgcacgtcacttggccggtactaaggcggctaagcaatggggtcctcagctccattccttttgcgttggtcttgagggctcaccggacttgaaggcagggaaagaggtggcggaatatttggggacggtgcaccacgagttccacttctcggtgcaggacgggattgatgcgatagaggatgtgatttaccatgttgagacctatgatgtgacgactatcagagcgagcacaccgatgttcttgatgtcccggaaaatcaagtctctaggggtcaagatggttctctccggcgaaggtgcggacgagatctttggagggtacctctatttccacaaggcacctaacaagaaagagtttcaccaagaaacttgtcgcaagatcaaggctcttcacaagtatgactgtctaagagccaacaaatctacctctgcctttggactagaggcacgtgttcctttccttgacaaagacttcatcaacacagctatgtctctcgaccctgaatccaagatgatcaagccagaggaaggaaggatcgagaaatgggttctaaggagagcctttgacgacgaagaacgtccttatctaccaaaacacattctctacagacagaaagaacagttcagtgatggtgttggctacagttggatcgatggcctgaaagatcacgctgctcaaaatgtcaatgacaagatgatgtcgaacgcggggcatatcttccctcacaacactccaaacactaaagaagcttactactacagaatgatctttgaaaggttcttcccgcagaactctgcgagactaacggttcctggaggtgccaccgtggcttgttcgactgcaaaggcagtggagtgggatgcaagctggtccaacaatatggatccatcaggaagagccgctatcggagttcacctttcggcctacgatggcaagaacgtggcattgaccataccaccacttaaggcaattgacaacatgccgatgatgatgggtcaaggagttgtgattcagtcataa

SEQ ID NO: 144434 - protein, 584 aa, Arabidopsis thaliana
MCGILAVLGCSDDSQAKRVRVLELSRRLRHRGPDWSGLYQNGDNYLAHQRLAVIDPASGDQPLFNEDKTIVVTVNGEIYNHEELRKRLKNHKFRTGSDCEVIAHLYEEYGVDFVDMLDGIFSFVLLDTRDNSFMVARDAIGVTSLYIGWGLDGSVWISSEMKGLNDDCEHFETFPPGHFYSSKLGGFKQWYNPPWFNESVPSTPYEPLAIRRAFENAVIKRLMTDVPFGVLLSGGLDSSLVASITARHLAGTKAAKQWGPQLHSFCVGLEGSPDLKAGKEVAEYLGTVHHEFHFSVQDGIDAIEDVIYHVETYDVTTIRASTPMFLMSRKIKSLGVKMVLSGEGADEIFGGYLYFHKAPNKKEFHQETCRKIKALHKYDCLRANKSTSAFGLEARVPFLDKDFINTAMSLDPESKMIKPEEGRIEKWVLRRAFDDEERPYLPKHILYRQKEQFSDGVGYSWIDGLKDHAAQNVNDKMMSNAGHIFPHNTPNTKEAYYYRMIFERFFPQNSARLTVPGGATVACSTAKAVEWDASWSNNMDPSGRAAIGVHLSAYDGKNVALTIPPLKAIDNMPMMMGQGVVIQS

SEQ ID NO: 144435 - DNA, 1978 bp, Asparagus officinalis
  CDS (56)..(1828)
tctgcttgcaccttttgagagagagggagagagagagagagagagagagaggatcatgtgtgggatacttgcagtgctcggttgctccgatgactctcaggcgaagagggttcgagttctcgagctctctcgcaggttgaagcacaggggcccagattggagcgggctttgccaacatggagattgtttcttgtctcatcagagattggcgatcattgatcccgcctctggtgatcaacccctgtacaacgaggacaagtccatcgttgtcacggtaaacggagagatttacaaccacgaagagctaaggcgacgcctgcctgatcataaatacagaactggaagcgactgtgaagtcatcgctcatctgtatgaggaacacggagaagatttcgtcgatatgttggatggaatgttctccttcgttctattggacacccgaaacaattgcttcgttgcggcaagggatgcagtgggaataacccccctctacattggctggggattagacggctctgtttggctctcgtcggaaatgaaaggattaaacgatgactgcgaacattttgaagtatttccacctggaaacctgtactcaagcagatcaggcagcttcagaagatggtataatcctcagtggtacaatgagactatcccttcggccccctatgatcctcttgttctgaggaaagcttttgaggatgctgttataaagaggctgatgactgatgtgccatttggggttctgttatctggtggcctcgattcctcgttggtcgccgctgttactgctcggcatcttgcaggaagtaaagctgcagagcaatggggaactcagctccattctttctgtgttggcttagagggatcaccagatctcaaggctgcaaaagaggttgcagagtatctgggtactgtccaccatgagtttcacttcacagttcaggatggaattgatgccattgaggatgtaatcttccacattgaaacgtacgatgtgacaacaatcagggcaagcactccaatgttcctcatggccagaaaaatcaagtccttaggagtaaaaatggtgatctcaggcgaaggctcggatgaaatctttggcgggtacttgtattttcacaaagcacctaacaaagaagaattccatcacgaaacatgtcgaaagatcaaagctctgcatcagtatgactgcctcagagccaacaaagcaacatcagcatgggggctggaagctcgagtgccatttttagacaaggagttcatggatgttgctatgagtatagatcctgaatcgaaaatgattaagcctgatctcgggaggatcgagaagtgggtactgaggaaagcttttgatgatgaagagaatccctatcttccaaagcatattctctataggcaaaaggagcagttcagtgatggtgttggatatagttggattgatgggctgaaggctcatgctgcaaaacatgtaactgatagaatgatgctgaatgcagcacgtatttacccccacaacacaccaaccacaaaagaggcttattactacagaatgatctttgaaaggttcttccctcagaactcggcgagatttactgtccctggaggtccaagcattgcttgcagcacggcgaaggctatcgaatgggacgctcgctggtcgaacaatttggatccgtcggggagagcagctctcggcgtccatgactctgcctacgatcctcctcttccttcttcgatttctgcaggaaaaggagctgcaatgatcactaacaagaagccgaggattgtggatgtagcaactccgggagttgttattagtacctgatgttggtttggtttggtttggttttgatgtacaagttaaaataaatgtgtggggcgttgtattttggatggagggtactaaagcgtgtaatttgctgaaaaaaaaaaaaaaaaaaaaaaaaaaaaaaaaaaaaaaaaaaaaaaaaaaaaa

SEQ ID NO: 144436 - protein, 590 aa, Asparagus officinalis
MCGILAVLGCSDDSQAKRVRVLELSRRLKHRGPDWSGLCQHGDCFLSHQRLAIIDPASGDQPLYNEDKSIVVTVNGEIYNHEELRRRLPDHKYRTGSDCEVIAHLYEEHGEDFVDMLDGMFSFVLLDTRNNCFVAARDAVGITPLYIGWGLDGSVWLSSEMKGLNDDCEHFEVFPPGNLYSSRSGSFRRWYNPQWYNETIPSAPYDPLVLRKAFEDAVIKRLMTDVPFGVLLSGGLDSSLVAAVTARHLAGSKAAEQWGTQLHSFCVGLEGSPDLKAAKEVAEYLGTVHHEFHFTVQDGIDAIEDVIFHIETYDVTTIRASTPMFLMARKIKSLGVKMVISGEGSDEIFGGYLYFHKAPNKEEFHHETCRKIKALHQYDCLRANKATSAWGLEARVPFLDKEFMDVAMSIDPESKMIKPDLGRIEKWVLRKAFDDEENPYLPKHILYRQKEQFSDGVGYSWIDGLKAHAAKHVTDRMMLNAARIYPHNTPTTKEAYYYRMIFERFFPQNSARFTVPGGPSIACSTAKAIEWDARWSNNLDPSGRAALGVHDSAYDPPLPSSISAGKGAAMITNKKPRIVDVATPGVVIST

SEQ ID NO: 144437 - DNA, 2085 bp, Brassica oleracea
  CDS (33)..(1793)
caagaatattactttgcgattaaataagaaaaatgtgtggaattcttgccgttttaggatgctccgacgattctcaggccaagagagttcgcgttcttgagctttctcgcagattgaggcacagaggacctgattggagcggaatatatcagaacgggttcaattacttggcccatcaacgtcttgctatcatcgatcctgattccggtgatcaacctctctttaacgaggacaagtccattgttgtcacggtgaacggagagatttataaccatgaggagctgagaaagggtttgaagaatcacaagttccacaccggtagtgattgtgacgtcatagctcacctgtacgaggagcatggtgagaattttgtggacatgttggatggaatcttctcctttgtgttgctggacacaagagataactcattcatggttgctcgtgacgcggttggtgtcacttcgctctacattggttggggattagatggatctctgtgggtctcttccgagatgaaaggcttacacgaagattgtgagcatttcgaagcctttcctccaggtcatttgtattcaagcaaatcaggaggagggtttaagcaatggtacaatcctccttggttcaatgaatctgttccttctacgccttatgagcctctcgcaattagaagcgcctttgaagacgctgtgataaagcggttgatgactgatgtcccatttggagttttgctatctggtggtcttgattcttctcttgttgcatccatcactgcccgtcacttggccggtactaaggccgctaagcgatggggtcctcagctccattccttttgtgtcggtcttgagggctcgccggacttgaaggcggggaaagaagtggcggagtatttggggacggtgcaccatgagttccatttcacggtgcaagacgggattgatgcgattgaggatgtgatctaccatgtcgagacatatgatgtgacgacaattagagctagcacacccatgttcttgatgtccaggaaaatcaagtctctaggtgttaagatggttctttccggtgaaggttctgatgagatctttggagggtatctttacttccacaaggcacctaacaagcaagaatttcaccaagaaacttgtcgcaagatcaaggctcttcacaaatacgattgtttaagagccaacaaagctacctctgcttttggtctggaggcgcgtgttccttttctggacaaggagtttatcaacaccgctatgtctctcgaccctgaatccaagatgatcaaaccagaggaagggaggatcgagaagtgggttctaaggagagcctttgatgatgaagaacgtccttatttgccaaaacacattctctacagacagaaagagcagtttagtgatggtgttggctacagctggatcgatggcctcaaagcccacgctgctgaaaatgttaatgacaagatgatgtcgaaagctgcttttatcttccctcacaacaccccactcaccaaagaagcatactattacagaatgatctttgagaggttcttcccacagaactcggcaaggctaactgttcccggaggtgcgaccgtggcttgctcgaccgcaaaagcggtggagtgggatgcaagctggtccaacaatatggatccatctggaagagctgcgattggagttcacctctcggcctacgacggcagcaaagtggcattgcccttgccggcgccacataaggcaatcgacgacatcccaatgatgatgggacaagaagttgtgattcagacatgagtttgaaggatatataggggaattggagttctttaaagttgtcctaatgggtttaagtgtttttgtatgatttcaaaataaaattggtttcgtgttcttagggaaatatgaatgcataaattatttttcttgtactattagtaaatattcgaatgtactgtttctgcaaaatcgatgtacatcaatcttattataattatatgtattgtaatatgatatgaaaaatgtgattttgcttgttttcacaaaaaaaaaaaaaaaaaaaaaaaaaaaaaaaaaaaaaaaaaaaaaa

SEQ ID NO: 144438 - protein, 586 aa, Brassica oleracea
MCGILAVLGCSDDSQAKRVRVLELSRRLRHRGPDWSGIYQNGFNYLAHQRLAIIDPDSGDQPLFNEDKSIVVTVNGEIYNHEELRKGLKNHKFHTGSDCDVIAHLYEEHGENFVDMLDGIFSFVLLDTRDNSFMVARDAVGVTSLYIGWGLDGSLWVSSEMKGLHEDCEHFEAFPPGHLYSSKSGGGFKQWYNPPWFNESVPSTPYEPLAIRSAFEDAVIKRLMTDVPFGVLLSGGLDSSLVASITARHLAGTKAAKRWGPQLHSFCVGLEGSPDLKAGKEVAEYLGTVHHEFHFTVQDGIDAIEDVIYHVETYDVTTIRASTPMFLMSRKIKSLGVKMVLSGEGSDEIFGGYLYFHKAPNKQEFHQETCRKIKALHKYDCLRANKATSAFGLEARVPFLDKEFINTAMSLDPESKMIKPEEGRIEKWVLRRAFDDEERPYLPKHILYRQKEQFSDGVGYSWIDGLKAHAAENVNDKMMSKAAFIFPHNTPLTKEAYYYRMIFERFFPQNSARLTVPGGATVACSTAKAVEWDASWSNNMDPSGRAAIGVHLSAYDGSKVALPLPAPHKAIDDIPMMMGQEVVIQT

SEQ ID NO: 144439 - DNA, 2135 bp, Zea mays
  CDS (1)..(1761)
atgtgtgggattctggcggtgctgggcgtcgttgaggtctccctcgccaagcgctcccgcatcattgagctctcgcgcaggttacggcaccgagggcctgattggagtggtttgcactgtcatgaggattgttaccttgcacaccagcggttggctattatcgatcctacatctggagaccagcctttgtacaatgaggataaaacagttgttgtaacggtgaacggcgaaatttacaatcatgaagaattgaaagctaagttgaaaactcatgagttccaaactggcagtgattgtgaagttatagcccatctttacgaagaatatggcgaagaatttgtggatatgttggatggaatgttctcctttgttcttcttgatacacgtgataaaagcttcatcgcagctcgtgatgctattggcatctgccctttatacatgggatggggtcttgatggatcagtctggttttcttcagagatgaaggcattgagtgatgattgtgaacgcttcataacatttcccccagggcatctctactccagcaagacaggtggtctaaggagatggtacaacccaccatggttttcagagactgtcccttcaaccccttacaatgctctcttcctccgggagatgtttgagaaggctgttattaagaggctgatgactgatgtgccatttggtgtgcttttatctggtggactcgactcttctttggttgcatctgttgcttcgcggcacttaaacgaaacaaaggttgacaggcagtggggaaataaattgcatactttctgtataggcttgaagggttctcctgatcttaaagctgctagagaagttgctgattacctcagcactgtacatcatgagttccacttcacagtgcaggaggggattgatgccttggaagaagtcatctaccatattgagacatatgatgttacaacaatcagagcaagtaccccaatgtttttgatgtcacgcaaaatcaaatctttgggtgtgaagatggttatttctggcgaaggttcagatgaaatttttggtggttacctttattttcacaaggcaccaaacaagaaagaattcctagaggaaacatgtcggaagataaaagcactacatctgtatgactgcttgagagctaacaaagcaacttctgcctggggtgttgaggctcgtgttccattccttgacaaaagtttcatcagtgtagcaatggacattgatcctgaatggaacatgataaaacgtgacctcggtcgaattgagaagtgggtcatgaggaaggcgttcgacgacgacgagcacccttacctgcccaagcatattctctacaggcagaaagaacagttcagtgacggcgttggctacaactggatcgatggcctcaaatccttcactgaacagcaggtgacggatgagatgatgaacaacgccgcccagatgttcccctacaacacgcccgtcaacaaggaggcctactactaccggatgatattcgagaggctcttccctcaggactcggcgagggagacggtgccgtggggcccgagcatcgcctgcagcacgcccgcggccatcgagtgggtggagcagtggaaggcctccaacgacccctccggccgcttcatctcctcccacgactccgccgccaccgaccacacggcggtaagccggcggtggccaacggcggcggcacggccggcgaacggcacggtcaacggcaaggacgtgccagtgccgatcgcggtctgacgagagtacgtgctcgcgcacctccctgctagcttctaccgggctgcagcctgcagcatgcactgtgcgagcacagccgatcagcgccaataaactggaggataagaacgactggtagctgtgtgtgtgtgtgtcgtgcgtgcccaccggccatatcccggtgcggcagcacgtgctattgttacgtgttgtactgccaccagcgtacgtgtctgtgtgtctcgatcatatctgtacgtttttagatttagaagagaaaaaaaaagtatgcccgtgtctgtatgtctggatcatatctgtacgttcttagatttagaagaaagaagaaaaagaatatatacgtgtctctatgtcaaaaaaaaaaaaaaaaaaaa

SEQ ID NO: 144440 - protein, 586 aa, Zea mays
MCGILAVLGVVEVSLAKRSRIIELSRRLRHRGPDWSGLHCHEDCYLAHQRLAIIDPTSGDQPLYNEDKTVVVTVNGEIYNHEELKAKLKTHEFQTGSDCEVIAHLYEEYGEEFVDMLDGMFSFVLLDTRDKSFIAARDAIGICPLYMGWGLDGSVWFSSEMKALSDDCERFITFPPGHLYSSKTGGLRRWYNPPWFSETVPSTPYNALFLREMFEKAVIKRLMTDVPFGVLLSGGLDSSLVASVASRHLNETKVDRQWGNKLHTFCIGLKGSPDLKAAREVADYLSTVHHEFHFTVQEGIDALEEVIYHIETYDVTTIRASTPMFLMSRKIKSLGVKMVISGEGSDEIFGGYLYFHKAPNKKEFLEETCRKIKALHLYDCLRANKATSAWGVEARVPFLDKSFISVAMDIDPEWNMIKRDLGRIEKWVMRKAFDDDEHPYLPKHILYRQKEQFSDGVGYNWIDGLKSFTEQQVTDEMMNNAAQMFPYNTPVNKEAYYYRMIFERLFPQDSARETVPWGPSIACSTPAAIEWVEQWKASNDPSGRFISSHDSAATDHTAVSRRWPTAAARPANGTVNGKDVPVPIAV

SEQ ID NO: 144441 - DNA, 1776 bp, Oryza sativa subsp
  CDS (1)..(1776)
atgtgtggcatcctcgccgtgctcggcgtcgcagacgtctccctcgccaagcgctcccgcatcatcgagctatcccgccggttacgtcatagaggccctgattggagtggtatacactgctatcaggattgctatcttgcacaccagcggttggctattgttgatcccacatccggagaccagccgttgtacaatgaggacaaatctgttgttgtgacggtgaatggagagatctataaccatgaagaattgaaagctaacctgaaatctcataaattccaaactgctagcgattgtgaagttattgctcatctgtatgaggaatatggggaggaatttgtggatatgttggatgggatgttcgcttttgttcttcttgacacacgtgataaaagcttcattgcagcccgtgatgctattggcatttgtcctttatacatgggctggggtcttgatggttcggtttggttttcgtcagagatgaaggcattaagtgatgattgcgagcgattcatatccttcccccctgggcacttgtactccagcaaaacaggtggcctaaggagatggtacaacccaccatggttttctgaaagcattccctccaccccgtacaatcctcttcttctccgacagagctttgagaaggctattattaagaggctaatgacagatgtgccatttggtgttctcttgtctggtggactggactcttctttggttgcatctgttgtttcgcggcacttggcagaggcaaaagttgccgcacagtggggaaacaaactgcatacattttgcattggtttgaaaggttctcctgatcttagagctgctaaggaagttgcagactaccttggtactgttcatcacgaactccacttcacagtgcaggaaggcattgatgcactggaggaagtcatttaccatgttgagacatatgatgtaacgacaattagagcaagcaccccaatgttcttgatgtcacgtaaaattaaatctttgggggtgaagatggttctttcgggagaaggttctgatgaaatatttggcggttacctttattttcacaaggcaccaaacaagaaggaattccatgaggaaacatgtcggaagataaaagcccttcatttatatgattgcttgagagcgaacaaatcaacttctgcatggggtgttgaggcccgtgttccgttccttgacaaaaacttcatcaatgtagctatggacattgatcctgaatggaaaatgataaaacgtgatcttggccgtattgagaaatgggttctccggaatgcatttgatgatgaggagaagccctatttacctaagcacattctatacaggcaaaaggagcaattcagtgatggtgttgggtacagttggattgatggattgaaggatcatgcaaatgaacatgtatcagattccatgatgatgaacgctagctttgtttacccagaaaacactccagttacaaaagaagcgtactattataggacaatattcgagaaattctttcccaagaatgctgctaggttgacagtacctggaggtcctagcgtcgcgtgcagcactgctaaagctgttgaatgggacgcagcctggtccaaaaaccttgatccatctggtcgtgctgctcttggtgttcatgatgctgcatatgaagatactctacaaaaatctcctgcctctgccaatcctgtcttggataacggctttggtccagcccttggggaaagcatggtcaaaaccgttgcttcagccactgccgtttaa

SEQ ID NO: 144442 - protein, 591 aa, Oryza sativa subsp
MCGILAVLGVADVSLAKRSRIIELSRRLRHRGPDWSGIHCYQDCYLAHQRLAIVDPTSGDQPLYNEDKSVVVTVNGEIYNHEELKANLKSHKFQTASDCEVIAHLYEEYGEEFVDMLDGMFAFVLLDTRDKSFIAARDAIGICPLYMGWGLDGSVWFSSEMKALSDDCERFISFPPGHLYSSKTGGLRRWYNPPWFSESIPSTPYNPLLLRQSFEKAIIKRLMTDVPFGVLLSGGLDSSLVASVVSRHLAEAKVAAQWGNKLHTFCIGLKGSPDLRAAKEVADYLGTVHHELHFTVQEGIDALEEVIYHVETYDVTTIRASTPMFLMSRKIKSLGVKMVLSGEGSDEIFGGYLYFHKAPNKKEFHEETCRKIKALHLYDCLRANKSTSAWGVEARVPFLDKNFINVAMDIDPEWKMIKRDLGRIEKWVLRNAFDDEEKPYLPKHILYRQKEQFSDGVGYSWIDGLKDHANEHVSDSMMMNASFVYPENTPVTKEAYYYRTIFEKFFPKNAARLTVPGGPSVACSTAKAVEWDAAWSKNLDPSGRAALGVHDAAYEDTLQKSPASANPVLDNGFGPALGESMVKTVASATAV

SEQ ID NO: 144443 - DNA, 2121 bp, Sandersonia aurantiaca
  CDS (43)..(1620)
cctccctatctccattttctacatcctattcagccagagatcatgtgtgggatactagcagtccttggttgctctgatgattctcaagcgaagagggttcgagttcttgagctctctcgcaggctgaaacatcgggggcctgattggagtggtctggatcatcatggcgactgctatttagcacatcaaaggctagctatcattgatccggcgtcaggagatcaacccctctacaatgaggataagacgatcattgtgacggtgaatggagaaatttacaaccatgaagaactgaggaaaggcctgcctggccatacttttaggacagggagtgactgtgaagttattgctcatctgtatgaagaacatggagaaagcttcatacatatgcttgatgggatattctcatttgtgctgttggatagtcggaacaatagctttgtcgctgctcgggatgcaattggtgttacacctttatacattggctggggactcgatggctctgtatggatatcttctgaaatgaaaggattgaatgatgattgtgagcattttaagttctttccgcctgggcatttgtattcgagcaaggaaggcagctttaaaaggtggtataacccaccctggttctcagaggtcattccttcagttccatttgatccccttgctctcaggaaggcatttgaagatgctgtcattaaaaggctcatgacagatgtaccatttggagtcctgttatctggtggccttgattcatcattagttgcatctgtcacagctcgttatttagaaggaactaaagctgcagagctatggggaactcagctccattcattttgtgttggcttagagggttcaccagacctaaaagccgcaaaggaggttgccaattttctgggaactatccaccatgaattccatttcacagttcaggatggaattgatgccatagaggatgtaatctaccacgttgaaacttatgatgtaactacaatcagggcaagtacacccatgttcctcatgtcacgtaagatcaagtcactaggagtgaagatggtcatttctggtgagggctcagatgagatttttggaggatatttgtatttccacaaagctcctaataaggaagagctccatctagagacatgtcacaagataaaagctctccaccagtatgattgtttaagagcgaataaagcgacctcggcgtgggggttggaagcgcgtgtgccatttctggataaagaatttgttaatgttgcaatgagtattgatcctgaatggaaaatgataaaaccagatattgggcgaattgagaaatggatattgaggagggctttcgatgatgaggaaaacccctacctaccaaagcatatactctacaggcagaaagaacagtttagtgatggagttggctacagctggattgatggacttaaggctcattcagccctacatgtgacagataaaatgatgctgaatgcagcacatatttatccccacaatacacctaccacgaaagaggcttattactacagaatgatctttgaaagattctttccacagattgacagtccctggaggtccaagtgtggcttgcagcacagcaaaagctattgaatgggactctcagtggtcaaacaaccttgatccctcaggcagggcagctctaggtgtccatgtttcagcttatgactcagacctgcatgcttctcttgcaacgggaaatgaccctgttgagattatcgataaggagcggaagaattattgaagttgcagctactgagctcactgtcagtacgtaaatgtccttgtagatatgcatagtttccgtgttctacttgttgtattgagcatatggtgttagtctaagatatgctactattacttttagtgtcttctagatatgcttcaatttagctaccaagatgcatggcagttcttacaatgttcttgaagatttgcttgagttcagtttactagttgtattgtgcttatgatgtttgtataatcctatatcattttacaactacatcactgtgttgtactggaatgaaagagttggtaatgtaattgaattgagctattatatggctttgtttgcttaaaaaaaaaaaaaaa

SEQ ID NO: 144444 - protein, 525 aa, Sandersonia aurantiaca
MCGILAVLGCSDDSQAKRVRVLELSRRLKHRGPDWSGLDHHGDCYLAHQRLAIIDPASGDQPLYNEDKTIIVTVNGEIYNHEELRKGLPGHTFRTGSDCEVIAHLYEEHGESFIHMLDGIFSFVLLDSRNNSFVAARDAIGVTPLYIGWGLDGSVWISSEMKGLNDDCEHFKFFPPGHLYSSKEGSFKRWYNPPWFSEVIPSVPFDPLALRKAFEDAVIKRLMTDVPFGVLLSGGLDSSLVASVTARYLEGTKAAELWGTQLHSFCVGLEGSPDLKAAKEVANFLGTIHHEFHFTVQDGIDAIEDVIYHVETYDVTTIRASTPMFLMSRKIKSLGVKMVISGEGSDEIFGGYLYFHKAPNKEELHLETCHKIKALHQYDCLRANKATSAWGLEARVPFLDKEFVNVAMSIDPEWKMIKPDIGRIEKWILRRAFDDEENPYLPKHILYRQKEQFSDGVGYSWIDGLKAHSALHVTDKMMLNAAHIYPHNTPTTKEAYYYRMIFERFFPQIDSPWRSKCGLQHSKSY

SEQ ID NO: 144445 - DNA, 1674 bp, Schizosaccharomyces pombe
  CDS (1)..(1674)
atgtgtggtattcttgctgttcatcacgtcgccgaagatattgaggctttcaagcccaaggctcttcatttgtcgaaacaacttcgtcaccgtggtcctgactggtctggtaaggctattcgcaaccaaactattctttgccatgagcgtcttgctattgtcggtgttgaaagtggtgctcaacctcttgtatctgacgatggtaaacttgtccttactgtcaacggtgaaatctataaccatcttaagcttcgcgaaaacttaaagggtaactataaattcaagacttactccgattgtgaagtcattttatatctctaccgcgaacatggtcctgcttgcgctaacatgttggacggtatgttttcttgggttttatatgatcaagacaaggataaggttgttgctgctcgtgatcccattggtattacaactttatatcagggcttctcatctgacagtcctgatactgcctattttgcttctgaattgaaggcattgcatcctgtttgcgacaaaatcattgctttccctcccggacattattacgactccgaaaccaagcaaactgtccgctatttcaagcctagctggtgggacgaaaataaaattccttccaaccccgttgactacaagcttctgcgcgagactttggaggcttccgttcgcaagcgtttaatggctgaagttccttatggtgttcttctatctggtggtttggattccagtttgattgcttctattgccgctcgtgaaactgagaagctcgctaacagcacttcgcagtccgaagaggctcgtaccattaccgcttggcctaagcttcattcttttgcaattggtttacctggctctcctgacttgcttgcggctcgtaaggttgccgactttttgcatactttccatcatgagcacaccttcactatcgatgaaggtcttgatgctcttcgtgacgttatttaccatcttgagacatatgatgttaccactatccgtgcaagtacccccatgtatctactatctcgtaaaatcaaggctcaaggtgttaaaatggttttgtctggtgagggatctgacgaaatctttggtggttatttatatttcggtaatgccccctctcgtgaggccttccattccgagtgtgtgcgtcgtgttaagaacttgcacttatccgattgcttgcgtgctaacaagtcaactatggcttggggtcttgaggctcgtgttcctttcttggataaggactttttggaagttgctcttaacattgatcctgaggagaaaatgtatattaacggtcgtaaagaaaaatatattcttcgcaaggcttttgacacaactcatgattcttcattacaaccatatctccctcaagatattctttggagacagaaggaacagttctctgatggcgttggttattcatggattgacgctttgaaggacactgctgagttatgtatttcagatgatgaatttgctcttccaaggagggaatggggtgacgatattcctaccaccaaagaggcattctggtaccgcaagcttttcgacgaaatcttccctagacagtgtgctgacactgttatgcgttgggttcccaaggctgaatggggttgccccgaagatccatctggtcgttaccaggctggtcacgttgctgctttaaaataa

SEQ ID NO: 144446 - protein, 557 aa, Schizosaccharomyces pombe
MCGILAVHHVAEDIEAFKPKALHLSKQLRHRGPDWSGKAIRNQTILCHERLAIVGVESGAQPLVSDDGKLVLTVNGEIYNHLKLRENLKGNYKFKTYSDCEVILYLYREHGPACANMLDGMFSWVLYDQDKDKVVAARDPIGITTLYQGFSSDSPDTAYFASELKALHPVCDKIIAFPPGHYYDSETKQTVRYFKPSWWDENKIPSNPVDYKLLRETLEASVRKRLMAEVPYGVLLSGGLDSSLIASIAARETEKLANSTSQSEEARTITAWPKLHSFAIGLPGSPDLLAARKVADFLHTFHHEHTFTIDEGLDALRDVIYHLETYDVTTIRASTPMYLLSRKIKAQGVKMVLSGEGSDEIFGGYLYFGNAPSREAFHSECVRRVKNLHLSDCLRANKSTMAWGLEARVPFLDKDFLEVALNIDPEEKMYINGRKEKYILRKAFDTTHDSSLQPYLPQDILWRQKEQFSDGVGYSWIDALKDTAELCISDDEFALPRREWGDDIPTTKEAFWYRKLFDEIFPRQCADTVMRWVPKAEWGCPEDPSGRYQAGHVAALK

SEQ ID NO: 144447 - DNA, 1906 bp, Triphysaria versicolor
  CDS (1)..(1761)
atgtgtgggattcttgcagttttgggttgttccgatgactctcaggcgaaaagggttcgcgttcttgagctctctcgcagattgaagcatcgtgggcccgactggagtggcatacatcatcacggagactgttatttagctcaccagcggctagctatagtcgatcccgcctccggcgatcagcctctctttaacgaggacaaacggattgctgtcaccgtaaatggagaaatatacaaccatgaggagcttcgggcgcttttgccgaaccataagttccgtaccggaagcgattgtgacgtcatagcgcatctctacgaagagtacggagaaaactttgtcgaaatgctagatgggatgttctcgtttgtgctgctcgattctcgtgataacacatttatcgctgctcgtgatgcattcgggataacctctctgtatatcggttggggactcgacggttctgtttggatatcgtctgagctaaaagggttacacgatgaatgtgagaatttcgaagttttcccacctggacacgtgtactcgagcaaaaccgaaggttttagaagatggtataatcctccttggttctccgaggctataccttcaactccttatgaccctttagtcctcaggggtgcttttgaacaagctgtgattaaaagacttatgacagatgtacctttcggagttcttttatcgggagggctcgattcgtctctagttgctgctgttacggctcgacatttggccggcactaaagctgcgaaacgatggggatcacagcttcattctttttgtgtgggccttgagggctcgcctgatttgaaagccggaaaggaagttgccgattatttgggtactgttcatcatgagtttcttttcactgtgcaggatggaattgatgcgatcgaggatgtgatttatcatatcgagacgtatgacgtaactacgatccgagcaagcacgcctatgtttcttatgtcacgtaagataaaatcgctcggggttaaaatggtaatttccggtgagggttctgatgagattttcggtggctatttgtactttcataaggcaccgaacaaggaagagtttcatcgtgaaacttgtcgcaagataaaggctcttcatcaatatgattgtttgagagcgaataaggcaacttctgcttggggtttagaggctcgagttccgtttcttgataaggaatttgtgaacttggcaatgagcatcgatcccgaagcaaagatgataaaacccgatcaagggcggatcgagaagtggattttgaggaaggctttcgatgacgaagaacgcccttatcttcccaagcatattttgtataggcagaaagaacagtttagtgatggtgtcggatatagctggatcgacgggcttaaagcccatgccgaacagcatgtaactgataagatgatgcttaatgctggacatatcttcccacataacactccaaccacaaaggagggttactactataggatgatattcgaacgatttttcccacagaactcagccaagctcactgttccaggcgggccgagtgtggcttgtagcactgctacagctgtggcgtgggatgcatcgtggtcgaagaatctggatccatcgggccgggccgcaactggcgtgcatgatttggcctatgagaatcatgtgccgatcgggaatttgaagtccaagaaaatggactctgtttcactgggaaatgcagtgggccctcaagagctcaccatcagaagttagcgtcgtttaacgacgttgataaattatctgttgtgtgtagtttatttatgtagtgtattatgacaatcaaactaaaataaaatgtaaaatttggttgtttgtagagggataagtttggttaggtaccagattttcctaatgtatt

SEQ ID NO: 144448 - protein, 586 aa, Triphysaria versicolor
MCGILAVLGCSDDSQAKRVRVLELSRRLKHRGPDWSGIHHHGDCYLAHQRLAIVDPASGDQPLFNEDKRIAVTVNGEIYNHEELRALLPNHKFRTGSDCDVIAHLYEEYGENFVEMLDGMFSFVLLDSRDNTFIAARDAFGITSLYIGWGLDGSVWISSELKGLHDECENFEVFPPGHVYSSKTEGFRRWYNPPWFSEAIPSTPYDPLVLRGAFEQAVIKRLMTDVPFGVLLSGGLDSSLVAAVTARHLAGTKAAKRWGSQLHSFCVGLEGSPDLKAGKEVADYLGTVHHEFLFTVQDGIDAIEDVIYHIETYDVTTIRASTPMFLMSRKIKSLGVKMVISGEGSDEIFGGYLYFHKAPNKEEFHRETCRKIKALHQYDCLRANKATSAWGLEARVPFLDKEFVNLAMSIDPEAKMIKPDQGRIEKWILRKAFDDEERPYLPKHILYRQKEQFSDGVGYSWIDGLKAHAEQHVTDKMMLNAGHIFPHNTPTTKEGYYYRMIFERFFPQNSAKLTVPGGPSVACSTATAVAWDASWSKNLDPSGRAATGVHDLAYENHVPIGNLKSKKMDSVSLGNAVGPQELTIRS

SEQ ID NO: 144449 - DNA, 1755 bp, Brassica napus
  CDS (1)..(1755)
atgtgtgggattcttgccgttctaggatgcaccgacgattctcaggccaagagagttcgtgttcttgagctttctcgcagactgaggcacagaggacctgactggagtggaatataccagcatggagacaattacttggcccatgaacgtctagcgatcgtcgatcctgactctggtgaccaacctctcttcaacgaggacaagaccattgttgtcacagtcaatggagagatttataaccatgaggagctgagaaaggatctgaagaatcacaagttccgtaccggcagtgattgtgacgtcatttctcatctgtacgaggagcatggtgagaattttgtggatatgttggatggagtcttctcctttgtgttactggacacaagagataactcgttcatggtggctcgtgacgcgattggtgtcacgtcgctctacattggttggggactagacggatctgtgtggatatcttcagagatgaaaggcttacatgaggattgtgaacatttcgaagtgtttcctccaggtgttttgtactcaagcaaatcaggagggtttaagcaatggtacaatcctccttggtacaatgagtcagttccttcgacgccttatgagcctctcgcagttagacatgcctttgaagccgctgtgactaagcggttgatgagtgatgttccatttggagttttactctcaggtggtcttgattcttctcttgtagcatccatcactgcccgtcacatggccagtactaaagcagctaagcgatggggtcctcagctccattccttttgtgtcggtcttgagggctcgccggacttgaaggcggggaaagaagtggcggagtatttggggacggtgcaccatgagttccatttcacggtgcaagacgggattgatgcgattgaggatgtgatctaccatgtcgagacatatgatgtgacgacaattagagctagcacacccatgttcttgatgtccaggaaaatcaagtctctaggtgttaagatggttctttccggtgaaggttctgatgagatctttggagggtatctttacttccacaaggcacctaacaagcaagagtttcaccaagaaacttgtcgcaagatcaaggctcttcacaaatacgattgcttaagagccaacaaagctacctctgcttttggtctagaggcgcgtgttccttttctggacaaggagtttatcaacaccgctatgtctctcgaccctgaatccaagatgatcaaaccagaggaagggaggatcgagaagtgggttctaaggagagcctttgatgatgaagaacgtccttatttgccaaaacacattctctacagacagaaagagcagtttagtgatggtgttggctacagctggatcgatggcctcaaagcccacgctgctgaaaatgttaatgacaagatgatgtcgaacgctgcttttatcttccctcacaacaccccactcaccaaagaagcttactattacagaatgatctttgagaggttcttcccacagaactcggcaaggctaactgttcccggaggtgcgaccgtggcttgctcgaccgcaaaagcggtggagtgggatgcaagctggtccaacaatatggatccatctggaagagctgcgattggagttcacctctcggcctacgacggcagcaaagtggcattgcccttgccgccacataaggcaatcgacgacatcccaatgatgatgggacaagaagttgtgattcagacatga

SEQ ID NO: 144450 - protein, 584 aa, Brassica napus
MCGILAVLGCTDDSQAKRVRVLELSRRLRHRGPDWSGIYQHGDNYLAHERLAIVDPDSGDQPLFNEDKTIVVTVNGEIYNHEELRKDLKNHKFRTGSDCDVISHLYEEHGENFVDMLDGVFSFVLLDTRDNSFMVARDAIGVTSLYIGWGLDGSVWISSEMKGLHEDCEHFEVFPPGVLYSSKSGGFKQWYNPPWYNESVPSTPYEPLAVRHAFEAAVTKRLMSDVPFGVLLSGGLDSSLVASITARHMASTKAAKRWGPQLHSFCVGLEGSPDLKAGKEVAEYLGTVHHEFHFTVQDGIDAIEDVIYHVETYDVTTIRASTPMFLMSRKIKSLGVKMVLSGEGSDEIFGGYLYFHKAPNKQEFHQETCRKIKALHKYDCLRANKATSAFGLEARVPFLDKEFINTAMSLDPESKMIKPEEGRIEKWVLRRAFDDEERPYLPKHILYRQKEQFSDGVGYSWIDGLKAHAAENVNDKMMSNAAFIFPHNTPLTKEAYYYRMIFERFFPQNSARLTVPGGATVACSTAKAVEWDASWSNNMDPSGRAAIGVHLSAYDGSKVALPLPPHKAIDDIPMMMGQEVVIQT

SEQ ID NO: 144451 - DNA, 1743 bp, Brassica napus
  CDS (1)..(1743)
atgtgtgggattctcgctgtcctaggctgcgtcgataactctcaagccacacgttctcgtatcatcaagctctctcgcagattgaggcatagaggtcctgattggagcgggctccattgttatgaggattgttacttggctcatgagcgtttggccatcattgaccccatttctggagaccagcctctctacagcgaagacaagaccgtcgttgtcacggtgaatggagagatatacaaccacaaggctttgcgtgaaagtgaaagtctgaagtctcacaagtaccataccgggagtgattgtgaagtgcttgcccatctttacgaagaacatggagaggaatttatcaacatgttggacggcatgtttgcatttgtccttcttgatactaaggacaaaagttatattgctgtaagggatgccattggtgtcatcccactctacattggctggggtctcgatggttctgtctggtttgcttctgagatgaaagcacttagtgatgattgtgaacagtttatggctttcccaccaggccacatctattccagtaaacaaggtggtcttaggaggtggtacaaccctccatggttctctgagctggttccttcaaccccttatgatcctttagtattgcgcgatactttcgagaaggctgtgataaagagactaatgaccgatgtgccttttggtgtccttctctctggaggcttagactcatctcttgttgcttcagtggctatacgccatttggaaaagtcagatgctcgtcagtggggttcaaagctgcacacgttttgcattggtttaaagggatctccggatcttaaagctggtaaagaagttgctgactatctaggaactcgccaccacgagctccactttacagttcaggaagggatagacgccatagaagaagtcatataccatgttgagacctatgacgtgactaccataagagcaagcactccaatgtttctcatgtcgagaaaaatcaaatcgctaggtgtgaagatggttctttctggtgaaggctctgatgagatttttggagggtatttgtacttccacaaagcacctaacaagaaggagttacacgaggaaacatgccgaaagatcaaagcactttatcaatatgattgcttgagggctaacaaatcaacttctgcgtggggtgttgaagctcgtgtgcctttccttgataaagcgtttctagatgtagcaatgagcattgatccagagtggaagatgatcaagcctgacttgggaaggattgagaaatgggtgttacgcaatgcctttgatgatgagaagaacccttatctaccaaagcacattctgtacaggcagaaggaacagttcagtgatggagttggatacagctggattgacggtctgaaagatcatgcaaacaaacatgtctctgacacaatgctgacaaacgcaaactttgtcttcccagacaacacacccatgacaaaagaagcttactactacagaaccatcttcgaaaagttcttccctaagagcgctgcaagagcaactgtaccaggaggtccaagtatagcatgcagtacagcaaaagctatagaatgggacgcaacttggaaaaagaaccttgacccgtcaggacgtgcggctcttggagttcatgttgcagcttatgaagaagataaagctgaagatcctcgtcctgagaaggtacagaagctggcagagaaaactgcagaagccattgtttga

SEQ ID NO: 144452 - protein, 580 aa, Brassica napus
MCGILAVLGCVDNSQATRSRIIKLSRRLRHRGPDWSGLHCYEDCYLAHERLAIIDPISGDQPLYSEDKTVVVTVNGEIYNHKALRESESLKSHKYHTGSDCEVLAHLYEEHGEEFINMLDGMFAFVLLDTKDKSYIAVRDAIGVIPLYIGWGLDGSVWFASEMKALSDDCEQFMAFPPGHIYSSKQGGLRRWYNPPWFSELVPSTPYDPLVLRDTFEKAVIKRLMTDVPFGVLLSGGLDSSLVASVAIRHLEKSDARQWGSKLHTFCIGLKGSPDLKAGKEVADYLGTRHHELHFTVQEGIDAIEEVIYHVETYDVTTIRASTPMFLMSRKIKSLGVKMVLSGEGSDEIFGGYLYFHKAPNKKELHEETCRKIKALYQYDCLRANKSTSAWGVEARVPFLDKAFLDVAMSIDPEWKMIKPDLGRIEKWVLRNAFDDEKNPYLPKHILYRQKEQFSDGVGYSWIDGLKDHANKHVSDTMLTNANFVFPDNTPMTKEAYYYRTIFEKFFPKSAARATVPGGPSIACSTAKAIEWDATWKKNLDPSGRAALGVHVAAYEEDKAEDPRPEKVQKLAEKTAEAIV

SEQ ID NO: 144453 - DNA, 1743 bp, Brassica napus
  CDS (1)..(1743)
atgtgtgggattctcgctgttctaggctgcgtcgataactctcaagccacacgttctcgtatcatcaaactctctcgcagattgaggcatagaggtcctgattggagcgggcttcattgttatgaggattgttacttggctcatgagcgtttggccatcattgaccccatttctggagaccagcctctctacagcgaagataagaccgtcgttgtcacggtgaatggagagatatacaatcacaaggcattgcgtgaaagtgaaagtctgaagtctcacaagtaccataccgggagtgattgtgaagtgcttgcccatctttatgaagaacatggagaggaatttatcaacatgttggacggcatgtttgcatttgtccttcttgatactaaggacaaaagttatattgctgtaagggatgccattggtgtcatcccactctacattggctggggtctcgatggttctgtctggtttgcttctgagatgaaagcacttagtgatgattgtgaacagtttatggctttcccaccaggccacatctattccagtaaacaaggtggtcttaggaggtggtacaaccctccatggttctctgagctcgttccttcaaccccttatgatcccttagtattgcgagatactttcgagaaggctgtaataaagagactaatgaccgatgtgccttttggtgtcctactctctggaggactagactcatctcttgttgcttcagtggctatacgccatttggaaaagtcagatgctcgtcagtggggttccaagctgcacaccttttgcattggtttaaagggatctccggatcttaaagctggtaaagaagttgctgactatctaggaactcgccaccacgagctccactttacagttcaggaagggatagacgccatagaagaagttatataccatgttgagacctatgacgtgactaccataagagcaagcactcccatgtttctcatgtcgagaaaaatcaaatcgcttggtgtgaagatggttctctctggtgaaggctctgatgagatctttggagggtatttgtacttccacaaagcacctaacaagaaggagttacacgaggaaacatgccgaaagatcaaagcactttatcaatatgattgcttgagggctaacaaatcaacttctgcgtggggtgttgaggctcgtgtgcctttccttgataaagcgtttctagatgtagcaatgggcattgatccagagtggaagatgatcaggcctgacttgggaaggattgagaaatgggtgttacgcaatgcctttgatgatgagaagaatccttatctaccaaagcacattctgtacaggcagaaggaacagttcagtgatggagttggatacagctggattgacggtctgaaagatcatgcaaacaaacatgtctctgacgcaatgctgacgaacgcaaactttgtcttcccggagaacacacctttgacaaaggaggcttactactacagagccatctttgaaaagttcttccctaagagcgctgctagagcaactgtaccaggaggtccaagtgtagcatgtagtactgcaaaagctgtggagtgggacgcagcttggaaagggaaccttgacccgtcgggtcgtgcggctcttggagttcatgttgcagcttatgaaggagataaagctgaagatcctcgtcctgagaaggtacagaagctggcagagaaaactgcagaagccattgtttga

SEQ ID NO: 144454 - protein, 580 aa, Brassica napus
MCGILAVLGCVDNSQATRSRIIKLSRRLRHRGPDWSGLHCYEDCYLAHERLAIIDPISGDQPLYSEDKTVVVTVNGEIYNHKALRESESLKSHKYHTGSDCEVLAHLYEEHGEEFINMLDGMFAFVLLDTKDKSYIAVRDAIGVIPLYIGWGLDGSVWFASEMKALSDDCEQFMAFPPGHIYSSKQGGLRRWYNPPWFSELVPSTPYDPLVLRDTFEKAVIKRLMTDVPFGVLLSGGLDSSLVASVAIRHLEKSDARQWGSKLHTFCIGLKGSPDLKAGKEVADYLGTRHHELHFTVQEGIDAIEEVIYHVETYDVTTIRASTPMFLMSRKIKSLGVKMVLSGEGSDEIFGGYLYFHKAPNKKELHEETCRKIKALYQYDCLRANKSTSAWGVEARVPFLDKAFLDVAMGIDPEWKMIRPDLGRIEKWVLRNAFDDEKNPYLPKHILYRQKEQFSDGVGYSWIDGLKDHANKHVSDAMLTNANFVFPENTPLTKEAYYYRAIFEKFFPKSAARATVPGGPSVACSTAKAVEWDAAWKGNLDPSGRAALGVHVAAYEGDKAEDPRPEKVQKLAEKTAEAIV

SEQ ID NO: 144455 - DNA, 1740 bp, Glycine max
  CDS (1)..(1740)
atgtgtggcatacttgctgtgcttggttgctctgattcatctcaagccaaaagggtccgcgtccttgagctttctcgcagattgaagcaccgtggtcctgactggagtgggctccaccaatatggtgataactatttggctcatcaacggttagccatagttgatccagcttctggtgatcaacccctcttcaatgaagacaaaactgttgttgttacggtgaatggagagatctacaatcatgaagaactcaggaaacaattgcctaatcacaccttccgtacaggaagtgattgtgatgttattgctcacctgtatgaggagcacggagaaaactttatggacatgcttgatggtatattttcatttgttctgctggatactcgtgacaacagttttatagtggcacgggatgcaattggggtcacttccttgtacattggttggggtttagatggctctgtctggatttcctctgaattgaaggggttgaatgatgattgcgaacattttgagtcttttccacctggtcacttgtattctagcaaagagagagcgttccgcagatggtacaatcctccatggttctctgaggctattccatctgccccttatgatcctcttgctttgaggcatgcctttgagaaggctgtggtaaaaaggttgatgactgatgtgccctttggtgttttgctctctggaggtttggactcttcattggttgcagccgtcacggctcgctacctggcaggcacaaaagctgcgaagcaatggggaactaaattacactctttctgtgtaggccttgagggtgcacccgacctaaaggctgcaaaggaagtagcagagtacataggaactgtccatcatgaatttcactacactgttcaggatggcatagatgccatcgaagatgtgatctatcacattgagacatatgatgtgacaacaattagagcaagcattcccatgtttcttatgtctcgtaagatcaagtcattgggagtcaaaatggttatctctggagaaggatctgatgaaatctttggagggtatctatatttccacaaggcacccaacaaagaagagtttcaccaagaaacatgccgcaagattaaagcactccacaaatatgattgcttgcgagccaataaatcgacctttgcctggggtctagaagccagagtaccatttttggacaaagagtttatcagagttgcaatgaacattgatcctgagtgtaaaatgataaaaaaggaagaagggcgaattgagaaatgggcactgaggagggcctttgatgatgaagaacatccttatctgccaaagcacattttatataggcagaaagaacaattcagtgatggagttggctatggttggattgatggccttaaagctcatgctgagaaacatgtaactgacagaatgatgctcaatgctgccaacattttccccttcaacactccaaccaccaaagaagcataccactatagaatgatatttgagaggttcttccctcagaactcagcaaggctcactgttcctggaggaccaagtgttgcatgtagcacagcaaaagctgttgagtgggatgctgcttggtctaacaaccttgatccatcaggtagagcagcacttggagtgcatgcatcagcttatggaaaccaggtcaaagctgtagaaccagagaagatcatacccaagatggaagtttctccactaggagttgccatatag

SEQ ID NO: 144456 - protein, 579 aa, Glycine max
MCGILAVLGCSDSSQAKRVRVLELSRRLKHRGPDWSGLHQYGDNYLAHQRLAIVDPASGDQPLFNEDKTVVVTVNGEIYNHEELRKQLPNHTFRTGSDCDVIAHLYEEHGENFMDMLDGIFSFVLLDTRDNSFIVARDAIGVTSLYIGWGLDGSVWISSELKGLNDDCEHFESFPPGHLYSSKERAFRRWYNPPWFSEAIPSAPYDPLALRHAFEKAVVKRLMTDVPFGVLLSGGLDSSLVAAVTARYLAGTKAAKQWGTKLHSFCVGLEGAPDLKAAKEVAEYIGTVHHEFHYTVQDGIDAIEDVIYHIETYDVTTIRASIPMFLMSRKIKSLGVKMVISGEGSDEIFGGYLYFHKAPNKEEFHQETCRKIKALHKYDCLRANKSTFAWGLEARVPFLDKEFIRVAMNIDPECKMIKKEEGRIEKWALRRAFDDEEHPYLPKHILYRQKEQFSDGVGYGWIDGLKAHAEKHVTDRMMLNAANIFPFNTPTTKEAYHYRMIFERFFPQNSARLTVPGGPSVACSTAKAVEWDAAWSNNLDPSGRAALGVHASAYGNQVKAVEPEKIIPKMEVSPLGVAI

SEQ ID NO: 144457 - DNA, 1740 bp, Glycine max
  CDS (1)..(1740)
atgtgtggcatacttgctgtgcttggttgctctgattcatctcaagccaaaagggttcgcgtccttgagctttctcgcagattgaagcaccgtggtcctgactggagtgggctccaccaatatggtgataactatttggctcatcaaaggttagccatagttgatccagcgtctggtgatcaacccctcttcaatgaagacaaaactgtagtggttacggtgaatggagagatctacaatcatgaagaactcaggaaacagttgcctaatcacaccttccgtacaggaagtgactgtgatgttattgctcacctgtatgaggagcacggagaaaactttgtggacatgcttgatggtatattttcgtttgttctgctagatactcgtgacaacagttttatagtggcacgagatgcaattggggtcacttccttgtacattggttggggtctagatggctctgtctggatttcatcagaattgaaggggttgaatgatgattgcgaacattttgagtcttttccacctggtcacttgtactctagcaaagagagagcgtttcgcagatggtacaatcctccatggttctctgaggctattccctcagcaccttatgatcctcttgctttgaggcatgcctttgagaaggctgtggtaaaaaggttgatgactgatgttccctttggtgttttgctctctggaggtttggactcttcattggttgcagccgtcacggctcgctacctggcaggcacaaatgctgccaagcaatggggaaccaaattacactctttctgtgtaggccttgagggtgcacctgacctaaaggcagcaaaggaagtagcagactacataggtactgtacatcatgaatttcactacactgttcaggatggcatagatgccattgaggatgtgatctatcacattgaaacatatgatgtgacaacaattagagcaagcattcccatgtttcttatgtctcgtaagatcaagtcattgggagtcaaatgggttatatctggagaaggatctgatgagatctttggagggtatctatatttccacaaggcaccaaacaaagaagaatttcatcaagaaacatgccgcaagattaaagcactccacaaatatgattgcttgcgagccaataaatcgacctttgcctggggtctagaagccagagtgccatttttggacaaagattttatcagagttgcaatgaacattgatcctgagtataaaatgattaaaaaggaagaagggcgaattgagaaatgggtactgaggagggcctttgatgatgaagaacatccttatctgccaaagcacattttatacaggcagaaagaacaattcagtgatggagttggctatggttggattgatggccttaaagctcatgctgagaaacatgtgactgatagaatgatgctcaatgctgctaacattttccccttcaacacaccaaccaccaaagaagcatactactatagaatgatatttgagaggttcttccctcagaactcagccaggctgagtgttcctggaggaccaagtgttgcatgtagcacagccaaagctgttgagtgggatgctgcttggtctaacaaccttgatccatctggtagagcagcacttggagtgcatgcatcagcttatggaaatcaggtcaaagctgtagaaccagagaagatcataccaaagatggaagtttctccactaggagttgccatatag

SEQ ID NO: 144458 - protein, 579 aa, Glycine max
MCGILAVLGCSDSSQAKRVRVLELSRRLKHRGPDWSGLHQYGDNYLAHQRLAIVDPASGDQPLFNEDKTVVVTVNGEIYNHEELRKQLPNHTFRTGSDCDVIAHLYEEHGENFVDMLDGIFSFVLLDTRDNSFIVARDAIGVTSLYIGWGLDGSVWISSELKGLNDDCEHFESFPPGHLYSSKERAFRRWYNPPWFSEAIPSAPYDPLALRHAFEKAVVKRLMTDVPFGVLLSGGLDSSLVAAVTARYLAGTNAAKQWGTKLHSFCVGLEGAPDLKAAKEVADYIGTVHHEFHYTVQDGIDAIEDVIYHIETYDVTTIRASIPMFLMSRKIKSLGVKWVISGEGSDEIFGGYLYFHKAPNKEEFHQETCRKIKALHKYDCLRANKSTFAWGLEARVPFLDKDFIRVAMNIDPEYKMIKKEEGRIEKWVLRRAFDDEEHPYLPKHILYRQKEQFSDGVGYGWIDGLKAHAEKHVTDRMMLNAANIFPFNTPTTKEAYYYRMIFERFFPQNSARLSVPGGPSVACSTAKAVEWDAAWSNNLDPSGRAALGVHASAYGNQVKAVEPEKIIPKMEVSPLGVAI

SEQ ID NO: 144459 - DNA, 1740 bp, Glycine max
  CDS (1)..(1740)
atgtgtggcatacttgctgtgcttggttgctctgattcatctcaagccaaaagggttcgcgtccttgagctttctcgcagattgaagcaccgtggtcctgactggagtgggctccaccaatatggtgataactatttggctcatcaacggttagccatagttgatccagcttctggtgatcaacccctcttcaatgaagacaaaactgttgtggttacggtgaatggagagatctacaatcatgaagaactcaggaaacagttgcctaatcacaccttccgtacaggaagtgactgtgatgttattgctcacctgtatgaggagcacggagaaaactttgtggacatgcttgatggtatattttcgtttgttctgctagatactcgtgacaacagttttatagtggcacgagatgcaattggggtcacttccttgtacattggttggggtctagatggctctgtctggatttcatcagaattgaaggggttgaatgatgattgcgaacattttgagtcttttccacctggtcacttgtactctagcaaagagagagcgttccgcagatggtacaatcctccatggttctctgaggctattccctcagcaccttatgatcctcttgctttgaggcatgcctttgagaaggctgtggtaaaaaggttgatgactgatgttccctttggtgttttgctctctggaggtttggactcttcattggttgcagccgtcacggctcgctacctggcaggcacaaatgctgccaagcaatggggaaccaaattacactctttctgtgtaggccttgagggtgcacctgacctaaaggcagcaaaggaagtagcagactacataggaactgtacatcatgaatttcactacactgttcaggatggcatagatgccattgaggatgtgatctatcacattgaaacatatgatgtgacaacaattagagcaagcattcccatgtttcttatgtctcgtaagatcaagtcattgggagtcaaatgggttatatctggagaaggatctgatgagatctttggagggtatctatatttccacaaggcaccaaacaaagaagagtttcatcaagaaacatgccgcaagattaaagcactccacaaatatgattgcttgcgagccaataaatcgacctttgcctggggtctagaagccagagtgccatttttggacaaagattttatcagagttgcaatgaacattgatcctgattataaaatgattaaaaaggaagaagggcgaattgagaaatgggtactgaggagggcctttgatgatgaagaacatccttatctgccaaagcacattttatacaggcagaaagaacaattcagtgatggagttggctatggttggattgatggccttaaagctcatgctgagaaacatgtgactgacagaatgatgctcaatgctgctaacattttccccttcaacacaccaaccaccaaagaagcatactactatagaatgatatttgagaggttcttccctcagaactcagccaggctgagtgttcctggaggaccaagtgttgcatgtagcacagccaaagctgtagagtgggatgctgcttggtctaacaaccttgatccatctggtagggcagcacttggagtgcatgcatcagcttatggaaatcaggtcaaagctgtagaaccagagaagatcataccaaagatggaagtttccccactaggagttgccatatag

SEQ ID NO: 144460 - protein, 579 aa, Glycine max
MCGILAVLGCSDSSQAKRVRVLELSRRLKHRGPDWSGLHQYGDNYLAHQRLAIVDPASGDQPLFNEDKTVVVTVNGEIYNHEELRKQLPNHTFRTGSDCDVIAHLYEEHGENFVDMLDGIFSFVLLDTRDNSFIVARDAIGVTSLYIGWGLDGSVWISSELKGLNDDCEHFESFPPGHLYSSKERAFRRWYNPPWFSEAIPSAPYDPLALRHAFEKAVVKRLMTDVPFGVLLSGGLDSSLVAAVTARYLAGTNAAKQWGTKLHSFCVGLEGAPDLKAAKEVADYIGTVHHEFHYTVQDGIDAIEDVIYHIETYDVTTIRASIPMFLMSRKIKSLGVKWVISGEGSDEIFGGYLYFHKAPNKEEFHQETCRKIKALHKYDCLRANKSTFAWGLEARVPFLDKDFIRVAMNIDPDYKMIKKEEGRIEKWVLRRAFDDEEHPYLPKHILYRQKEQFSDGVGYGWIDGLKAHAEKHVTDRMMLNAANIFPFNTPTTKEAYYYRMIFERFFPQNSARLSVPGGPSVACSTAKAVEWDAAWSNNLDPSGRAALGVHASAYGNQVKAVEPEKIIPKMEVSPLGVAI

SEQ ID NO: 144461 - DNA, 1746 bp, Glycine max
  CDS (1)..(1746)
atgtgtggtattcttgctgttcttggttgttctgatgactctcgagccaaaagggtccgcgtgcttgagctctctcgcagattgaagcaccgtggccctgactggagtgggctccatcaacatggtgactgctttttagcacatcaacggttagccatagttgatcctgcttctggggatcaacctctctttaacgaggacaaatccgtcattgtcacggtgaatggagagatttacaaccatgaagagctcaggaaacagctgcctaatcacaagttccgtactggatgtgattgtgatgttattgcacacctgtacgaggaacatggagaagactttgtggacatgctggatggtatcttctcatttgttctactggacacccgtgacaacagttttatagtggctcgggatgctattggggtcacttccttgtacattggatggggattagatggctctgtttggatttcatcagaaatgaaaggcctgaatgatgattgtgaacactttgagtgttttccacctggtcacttgtactctagcaaagaaagagggtttcgcagatggtacaatcctccttggttctctgaggctactccatctaccccttatgatcctcttgttttaagacacacctttgagcaggcagtcataaaaaggttgatgactgatgtgccttttggtgttctactctctggaggtttggactcttctttggttgcatccatcacttctcgttacttggccaacacaaaggctgctgagcagtggggatcaaagttacattcattctgtgtaggccttgagggctcaccagatttgaaggctgcaaaagaggttgctgactatctaggcactgtccaccatgagtttaccttcactgttcaggatggaatagatgccattgaagatgttatctaccatattgaaacatatgatgtgactacaattagagcaagcacacctatgtttctcatgtctcggaagattaaatcacttggtgtcaaatgggttatctcaggagaaggatctgatgagatctttggagggtatttgtacttccacaaggcacccaacaaggaggagttccacagagaaacatgccgcaagatcaaagcacttcaccaatatgattgcttgcgagccaataaatcaacatttgcttggggtctagaagcccgtgtaccatttttggacaaggcgtttatcaatgctgcaatgagtattgaccctgagtggaagatgataaaaagagatgaaggacgaattgagaagtggattctgaggagagcctttgatgatgaagagcatccttatctgccaaagcacattttatacaggcagaaagaacaattcagtgatggagttggctatagttggattgatggccttaaggcccatgctgcaaaacatgtgactgaaaaaatgatgcttaatgctggtaacatttacccccacaacaccccaaaaaccaaggaagcatattactacagaatgatctttgagaggttcttccctcagaactcagctaggctcactgttcctggaggagcaagtgttgcatgtagcacagccaaagctgttgagtgggatgctgcttggtctaacaaccttgatccctctggtagagcagcacttggagtgcacatttcagcctatgaaaaccagaacaacaagggtgtagaaattgagaagataatacctatggatgctgctccccttggtgttgccatccagggctaa

SEQ ID NO: 144462 - protein, 581 aa, Glycine max
MCGILAVLGCSDDSRAKRVRVLELSRRLKHRGPDWSGLHQHGDCFLAHQRLAIVDPASGDQPLFNEDKSVIVTVNGEIYNHEELRKQLPNHKFRTGCDCDVIAHLYEEHGEDFVDMLDGIFSFVLLDTRDNSFIVARDAIGVTSLYIGWGLDGSVWISSEMKGLNDDCEHFECFPPGHLYSSKERGFRRWYNPPWFSEATPSTPYDPLVLRHTFEQAVIKRLMTDVPFGVLLSGGLDSSLVASITSRYLANTKAAEQWGSKLHSFCVGLEGSPDLKAAKEVADYLGTVHHEFTFTVQDGIDAIEDVIYHIETYDVTTIRASTPMFLMSRKIKSLGVKWVISGEGSDEIFGGYLYFHKAPNKEEFHRETCRKIKALHQYDCLRANKSTFAWGLEARVPFLDKAFINAAMSIDPEWKMIKRDEGRIEKWILRRAFDDEEHPYLPKHILYRQKEQFSDGVGYSWIDGLKAHAAKHVTEKMMLNAGNIYPHNTPKTKEAYYYRMIFERFFPQNSARLTVPGGASVACSTAKAVEWDAAWSNNLDPSGRAALGVHISAYENQNNKGVEIEKIIPMDAAPLGVAIQG

SEQ ID NO: 144463 - DNA, 1767 bp, Zea mays
  CDS (1)..(1767)
atgtgtggcatcttagccgtgctcggttgctccgactggtctcaggcaaagagggctcgcatcctcgcctgctccagaaggttgaagcacaggggccccgactggtcgggcctctaccagcacgagggcaacttcctggcgcagcagcggctcgccgtcgtctccccgctgtccggcgaccagccgctgttcaacgaggaccgcaccgtcgtggtggtggccaatggagagatctacaaccacaagaacgtccggaagcagttcaccggcacacacaacttcagcacgggcagtgactgcgaggtcatcatccccctgtacgagaagtacggcgagaacttcgtggacatgctggacggggtgttcgcgttcgtgctctacgacacccgcgacaggacctacgtggcggcgcgcgacgccatcggcgtcaacccgctctacatcggctggggcagtgacggttccgtctggatcgcgtccgagatgaaggcgctgaacgaggactgcgtgcgcttcgagatcttcccgccgggccacctctactccagcgccggcggcgggttccggcggtggtacaccccgcactggttccaggagcaggtgccccggatgccgtaccagccgctcgtcctcagagaggccttcgagaaggcggtcatcaagaggctcatgactgacgtcccgttcggggtcctcctctccggcggcctcgactcctcgctcgtcgcctccgtcaccaagcgccacctcgtcgagaccgaggccgccgagaagttcggcaccgagctccactcctttgtcgtcggcctcgagggctctcctgacctgaaggccgcacgagaggtcgctgactaccttggaaccatccatcacgagttccacttcaccgtacaggacggcatcgacgcgatcgaggaggtgatctaccacgacgagacgtacgacgtgacgacgatccgggccagcacgcccatgttcctgatggctcgcaagatcaagtcgctgggcgtgaagatggtgctgtccggggagggctccgacgagctcctgggcggctacctctacttccacttcgcccccaacaaggaggagttccacagggagacctgccgcaaggtgaaggccctgcaccagtacgactgcctgcgcgccaacaaggccacgtcggcgtggggcctggaggtccgcgtgccgttcctcgacaaggagttcatcaacgtcgcgatgggcatggaccccgaatggaaaatgtacgacaagaacctgggccgcatcgagaagtgggtcatgaggaaggcgttcgacgacgacgagcacccttacctgcccaagcatattctctacaggcagaaagaacagttcagtgacggcgttggctacaactggatcgatggcctcaaatccttcactgaacagcaggtgacggatgagatgatgaacaacgccgcccagatgttcccctacaacacgcccgtcaacaaggaggcctactactaccggatgatattcgagaggctcttccctcaggactcggcgagggagacggtgccgtggggcccgagcatcgcctgcagcacgcccgcggccatcgagtgggtggagcagtggaaggcctccaacgacccctccggccgcttcatctcctcccacgactccgccgccaccgaccacaccggcggtaagccggcggtggccaacggcggcggccacggcgccgcgaacggcacggtcaacggcaaggacgtcgcagtcgcgatcgcggtctga

SEQ ID NO: 144464 - protein, 588 aa, Zea mays
MCGILAVLGCSDWSQAKRARILACSRRLKHRGPDWSGLYQHEGNFLAQQRLAVVSPLSGDQPLFNEDRTVVVVANGEIYNHKNVRKQFTGTHNFSTGSDCEVIIPLYEKYGENFVDMLDGVFAFVLYDTRDRTYVAARDAIGVNPLYIGWGSDGSVWIASEMKALNEDCVRFEIFPPGHLYSSAGGGFRRWYTPHWFQEQVPRMPYQPLVLREAFEKAVIKRLMTDVPFGVLLSGGLDSSLVASVTKRHLVETEAAEKFGTELHSFVVGLEGSPDLKAAREVADYLGTIHHEFHFTVQDGIDAIEEVIYHDETYDVTTIRASTPMFLMARKIKSLGVKMVLSGEGSDELLGGYLYFHFAPNKEEFHRETCRKVKALHQYDCLRANKATSAWGLEVRVPFLDKEFINVAMGMDPEWKMYDKNLGRIEKWVMRKAFDDDEHPYLPKHILYRQKEQFSDGVGYNWIDGLKSFTEQQVTDEMMNNAAQMFPYNTPVNKEAYYYRMIFERLFPQDSARETVPWGPSIACSTPAAIEWVEQWKASNDPSGRFISSHDSAATDHTGGKPAVANGGGHGAANGTVNGKDVAVAIAV

SEQ ID NO: 144465 - DNA, 25 bp, Artificial sequence
  primer
atgtgttcaatttttggcgtattcg

SEQ ID NO: 144466 - DNA, 24 bp, Artificial sequence
  primer
ttacttatacgccgactggtgaac

SEQ ID NO: 144467 - protein, 830 aa, Artificial sequence
  consensus sequence
  Variant (5)..(15): Xaa in position 5 to 15 is any amino acid
  Variant (16)..(51): Xaa in position 16 to 51 is any or no amino acid
  Variant (57)..(57): Xaa in position 57 is any amino acid
  Variant (60)..(67): Xaa in position 60 to 67 is any amino acid
  Variant (68)..(73): Xaa in position 68 to 73 is any or no amino acid
  Variant (75)..(75): Xaa in position 75 is any amino acid
  Variant (77)..(77): Xaa in position 77 is any amino acid
  Variant (80)..(80): Xaa in position 80 is any amino acid
  Variant (82)..(86): Xaa in position 82 to 86 is any amino acid
  Variant (87)..(87): Xaa in position 87 is any or no amino acid
  Variant (89)..(89): Xaa in position 89 is any amino acid
  Variant (92)..(101): Xaa in position 92 to 101 is any amino acid
  Variant (102)..(106): Xaa in position 102 to 106 is any or no amino acid
  Variant (114)..(115): Xaa in position 114 to 115 is any amino acid
  Variant (117)..(123): Xaa in position 117 to 123 is any amino acid
  Variant (124)..(130): Xaa in position 124 to 130 is any or no amino acid
  Variant (132)..(132): Xaa in position 132 is any amino acid
  Variant (134)..(134): Xaa in position 134 is any amino acid
  Variant (138)..(138): Xaa in position 138 is any amino acid
  Variant (141)..(142): Xaa in position 141 to 142 is any amino acid
  Variant (145)..(147): Xaa in position 145 to 147 is any amino acid
  Variant (149)..(154): Xaa in position 149 to 154 is any amino acid
  Variant (155)..(155): Xaa in position 155 is any or no amino acid
  Variant (157)..(157): Xaa in position 157 is any amino acid
  Variant (159)..(159): Xaa in position 159 is any amino acid
  Variant (161)..(161): Xaa in position 161 is any amino acid
  Variant (163)..(163): Xaa in position 163 is any amino acid
  Variant (165)..(165): Xaa in position 165 is any amino acid
  Variant (167)..(173): Xaa in position 167 to 173 is any amino acid
  Variant (174)..(181): Xaa in position 174 to 181 is any or no amino acid
  Variant (184)..(185): Xaa in position 184 to 185 is any amino acid
  Variant (187)..(189): Xaa in position 187 to 189 is any amino acid
  Variant (192)..(192): Xaa in position 192 is any amino acid
  Variant (194)..(196): Xaa in position 194 to 196 is any amino acid
  Variant (197)..(199): Xaa in position 197 to 199 is any or no amino acid
  Variant (201)..(204): Xaa in position 201 to 204 is any amino acid
  Variant (205)..(205): Xaa in position 205 is any or no amino acid
  Variant (208)..(208): Xaa in position 208 is any amino acid
  Variant (210)..(210): Xaa in position 210 is any amino acid
  Variant (212)..(214): Xaa in position 212 to 214 is any amino acid
  Variant (215)..(242): Xaa in position 215 to 242 is any or no amino acid
  Variant (244)..(247): Xaa in position 244 to 247 is any amino acid
  Variant (248)..(248): Xaa in position 248 is any or no amino acid
  Variant (253)..(254): Xaa in position 253 to 254 is any amino acid
  Variant (255)..(273): Xaa in position 255 to 273 is any or no amino acid
  Variant (275)..(283): Xaa in position 275 to 283 is any amino acid
  Variant (284)..(307): Xaa in position 284 to 307 is any or no amino acid
  Variant (309)..(309): Xaa in position 309 is any amino acid
  Variant (312)..(314): Xaa in position 312 to 314 is any amino acid
  Variant (317)..(317): Xaa in position 317 is any amino acid
  Variant (319)..(320): Xaa in position 319 to 320 is any amino acid
  Variant (323)..(323): Xaa in position 323 is any amino acid
  Variant (335)..(345): Xaa in position 335 to 345 is any amino acid
  Variant (346)..(398): Xaa in position 346 to 398 is any or no amino acid
  Variant (400)..(401): Xaa in position 400 to 401 is any amino acid
  Variant (403)..(404): Xaa in position 403 to 404 is any amino acid
  Variant (407)..(409): Xaa in position 407 to 409 is any amino acid
  Variant (410)..(421): Xaa in position 410 to 421 is any or no amino acid
  Variant (424)..(425): Xaa in position 424 to 425 is any amino acid
  Variant (427)..(429): Xaa in position 427 to 429 is any amino acid
  Variant (432)..(434): Xaa in position 432 to 434 is any amino acid
  Variant (437)..(437): Xaa in position 437 is any amino acid
  Variant (440)..(443): Xaa in position 440 to 443 is any amino acid
  Variant (445)..(447): Xaa in position 445 to 447 is any amino acid
  Variant (449)..(449): Xaa in position 449 is any amino acid
  Variant (451)..(452): Xaa in position 451 to 452 is any amino acid
  Variant (454)..(456): Xaa in position 454 to 456 is any amino acid
  Variant (459)..(459): Xaa in position 459 is any amino acid
  Variant (461)..(461): Xaa in position 461 is any amino acid
  Variant (466)..(466): Xaa in position 466 is any amino acid
  Variant (472)..(473): Xaa in position 472 to 473 is any amino acid
  Variant (476)..(476): Xaa in position 476 is any amino acid
  Variant (478)..(479): Xaa in position 478 to 479 is any amino acid
  Variant (481)..(481): Xaa in position 481 is any amino acid
  Variant (484)..(484): Xaa in position 484 is any amino acid
  Variant (485)..(486): Xaa in position 485 to 486 is any or no amino acid
  Variant (488)..(488): Xaa in position 488 is any amino acid
  Variant (490)..(490): Xaa in position 490 is any amino acid
  Variant (492)..(492): Xaa in position 492 is any amino acid
  Variant (497)..(497): Xaa in position 497 is any amino acid
  Variant (500)..(500): Xaa in position 500 is any amino acid
  Variant (509)..(509): Xaa in position 509 is any amino acid
  Variant (512)..(515): Xaa in position 512 to 515 is any amino acid
  Variant (516)..(516): Xaa in position 516 is any or no amino acid
  Variant (518)..(518): Xaa in position 518 is any amino acid
  Variant (520)..(526): Xaa in position 520 to 526 is any amino acid
  Variant (527)..(616): Xaa in position 527 to 616 is any or no amino acid
  Variant (618)..(620): Xaa in position 618 to 620 is any amino acid
  Variant (623)..(623): Xaa in position 623 is any amino acid
  Variant (628)..(630): Xaa in position 628 to 630 is any amino acid
  Variant (634)..(634): Xaa in position 634 is any amino acid
  Variant (636)..(636): Xaa in position 636 is any amino acid
  Variant (643)..(644): Xaa in position 643 to 644 is any amino acid
  Variant (646)..(649): Xaa in position 646 to 649 is any amino acid
  Variant (651)..(653): Xaa in position 651 to 653 is any amino acid
  Variant (655)..(656): Xaa in position 655 to 656 is any amino acid
  Variant (658)..(661): Xaa in position 658 to 661 is any amino acid
  Variant (662)..(675): Xaa in position 662 to 675 is any or no amino acid
  Variant (678)..(679): Xaa in position 678 to 679 is any amino acid
  Variant (682)..(682): Xaa in position 682 is any amino acid
  Variant (685)..(687): Xaa in position 685 to 687 is any amino acid
  Variant (688)..(711): Xaa in position 688 to 711 is any or no amino acid
  Variant (714)..(718): Xaa in position 714 to 718 is any amino acid
  Variant (730)..(732): Xaa in position 730 to 732 is any amino acid
  Variant (734)..(734): Xaa in position 734 is any amino acid
  Variant (738)..(738): Xaa in position 738 is any amino acid
  Variant (740)..(744): Xaa in position 740 to 744 is any amino acid
  Variant (745)..(748): Xaa in position 745 to 748 is any or no amino acid
  Variant (750)..(762): Xaa in position 750 to 762 is any amino acid
  Variant (763)..(763): Xaa in position 763 is any or no amino acid
  Variant (765)..(766): Xaa in position 765 to 766 is any amino acid
  Variant (769)..(771): Xaa in position 769 to 771 is any amino acid
  Variant (774)..(775): Xaa in position 774 to 775 is any amino acid
  Variant (777)..(779): Xaa in position 777 to 779 is any amino acid
  Variant (780)..(780): Xaa in position 780 is any or no amino acid
  Variant (782)..(783): Xaa in position 782 to 783 is any amino acid
  Variant (784)..(819): Xaa in position 784 to 819 is any or no amino acid
  Variant (825)..(828): Xaa in position 825 to 828 is any amino acid
  Variant (829)..(829): Xaa in position 829 is any or no amino acid
MCGIXXXXXXXXXXXXXXXXXXXXXXXXXXXXXXXXXXXXXXXXXXXXXXXHRGPDXSGXXXXXXXXXXXXXXLXHXRLXIXXXXXXGXQPXXXXXXXXXXXXXXXNGEIYNHXXLXXXXXXXXXXXXXXFXTXSDCXVIXXLYXXXGXXXXXXXLXGXFXFXLXDXXXXXXXXXXXXXXXRDXXGXXXLYXGXXXXXXGXXXXXSEXKXLXXXXXXXXXXXXXXXXXXXXXXXXXXXXXXXCXXXXXFPPGXXXXXXXXXXXXXXXXXXXXXWXXXXXXXXXXXXXXXXXXXXXXXXXXXXXXXXXEXAVXXXLMXDXXVPXGVLLSGGLDSSXXXXXXXXXXXXXXXXXXXXXXXXXXXXXXXXXXXXXXXXXXXXXXXXXXXXXXXXXXXXXXXXLXXFXXGLXXXXXXXXXXXXXXXPDXXAXXXVAXXXGTXHHXXXXTXXXGXDXXAXXXVIXHXETYDXTTIRAXXPMXLXXRXIKXXXGXKXVXSGEGXDEXFGGYLYFHXAPXXXXXHXEXXXXXXXXXXXXXXXXXXXXXXXXXXXXXXXXXXXXXXXXXXXXXXXXXXXXXXXXXXXXXXXXXXXXXXXXXXXXXXXXXXXXXXXXXXXXXXXXXLXXXDCXRANKXXXAWGXEXRVPFLDXXFXXXXMXXXPXXKXXXXXXXXXXXXXXXXXXEKXXLRXAFXXXXXXXXXXXXXXXXXXXXXXXXXXXLPXXXXXRQKEQFSDGVGXXXYXWIDXLXXXXXXXXXDXXXXXXXXXXXXXXPXXKEXXXYRXXFXXXXPXXXXXXXXXXXXXXXXXXXXXXXXXXXXXXXXXXXXXXDPSGRXXXXXH

SEQ ID NO: 144468 - protein, 19 aa, Artificial sequence
  protein pattern
  Variant (2)..(2): Xaa in position 2 is Ala or Ser
  Variant (3)..(3): Xaa in position 3 is any amino acid
  Variant (5)..(5): Xaa in position 5 is Phe, Ile or Val
  Variant (7)..(7): Xaa in position 7 is any amino acid
  Variant (8)..(8): Xaa in position 8 is Ile, Leu or Val
  Variant (9)..(9): Xaa in position 9 is Ile, Leu or Met
  Variant (14)..(14): Xaa in position 14 is Ala or Ser
  Variant (17)..(17): Xaa in position 17 is Ala, Ile, Leu or Val
  Variant (18)..(18): Xaa in position 18 is Phe or Leu
KXXGXKXXXSGEGXDEXXG

SEQ ID NO: 144469 - protein, 21 aa, Artificial sequence
  protein pattern
  Variant (2)..(2): Xaa in position 2 is Ile, Leu or Val
  Variant (4)..(4): Xaa in position 4 is Ala, Gly, Leu, Pro or Val
  Variant (11)..(12): Xaa in position 11 to 12 is any amino acid
  Variant (14)..(14): Xaa in position 14 is Ile, Leu, Met or Val
  Variant (15)..(16): Xaa in position 15 to 16 is any amino acid
  Variant (17)..(17): Xaa in position 17 is Ala, Cys, Ser or Val
  Variant (19)..(19): Xaa in position 19 is any amino acid
  Variant (20)..(20): Xaa in position 20 is Ile, Leu, Met or Val
  Variant (21)..(21): Xaa in position 21 is Asp, Asn or Arg
GXEXRVPFLDXXFXXXXMXXX

SEQ ID NO: 144470 - protein, 19 aa, Artificial sequence
  protein pattern
  Variant (2)..(2): Xaa in position 2 is any amino acid
  Variant (3)..(3): Xaa in position 3 is Ala, Cys, Ser or Thr
  Variant (4)..(4): Xaa in position 4 is Asp or Glu
  Variant (7)..(7): Xaa in position 7 is any amino acid
  Variant (9)..(9): Xaa in position 9 is any amino acid
  Variant (19)..(19): Xaa in position 19 is Ala, Ile, Leu or Val
LXXXVPXGXLLSGGLDSSX

SEQ ID NO: 144471 - protein, 21 aa, Artificial sequence
  protein pattern
  Variant (2)..(3): Xaa in position 2 to 3 is any amino acid
  Variant (4)..(4): Xaa in position 4 is Ile or Val
  Variant (5)..(5): Xaa in position 5 is Ala or Leu
  Variant (6)..(6): Xaa in position 6 is Trp or Tyr
  Variant (19)..(19): Xaa in position 19 is any amino acid
PXXXXXRQKEQFSDGVGYXWI

SEQ ID NO: 144472 - protein, 9 aa, Artificial sequence
  protein pattern
  Variant (2)..(2): Xaa in position 2 is any or no amino acid
  Variant (9)..(9): Xaa in position 9 is Phe, His or Tyr
VXNGEIYNX

SEQ ID NO: 144473 - protein, 19 aa, Artificial sequence
  protein pattern
  Variant (3)..(5): Xaa in position 3 to 5 is any amino acid
  Variant (6)..(6): Xaa in position 6 is Phe or Tyr
  Variant (7)..(7): Xaa in position 7 is Asp, Ser or Thr
  Variant (8)..(8): Xaa in position 8 is any amino acid
  Variant (9)..(9): Xaa in position 9 is Asp, Glu, Asn or Gln
  Variant (10)..(13): Xaa in position 10 to 13 is any amino acid
  Variant (14)..(14): Xaa in position 14 is Ala, Asp, Asn, Ser or Val
  Variant (15)..(15): Xaa in position 15 is Ile or Leu
  Variant (16)..(16): Xaa in position 16 is any amino acid
  Variant (17)..(17): Xaa in position 17 is Asp, Glu, Asn or Thr
HHXXXXXXXXXXXXXXXVI

SEQ ID NO: 144474 - protein, 27 aa, Artificial sequence
  protein pattern
  Variant (3)..(4): Xaa in position 3 to 4 is any amino acid
  Variant (6)..(6): Xaa in position 6 is Leu or Pro
  Variant (7)..(7): Xaa in position 7 is Asp, Asn, Ser or Thr
  Variant (8)..(9): Xaa in position 8 to 9 is any amino acid
  Variant (10)..(10): Xaa in position 10 is Ala, Asp, Glu or Ser
  Variant (11)..(11): Xaa in position 11 is Phe or Leu
  Variant (13)..(13): Xaa in position 13 is any amino acid
  Variant (15)..(16): Xaa in position 15 to 16 is any amino acid
  Variant (17)..(17): Xaa in position 17 is any or no amino acid
  Variant (19)..(21): Xaa in position 19 to 21 is any amino acid
  Variant (22)..(22): Xaa in position 22 is any or no amino acid
  Variant (24)..(26): Xaa in position 24 to 26 is any amino acid
YFXXAXXXXXXHXEXXXRXXXXLXXXD

SEQ ID NO: 144475 - protein, 16 aa, Artificial sequence
  protein pattern
  Variant (2)..(2): Xaa in position 2 is any amino acid
  Variant (4)..(4): Xaa in position 4 is Ser or Thr
  Variant (5)..(5): Xaa in position 5 is Ile or Val
  Variant (7)..(7): Xaa in position 7 is Ala or Cys
  Variant (8)..(8): Xaa in position 8 is Ala, Gly or Ser
  Variant (9)..(9): Xaa in position 9 is any amino acid
  Variant (10)..(10): Xaa in position 10 is Ala, Gly or Pro
  Variant (12)..(12): Xaa in position 12 is any amino acid
  Variant (14)..(14): Xaa in position 14 is Ile, Leu, Met or Val
  Variant (15)..(15): Xaa in position 15 is Ala, Gly or Ser
DXTXXRXXXXMXLXXR

SEQ ID NO: 144476 - protein, 15 aa, Artificial sequence
  protein pattern
  Variant (2)..(2): Xaa in position 2 is Glu, Gln or Arg
  Variant (5)..(5): Xaa in position 5 is Ala, Cys, Ser or Thr
  Variant (6)..(6): Xaa in position 6 is Ile or Val
  Variant (7)..(7): Xaa in position 7 is Ile, Leu, Met or Val
  Variant (8)..(8): Xaa in position 8 is Asp or Gly
  Variant (9)..(11): Xaa in position 9 to 11 is any amino acid
  Variant (13)..(13): Xaa in position 13 is any amino acid
HXRLXXXXXXXGXQP

SEQ ID NO: 144477 - protein, 19 aa, Artificial sequence
  protein pattern
  Variant (2)..(2): Xaa in position 2 is any amino acid
  Variant (3)..(3): Xaa in position 3 is Asn, Ser or Thr
  Variant (6)..(6): Xaa in position 6 is any amino acid
  Variant (7)..(7): Xaa in position 7 is any or no amino acid
  Variant (9)..(9): Xaa in position 9 is any or no amino acid
  Variant (11)..(11): Xaa in position 11 is any or no amino acid
  Variant (13)..(14): Xaa in position 13 to 14 is any amino acid
  Variant (16)..(16): Xaa in position 16 is Ala, Asp or Glu
  Variant (17)..(18): Xaa in position 17 to 18 is any amino acid
  Variant (19)..(19): Xaa in position 19 is Phe or Tyr
PXXKEXXYXYXRXXFXXXX

SEQ ID NO: 144478 - protein, 11 aa, Artificial sequence
  protein pattern
  Variant (2)..(2): Xaa in position 2 is Asp, Asn or Gln
  Variant (4)..(4): Xaa in position 4 is Ile, Met or Val
  Variant (6)..(6): Xaa in position 6 is Ala, Gly or Ser
  Variant (7)..(7): Xaa in position 7 is Phe or Trp
  Variant (8)..(8): Xaa in position 8 is any amino acid
  Variant (9)..(9): Xaa in position 9 is Ile, Leu, Pro or Val
  Variant (10)..(10): Xaa in position 10 is any amino acid
LXGXFXXXXXD

SEQ ID NO: 144479 - DNA, 660 bp, Escherichia coli
  CDS (1)..(660): transl_table=11
atggatcgtattgttagttcttcacatgaccgtacatcactgcttagcacccataaggtgctgcgtaatacctattttctgctgagcctgacgctggccttttcggcgattaccgcaactgccagtacggtgctgatgctgccatctccgggtctgattctgacgctggtgggtatgtatggtttgatgttcctgacctataaaacggcgaataagccgaccgggattatctccgcattcgcctttaccggttttctgggttatatcctcggacctattctgaacacctatctgtctgccggaatgggtgacgtaatcgctatggcactgggcggaacggcgttagtgttcttctgctgctctgcatatgtgctgaccacccgcaaagatatgtcgttcctcggcggtatgctgatggcgggtattgtggtggtgctgattggtatggttgcgaatatcttcctgcagctgcctgctctgcatctggcgatcagcgcggtcttcattctgatctcctctggcgctatcttgtttgaaaccagcaacatcattcatggcggtgagacgaactatattcgtgccacggttagcctgtatgtttcgctgtacaacatcttcgtcagcctgctgagcattctgggcttcgctagccgcgattaa

SEQ ID NO: 144480 - protein, 219 aa, Escherichia coli
MDRIVSSSHDRTSLLSTHKVLRNTYFLLSLTLAFSAITATASTVLMLPSPGLILTLVGMYGLMFLTYKTANKPTGIISAFAFTGFLGYILGPILNTYLSAGMGDVIAMALGGTALVFFCCSAYVLTTRKDMSFLGGMLMAGIVVVLIGMVANIFLQLPALHLAISAVFILISSGAILFETSNIIHGGETNYIRATVSLYVSLYNIFVSLLSILGFASRD

SEQ ID NO: 144481 - DNA, 675 bp, Legionella pneumophila
  CDS (1)..(675): transl_table=11
atgaaccgaaatgatatcaccatacttagtcaacaaagagaatctgtgctcgcaaccaataaggtcctgcgaaatacgtatttactgctaagtttaaccttcatatttagcgcattaactgcctacgtagcctttattagtggagctcgcccaatgaatccactattgatgatagttggcgtttatggtttgatgtttctaactcaagctttaagaaatagcgtttggggtttggtaagcgtctttgcttttacagggtttttaggatataccattggcccattactcaactattacatcacaggtttttcaaatggcccacaaatagtcgctacggctttaggtggtactggaatgatctttttcgctctatcaggatatgccctgacaacgaaaaaagattttagctacctgggtggatttctttttgttggcgttatggttgccttattggcgatgatagcgggaatatttatacaaataccagctttgcaattagtgatttctgctgcttttgtattaatttcatctggattgattctattacaaaccagcgccataattcatgaaggagaaaccaattacataatggccactattggtttgtttgtttccatttataacttatttgttagcctgctgaacctgttaagcgcattctcaggtcgcgactaa

SEQ ID NO: 144482 - protein, 224 aa, Legionella pneumophila
MNRNDITILSQQRESVLATNKVLRNTYLLLSLTFIFSALTAYVAFISGARPMNPLLMIVGVYGLMFLTQALRNSVWGLVSVFAFTGFLGYTIGPLLNYYITGFSNGPQIVATALGGTGMIFFALSGYALTTKKDFSYLGGFLFVGVMVALLAMIAGIFIQIPALQLVISAAFVLISSGLILLQTSAIIHEGETNYIMATIGLFVSIYNLFVSLLNLLSAFSGRD

SEQ ID NO: 144483 - DNA, 660 bp, Escherichia coli O157:H7 EDL933
  CDS (1)..(660): transl_table=11
atggatcgtattgttagttcttcacatgaccgtacatcactgcttagcacccataaagtgctgcgtaatacctattttctgctgagcctgacgctggccttttcggcgattaccgcaactgccagtacggtgctgatgctgccatctccgggtctgattctgacgctggtgggtatgtatggtttgatgttcctgacctataaaatggcgaataagccgaccgggattatctccgcattcgcctttaccggttttctgggttatatcctcggaccaattctgaatacctatctgtctgccggaatgggtgacgtaatcgctatggcactgggcggaacggcgttagtgttcttctgctgctctgcatatgtgctgaccacccgcaaagatatgtcgttcctcggcggtatgctgatggcgggtattgtggtggtgctgattggtatggttgctaatatcttcctgcagctgcctgctctgcatctggcgatcagcgcggtcttcattttgatctcctctggcgctattttgtttgaaaccagcaacatcattcatggcggtgaaacgaactatattcgtgccacggttagcctgtatgtttcgctgtacaacatcttcgtcagcctgctgagcattctgggcttcgccagccgcgattaa

SEQ ID NO: 144484 - protein, 219 aa, Escherichia coli O157:H7 EDL933
MDRIVSSSHDRTSLLSTHKVLRNTYFLLSLTLAFSAITATASTVLMLPSPGLILTLVGMYGLMFLTYKMANKPTGIISAFAFTGFLGYILGPILNTYLSAGMGDVIAMALGGTALVFFCCSAYVLTTRKDMSFLGGMLMAGIVVVLIGMVANIFLQLPALHLAISAVFILISSGAILFETSNIIHGGETNYIRATVSLYVSLYNIFVSLLSILGFASRD

SEQ ID NO: 144485 - DNA, 660 bp, Salmonella typhimurium LT2
  CDS (1)..(660): transl_table=11
atggatcgtatcattacatcatcgcgtgatcgtagctcgctactgagtacgcacaaagtactgcgcaacacctattttctgttgagcctgacgctggctttatccgcaattaccgcgacagccagtacggtactgatgctgccctcccccggcctgattctgacgctggtcggtatgtatgggctgatgttcctgacctataaaaccgccaataagccggtcggtatcctgtctgcttttgcgtttaccggcttcctcggctatatcctgggcccgattcttaacgcctatctgtcagcaggcatgggcgatgtcattggcctggcgctgggtggaaccgcgttagtatttttctgctgctccgcttacgttctgaccacccgtaaggatatgtctttcctgggcggtatgttaatggccgggatcgtcgtcgtgctgattggtatggtggcgaatattttcctgcaactgcctgcattgcacctggcgattagcgcggtgtttatcctgatttcctcgggcgctatcctgtatgaaaccagtaacatcattcacggcggtgaaaccaactatattcgtgcgaccgtcagtctgtacgtttcgctgtacaacatctttgtcagcctgctcagcattctgggcttcgccagccgcgactaa

SEQ ID NO: 144486 - protein, 219 aa, Salmonella typhimurium LT2
MDRIITSSRDRSSLLSTHKVLRNTYFLLSLTLALSAITATASTVLMLPSPGLILTLVGMYGLMFLTYKTANKPVGILSAFAFTGFLGYILGPILNAYLSAGMGDVIGLALGGTALVFFCCSAYVLTTRKDMSFLGGMLMAGIVVVLIGMVANIFLQLPALHLAISAVFILISSGAILYETSNIIHGGETNYIRATVSLYVSLYNIFVSLLSILGFASRD

SEQ ID NO: 144487 - DNA, 702 bp, Ralstonia solanacearum GMI1000
  CDS (1)..(702): transl_table=11
atggacaaccaactcaacacgtacggttttggcgcttccggcaccgccggcgcgttggccgtccgcaaccgcgtgctgcgcaatacctattggctgctcgcactttcgatgatccccaccatcctgggtgcatggatcggtgtcgccacgggcttcaacctgatggccggccggccgctgatgggcttcctgatcttcatgggggtggccttcggcttcttctacgccatcgaacgcttcaagaacagcggcatgggcgttgccttgctgctcggcttcacgttcttcatggggctcatgctgtcgcggctgatcggcatgatcctcggcttctcgaacggcgcagcactgatcatgacggcgttcggcggcacggcaaccatctttgctgtgatggccaccgtggccaccgtcagcaagcgcgatttctccggcctgggcaagtggctgttcatgggcgtgctggtgctgatcgtcggctccgtggccaacatctggctgcagctgccgtcgatgatgctgacgatctcggtactggccatcgccatcttctcggcctacatcctgtacgacgtgcagcgcatcgtgaacggcggcgagaccaactacgtgacggccacgctggcgatctacctggacgtctacaacgtcttcacgaatctgctggcgatcctgggcatctttggcggcaaccgcaactga

SEQ ID NO: 144488 - protein, 233 aa, Ralstonia solanacearum GMI1000
MDNQLNTYGFGASGTAGALAVRNRVLRNTYWLLALSMIPTILGAWIGVATGFNLMAGRPLMGFLIFMGVAFGFFYAIERFKNSGMGVALLLGFTFFMGLMLSRLIGMILGFSNGAALIMTAFGGTATIFAVMATVATVSKRDFSGLGKWLFMGVLVLIVGSVANIWLQLPSMMLTISVLAIAIFSAYILYDVQRIVNGGETNYVTATLAIYLDVYNVFTNLLAILGIFGGNRN

SEQ ID NO: 144489 - DNA, 660 bp, Shewanella oneidensis MR-1
  CDS (1)..(660): transl_table=11
atgactcagcaaaccctgtactcaacgagtgcaacaactttagaagtgaacaaacttcttaaaaatacttatttattattggccatgaccctagccttctctgcattatgtgcaggtttagcgatggcgctcaatatcagcccgctgatgtcacttggtttatctatcggtggtttagtgctgctttttgtcacgcttcggaaagccgattcagccgcaggcattttctgggtgtttgcctttacgggcatggaaggcgcctcattaggctatatgcttaaccattacgcaggaatgacaaacggctccgagttgatcatgcaagcctttgggttaacatcggtcatttttattgctctgtcagcctatgccgtcaccaccaagaaggatttctctttcatgcgtggtttcttatttgcaggactgatagtagtgattgctgccgctattattaatatttttgtcggtaacagcgtcgcgtttatggcgattaacgcaggtctggcattgttgatgacaggctttattctgttcgatactagccgaatcgtaaatggcggtgagactaattacatccgtgcaactatctccttgtacttggactttttaaacctgttcattgccattttgcatttgcttggtattggtaacgatgattga

SEQ ID NO: 144490 - protein, 219 aa, Shewanella oneidensis MR-1
MTQQTLYSTSATTLEVNKLLKNTYLLLAMTLAFSALCAGLAMALNISPLMSLGLSIGGLVLLFVTLRKADSAAGIFWVFAFTGMEGASLGYMLNHYAGMTNGSELIMQAFGLTSVIFIALSAYAVTTKKDFSFMRGFLFAGLIVVIAAAIINIFVGNSVAFMAINAGLALLMTGFILFDTSRIVNGGETNYIRATISLYLDFLNLFIAILHLLGIGNDD

SEQ ID NO: 144491 - DNA, 672 bp, Pseudomonas putida KT2440
  CDS (1)..(672): transl_table=11
atgcgcgaacaggattacgccgtccaccacggccagcaggtcgagcagcaggagatcagcaaggtcctgcgcaacacgtacagcctgctggcgcttaccctcgccttcagcggtgtcatggctttcgttgcccagcagatgcgcgtcggctacccgaacgtgttcgtggtgctaatcggcttctacgggctgttcttccttaccaacaaactgcgtgattcggcctggggcctggtgtccaccttcgcgctcaccggtttcatgggcttcatcctcggcccgatcctcaaccgttacctgggcatggccggtggcgccgaggtagtgagctccgcgtttgccatgactgcgctggtgtttggtggtctgtcggcctacgtgctgatcacccgcaaggacatgagcttcctgagtggcttcatcactgcgggcttcttcgttctgctgggtgctgtcgttgccagcttcttcttccagatcagcggcctgcaactggctatcagcgctggcttcgtgctgttctcgtcggtctgcatcctgttccagaccagcgcgatcattcatggtggcgaacgtaactacatcatggcaaccatcagcctgtatgtgtcgatctacaacctgtttgtcagcctgctgcaattgtttggcatcatgggtcgtgacgactga

SEQ ID NO: 144492 - protein, 223 aa, Pseudomonas putida KT2440
MREQDYAVHHGQQVEQQEISKVLRNTYSLLALTLAFSGVMAFVAQQMRVGYPNVFVVLIGFYGLFFLTNKLRDSAWGLVSTFALTGFMGFILGPILNRYLGMAGGAEVVSSAFAMTALVFGGLSAYVLITRKDMSFLSGFITAGFFVLLGAVVASFFFQISGLQLAISAGFVLFSSVCILFQTSAIIHGGERNYIMATISLYVSIYNLFVSLLQLFGIMGRDD

SEQ ID NO: 144493 - DNA, 663 bp, Vibrio vulnificus CMCP6
  CDS (1)..(663): transl_table=11
atgaacagtcctatgtttacccgtacttctacacaagaaagtgctctacagacaaacaaagtactacgtaacacttacgccctactttctatgactttactttggtcagctatcgttgctggtgtcgctatggtgatgaacctccctcaccccggtataatcattacattagttggcttctatggcctactattcctaacagagaagaaccgcaacaacggtcttggccttgtattcacattcgcactaaccggttttatgggttatacacttggaccaatcctaaacgcttatgtgggcgcaggaatgggtgatcttatcgtaacagcactaggcggtaccgctctttcattcttagcggcatcagcttacgcactgacaactaagcgcgacctatctatgatgggcggtttgatgctttcactatttgtagttttgattgttggtatgatcgcaagcatcttcattcagtcaacagtacttcacctagccttaagcagcttgttcattgttttctctacaatggcaatcttaatgaccactcaaagcattgttcgtggtggtgaaacaaactacatttcagcaactgtgactctatacgtatcaatttacaatatcttcgtcagcctacttcaaatcctcggcattatgaacgacgactaa

SEQ ID NO: 144494 - protein, 220 aa, Vibrio vulnificus CMCP6
MNSPMFTRTSTQESALQTNKVLRNTYALLSMTLLWSAIVAGVAMVMNLPHPGIIITLVGFYGLLFLTEKNRNNGLGLVFTFALTGFMGYTLGPILNAYVGAGMGDLIVTALGGTALSFLAASAYALTTKRDLSMMGGLMLSLFVVLIVGMIASIFIQSTVLHLALSSLFIVFSTMAILMTTQSIVRGGETNYISATVTLYVSIYNIFVSLLQILGIMNDD

SEQ ID NO: 144495 - DNA, 672 bp, Pseudomonas syringae pv. tomato str. DC3000
  CDS (1)..(672): transl_table=11
atgcgcgaacaggattacagccttaaaaccggcatgcaggccgaccagctcgaggttagtcgtgtcctgcgcaatacttacggtcttctcgccctgacactggctttcagtggtgtcatggccttcgtcgctcagcagatgcgcgtcggctacccgaacattttcgtggtgctgatcggcttctacggtctgttcttcctgaccaacaagctgcgtgattcggtctggggtctggtgtcgaccttcgccctgacaggtttcatggggttcctgctgggcccgatcctcaaccgttacctgggcatggccgggggggctgaagtggtcagctccgccttcgcgatgacggctctggtattcggcggtctttcggcctatgtactgatcactcgcaaggacatgagcttcctgggtggtttcattaccgcaggtttctttgtcctgctgggtgcagtagtggccagcatgttcttccagatcagcggtctgcaactggctatcagcgcgggcttcgtgctgttctcgtcggtctgcattctgttccagaccagcgcgatcattcagggtggcgagcgtaactacatcatggcgacggtcagcctgtatgtatcgatctataacctgttcatcagcctgctgcagatcttcggcatcatgagccgcgacgactga

SEQ ID NO: 144496 - protein, 223 aa, Pseudomonas syringae pv. tomato str. DC3000
MREQDYSLKTGMQADQLEVSRVLRNTYGLLALTLAFSGVMAFVAQQMRVGYPNIFVVLIGFYGLFFLTNKLRDSVWGLVSTFALTGFMGFLLGPILNRYLGMAGGAEVVSSAFAMTALVFGGLSAYVLITRKDMSFLGGFITAGFFVLLGAVVASMFFQISGLQLAISAGFVLFSSVCILFQTSAIIQGGERNYIMATVSLYVSIYNLFISLLQIFGIMSRDD

SEQ ID NO: 144497 - DNA, 669 bp, Vibrio parahaemolyticus RIMD 2210633
  CDS (1)..(669): transl_table=11
atgaacagtccaatgtttactcgttcaacaagtgttcctaatacacttgaaactaacaaagtactgaaaaacacttacttcctactgtcgatgacactgatgaccagtgctatcgcagcagtcgcgactatggcaatgcaaatttcaccaatcatggcgattgtgatgcagcttgcagcgattggtattttgttctttgttatgccaaaggcaatcaactcatcatctggtatcgtttggacattcgttttcacgactctaatgggtggtgctttaggtccaatgcttaactactacgcatcaattccaaacggtcctactatcattgctcaagctctaggtttgactggtatggtgttccttggcctatcggcttacaccatttcaagcaagaaagatttctctttcatgcgcaacttcctgatggcaggtttgatcattgtgatcgttgcagcgctgattaacatcttcgttggttcaacaatggctcacctagtaatcagcagtgtttctgcactcgtgttctctggtttcatcctattcgatacaagtcgtatcgttcgtggcgaagaaacaaactacatcagtgcaacaatttcgatgtacctaaacatccttaacttgttcactagcctactaagcattctaggcatcatgaacgacgattaa

SEQ ID NO: 144498 - protein, 222 aa, Vibrio parahaemolyticus RIMD 2210633
MNSPMFTRSTSVPNTLETNKVLKNTYFLLSMTLMTSAIAAVATMAMQISPIMAIVMQLAAIGILFFVMPKAINSSSGIVWTFVFTTLMGGALGPMLNYYASIPNGPTIIAQALGLTGMVFLGLSAYTISSKKDFSFMRNFLMAGLIIVIVAALINIFVGSTMAHLVISSVSALVFSGFILFDTSRIVRGEETNYISATISMYLNILNLFTSLLSILGIMNDD

SEQ ID NO: 144499 - DNA, 660 bp, Wigglesworthia glossinidia endosymbiont of Glossina brevipalpis
  CDS (1)..(660): transl_table=11
atgaatagaatcatagaaatttcttcaaaaagtagatcaaatttatctacaaataaagtattaagaaatacatacttgcttttatccatgacagtagcattttctgcgattgtagctacaattagtagcatttttaactttacttatttaggagccattccaactttaattggattttatggattgttgtttttagtacatcgtttatctaataaaaaatctggaattatagcaatttttctacttactggattcatgggatatactatatctcctttaattaatatgagtataaattacaacagcgggaatagcataattttatctttgataggaactactgttatatttttttcttgtgcattatttacattaaaaagcaaaagagatttatcttttttgtctagcattttaatttcaggaagcattgctttgtttatttgtatgattggaaatatttttttaaatattccatctttatcgttagcaattagcatcatgtttatgattttttcttcagttgcaataatatgggaaataaacaatattattcgtggaggagaacaaaattatataagagccactgttagcttatatgtatctatatacaatatttttgcaagttttcttggaatatttggaggatcaaaaaataattaa

SEQ ID NO: 144500 - protein, 219 aa, Wigglesworthia glossinidia endosymbiont of Glossina brevipalpis
MNRIIEISSKSRSNLSTNKVLRNTYLLLSMTVAFSAIVATISSIFNFTYLGAIPTLIGFYGLLFLVHRLSNKKSGIIAIFLLTGFMGYTISPLINMSINYNSGNSIILSLIGTTVIFFSCALFTLKSKRDLSFLSSILISGSIALFICMIGNIFLNIPSLSLAISIMFMIFSSVAIIWEINNIIRGGEQNYIRATVSLYVSIYNIFASFLGIFGGSKNN

SEQ ID NO: 144501 - DNA, 666 bp, Haemophilus ducreyi 35000HP
  CDS (1)..(666): transl_table=11
atggaaaatcgtttaattgctaacacagctcataatcagtctctgcttagcacgcataaagtcttacgcaatacttatctattactctccatgacactggctttttcagcgattgtcgcttactttgcaatggcaatgaatgcacccgcattaccttggtggggcttattaattggtttttatggcttattattcttaacgaatactaatgctaatagtgccatagggcttgcctgtgtctttgccttaactggtttcttaggttacacattaggccctattttgaaccgctatgtaggcgcaggcttaggggatgcagttatgttagcattagcttcaactgccttagtcttttttagttgttctgcttatatcttaaccaccaaaaaagatatgtcctttttatctggtatgatgatggcattattcatcgtgctattagttggcgttattgcaaatattttcttagccataccggcgctaagcctagcaatgagtgttttatttgcgctattttcaaccggtgctattctattaaccaccagcaacattattcacggcggtgaaacaaattatattcgcgcaactgtagatttatatgtttcactttacaacttattcttaagcttattacaaatttttggtgtattaagcaaggacgattaa

SEQ ID NO: 144502 - protein, 221 aa, Haemophilus ducreyi 35000HP
MENRLIANTAHNQSLLSTHKVLRNTYLLLSMTLAFSAIVAYFAMAMNAPALPWWGLLIGFYGLLFLTNTNANSAIGLACVFALTGFLGYTLGPILNRYVGAGLGDAVMLALASTALVFFSCSAYILTTKKDMSFLSGMMMALFIVLLVGVIANIFLAIPALSLAMSVLFALFSTGAILLTTSNIIHGGETNYIRATVDLYVSLYNLFLSLLQIFGVLSKDD

SEQ ID NO: 144503 - DNA, 711 bp, Bordetella bronchiseptica RB50
  CDS (1)..(711): transl_table=11
atgaacgaaacccgtccgtccccctttaaccgctccggcgcgtatgccggcgccccgggcgaagtcgtccggaacaaggtgctgcgcaatacgtactggctgctcgcgctgtccctggtgccaacggttctgggcgccgcggtcggcctgtacaccggcatcaaccaggtcatgggcgccagccccggcctgagcgccatcgtattcctggtgggcgccttcggcctgatgttcgccatcgagaagaacaagaacaactcgctgggcgtggtcctgctgctggccttcacgttcttcatgggcgtgatgctgtcgcgcctgctggggttcgtgctcggcatgggcaatggcgcccagctggtcatgaccgcattcggcggcaccgccatcgtgttcgggaccatggccacgctggccaccaccatcaagcgtgacctctcgggcatgcagaagtggctgttcaccggcgcggtggtcatcctggtggcggcgctggccaacatcttcctgcagatgccggcgctgatgctgaccatctccgtgctggccatcgtcattttctcggccttcatgctggtggacctgcagcgcgtgatcaacggcggcgaaaccaactatgtgtcggcgaccctggccatctatctggacgtgtacaacgtcttctccaatctgctgatgctgttgggaatctttggcggcgaccgcgaataa

SEQ ID NO: 144504 - protein, 236 aa, Bordetella bronchiseptica RB50
MNETRPSPFNRSGAYAGAPGEVVRNKVLRNTYWLLALSLVPTVLGAAVGLYTGINQVMGASPGLSAIVFLVGAFGLMFAIEKNKNNSLGVVLLLAFTFFMGVMLSRLLGFVLGMGNGAQLVMTAFGGTAIVFGTMATLATTIKRDLSGMQKWLFTGAVVILVAALANIFLQMPALMLTISVLAIVIFSAFMLVDLQRVINGGETNYVSATLAIYLDVYNVFSNLLMLLGIFGGDRE

SEQ ID NO: 144505 - DNA, 690 bp, Chromobacterium violaceum ATCC 12472
  CDS (1)..(690): transl_table=11
atgcacccggattttcaaacggcctaccaatcgaccccgatggccgatgttcgcaacaaggtgttgcgcaacacctacggcttgctgggcctgtcgatgattccgaccgtgatgggcgccatcgtgggcacccacatgagtttcgccttcctggccggcagccccatcatcggcatgctgctgatcatggcggtgttctacggcctggtattcgcgatcgagaagaaccgctacagctcgctgggcgtgttcctgatgctgggcttcaccttcatgatgggcgtgctgctcggacccttgctgcaattcgcgctcaagttctccaacggcggccagctgatcatgaccgccggcgcggccacctccgcggtgttcttcgtgatggccggcatcgccaccaccaccaagcgcgacctgtccggcctgggcaacttcctgaccgtgggcgccatcgtgctgatggtggccgtggtggccaacctgttcctgcgcatgccgggcttccaactgatgatcgccgcggccttcgcgctgttcagctcgctgatgatcctgtggcaggtcaagaccgtggtcgacggcggcgagaacagctacatttccgccgcgctgtccatttacatcagcatctacaacctgttcaccagcttgctgcagctgctgctggccttcgccggcaaccgcgactga

SEQ ID NO: 144506 - protein, 229 aa, Chromobacterium violaceum ATCC 12472
MHPDFQTAYQSTPMADVRNKVLRNTYGLLGLSMIPTVMGAIVGTHMSFAFLAGSPIIGMLLIMAVFYGLVFAIEKNRYSSLGVFLMLGFTFMMGVLLGPLLQFALKFSNGGQLIMTAGAATSAVFFVMAGIATTTKRDLSGLGNFLTVGAIVLMVAVVANLFLRMPGFQLMIAAAFALFSSLMILWQVKTVVDGGENSYISAALSIYISIYNLFTSLLQLLLAFAGNRD

SEQ ID NO: 144507 - DNA, 669 bp, Vibrio vulnificus YJ016
  CDS (1)..(669): transl_table=11
atgaacagtcctatgtttacccgtacttcaagcatggaaagtactcttcaaaccaataaggtattgaaaaacacgtacttcctgctttctatgacactagtaaccagtgctattgcagcggttgcaaccatggcaatcggtatttctccaatgatggcacttgtgatgcaagttgctgctattggtattttatttttcgcactaccacgcagcattaactcatcaatgggcattgtttggacattcgtctttacgacactaatgggtggtgcacttggtccaatgctgacttactacgcttcaatcccaagcggccctactattattgctcaagctctaggtttaaccggtatggtattcctgggtctttcggcatataccatcacaagcaaaaaagatttctcttttatgcgtaacttcttaatggcaggcctgattattgtcatcgttgcagctatcatcaacatctttgttggctcaacgctaggtcagcttgttatcagtagtgtatctgcgttggttttctctggtttcatcctatttgataccagccgtatcgtccgcggtgaagaaactaactacgtaagtgcaacgatttcaatgtacctaaacattttgaacttgttcacaagcctactaagtattctcggcattatgaacgacgactaa

SEQ ID NO: 144508 - protein, 222 aa, Vibrio vulnificus YJ016
MNSPMFTRTSSMESTLQTNKVLKNTYFLLSMTLVTSAIAAVATMAIGISPMMALVMQVAAIGILFFALPRSINSSMGIVWTFVFTTLMGGALGPMLTYYASIPSGPTIIAQALGLTGMVFLGLSAYTITSKKDFSFMRNFLMAGLIIVIVAAIINIFVGSTLGQLVISSVSALVFSGFILFDTSRIVRGEETNYVSATISMYLNILNLFTSLLSILGIMNDD

SEQ ID NO: 144509 - DNA, 708 bp, Nasonia vitripennis
  CDS (1)..(708)
atggctccgacgctcgactcctttgtcaattccttcagcaacagattagaggctcctgtccgacaacacttgaagaatgtgtacggctgcctgtccctctccaccgtctctgcagcggctggagcttacgtgcacatgtacacatacctcctgcaagccggactcctgtcgacgatcggagcacttggactgatctttgccctcatctgcacacccgacaatggcaagaaccgatcactccgcctgggatacctcctgggattcgcatttctcactggactcggaatgggcccccttctagaattagttgtcagcattgatcccagcatcattctcactgctcttgttggtacaactgtagtcttcgtgtcgttcagtatttcatctatgctttccgagcgaggccaatggctgtaccttggtggcagtctgatcagtgctctcaacatgatggtgctgttttcgttggccaacatcttcttcagatcaacgctgctttaccagatccacctctacgttggtctctttgtgatgtgcggattcgtcatctatgacactcaactcatcattgagaagaatcgaatgggtagcaaagactacattgcccactcacttgacttgttccttgacttcatcaacgtattccgatacctgctggttatcctcacacagaaggagcagaggaacaacaagaagcgcaatcagtga

SEQ ID NO: 144510 - protein, 235 aa, Nasonia vitripennis
MAPTLDSFVNSFSNRLEAPVRQHLKNVYGCLSLSTVSAAAGAYVHMYTYLLQAGLLSTIGALGLIFALICTPDNGKNRSLRLGYLLGFAFLTGLGMGPLLELVVSIDPSIILTALVGTTVVFVSFSISSMLSERGQWLYLGGSLISALNMMVLFSLANIFFRSTLLYQIHLYVGLFVMCGFVIYDTQLIIEKNRMGSKDYIAHSLDLFLDFINVFRYLLVILTQKEQRNNKKRNQ

SEQ ID NO: 144511 - DNA, 1225 bp, Apis mellifera
  CDS (206)..(916)
gacgtttcgtaaaatttcaaggggcacgtcgaccaatcggaagtgtcgacgaaatttacgcacagaaatatcactgacgtgtccacggaaaggagactgcttcaagagtttatgattattctcagtttgtacaagaacattacttggaaaacaatagtgcttagagaattgtattgattccggtaatttgtaaagcaacgaaattatggcagcagtgttaaatacgtttgtgaactctttccataagaaattggaacctcctgttagacaacatttgaaaaatgtctatggatgtctgtccatgtcaacactatcagctgctgcaggagtttacattcacatgttctcagagcttttacaagctaatttcctaacaactcttggtacattgggtcttctctttgccttagtcagcacaccagacaatggaaaaaatcaaaaattacgtcttagctatcttctgggatttgcattcttctctggacttggcctgggtcctttacttcaattagttatgaatgttaatccaagtattatagtaactgctttgataggaacaactattatatttgtatcattcagtatttcttctcttttggctgaaagaggacgttggttgtatcttggtggtaccttaattagcttgctaaatattatggttttattttcattcgtcaatctctttttacgttggtccctattttaccaagcccatttatacattggtctattcttgatgtgtggttttgttatttatgatacacaattaatcattgaaaaattccatattggtagcaaagatttcatcctacactccctagatctattcgtagatttcatcggtattttccgctacctcgtcataattctcacacaaaaggaaatgtcaaaagatcaacgtaaacgcagagattaaatgaaagtaaagaaagctgtaaaatatcataccattcaagtaaatccataaactagaggtcttcatcttatctatccatatgtaagccgtatatgtaccatgataaaatgaatttaaacaatacagcttattattcggaaaatttttaggcatgcgttaactgtaaaaacgcaatgtatttatttcgaattacttagttatcatttcttttttcaattatctattagatttatatacatgtatacataaatagatataaatttattgtactatatttttatctttcaataaacaaaatttcccagcgtt

SEQ ID NO: 144512 - protein, 236 aa, Apis mellifera
MAAVLNTFVNSFHKKLEPPVRQHLKNVYGCLSMSTLSAAAGVYIHMFSELLQANFLTTLGTLGLLFALVSTPDNGKNQKLRLSYLLGFAFFSGLGLGPLLQLVMNVNPSIIVTALIGTTIIFVSFSISSLLAERGRWLYLGGTLISLLNIMVLFSFVNLFLRWSLFYQAHLYIGLFLMCGFVIYDTQLIIEKFHIGSKDFILHSLDLFVDFIGIFRYLVIILTQKEMSKDQRKRRD

SEQ ID NO: 144513 - DNA, 690 bp, Herminiimonas arsenicoxydans
  CDS (1)..(690)
atgagcaatttacagcagacctacgggtccacctacgacattacgtcaaccagacatcgtgttctgcgcaatacgtactggctacttgccttatcgatgatacccaccgtgctgggtgcctggctgggcgtgcaattcaaatttgcattcttcgccgccagccctttcatgggcatgatggttttcctggccatagccttcggctttttctatgccattgaaaaattcaagaactcgggtctgggcgtagcgcttttgcttggcttcacctttttcatgggtttgatgctgtcgcgcctgattggccacatactcggctttgccaacggcacttcgctgatcatgaccgcttttggcggcacggcagccattctgggtgtaatggccacggttgccaccgtttccaagcgcgatttttcgggcctgggaaaatggctgttcatgggcgtactggtgatcatcgtagcggccatcgccaatatctggctgcaactgccggcgcttcaactgacaatctcggtcgtcgccatcggcatattctcggccttcatcctgtacgacgtacagcgcatcatcaatggcggcgaaaccaattacgtcactgcaactctgggcatctacctgagcgtatataatatttttgccaacctgctctccctgctgggaattttcggtggcgaacgcgactga

SEQ ID NO: 144514 - protein, 229 aa, Herminiimonas arsenicoxydans
MSNLQQTYGSTYDITSTRHRVLRNTYWLLALSMIPTVLGAWLGVQFKFAFFAASPFMGMMVFLAIAFGFFYAIEKFKNSGLGVALLLGFTFFMGLMLSRLIGHILGFANGTSLIMTAFGGTAAILGVMATVATVSKRDFSGLGKWLFMGVLVIIVAAIANIWLQLPALQLTISVVAIGIFSAFILYDVQRIINGGETNYVTATLGIYLSVYNIFANLLSLLGIFGGERD

SEQ ID NO: 144515 - DNA, 699 bp, Burkholderia vietnamiensis G4
  CDS (1)..(699): transl_table=11
atgaacgactatccgtacaatttcggccgcggcggcaccgtcagcaccgcggaggttcgcaaccgcgtgctgcggaacacgtactggctgctcgcgctgtcgatgatcccgaccgtcctcggcgcgtgggtcggcgtcgcgacgggcttctcgctgttcgccgccaccagcccgatgatgagcctgctcgcgttcttcgcgatcgcgttcggcttcatgttcgcgatcgagcgcaccaagaacagcgccgccggcgtattcgtgctgctcggcttcacgttcttcatggggctgatgctgtcgcgcctgctcagcttcatcctcggcttttcgaacggcccgtcgctgatcatgctggcgttcggcggcaccggcatcatcttcgccgcgatggcgacggtcgcaacggtcagcaaacgcgacttctccgggctcggcaaatggctgttcatgggcgtcatcgtgatcctgctggcgtcggtcgcgaacatcttcctgcaattgccggcgctgatgctgaccgtgtcggtcctcgcgatcgcgatcttctccgcgtacatgctgttcgacgtccagcgcgtcgtcaacggcggcgagacgaactacatctcggccacgctcgcgatctacctcgacctgtacaacgtgttcacgaacctgctcgcgctgctcggcatcttcggcggcaaccgcaactga

SEQ ID NO: 144516 - protein, 232 aa, Burkholderia vietnamiensis G4
MNDYPYNFGRGGTVSTAEVRNRVLRNTYWLLALSMIPTVLGAWVGVATGFSLFAATSPMMSLLAFFAIAFGFMFAIERTKNSAAGVFVLLGFTFFMGLMLSRLLSFILGFSNGPSLIMLAFGGTGIIFAAMATVATVSKRDFSGLGKWLFMGVIVILLASVANIFLQLPALMLTVSVLAIAIFSAYMLFDVQRVVNGGETNYISATLAIYLDLYNVFTNLLALLGIFGGNRN

SEQ ID NO: 144517 - DNA, 666 bp, Dichelobacter nodosus VCS1703A
  CDS (1)..(666): transl_table=11
atgaattttgaatctcaacgaaccgttcaatcgtttgaccgcgatggcgtgctcgcgcgcaataaagttttgcgtcaaacctatactttactcggcatgaacgttttattcagcgctttttgtgcttatatcggcatgcttttaaaagtcaacgttccgtttatcgtttctttgctcgttattttgggtttgccgatggcgatttctgcaaaacgcaacagcggcgttggcattgttttattgttcgtattaactggatttttgggtttttacgtttctaatttattgagtatgctcattgcggttggaagatctgcagtagtcgtgaaagctttaatcggcacggcggttattttcttttctttgtcagcttatgtgttattgagcggtaaagatttttcttttttaggcggatttttattcgtcggcatgttaatcgttcttttagctgctttgggctcaatgtttttcggcatgacgttactcaatattgtttgctctgcgctctttattttgatcttttcgggttatgttttatacgacaccagccgcattattaatggcggtgaaagtaactatattattgccacattaaccttattcatggatatttttaatatctttttgcatttaatcaatctgatttcaagctttagtggcgaataa

SEQ ID NO: 144518 - protein, 221 aa, Dichelobacter nodosus VCS1703A
MNFESQRTVQSFDRDGVLARNKVLRQTYTLLGMNVLFSAFCAYIGMLLKVNVPFIVSLLVILGLPMAISAKRNSGVGIVLLFVLTGFLGFYVSNLLSMLIAVGRSAVVVKALIGTAVIFFSLSAYVLLSGKDFSFLGGFLFVGMLIVLLAALGSMFFGMTLLNIVCSALFILIFSGYVLYDTSRIINGGESNYIIATLTLFMDIFNIFLHLINLISSFSGE

SEQ ID NO: 144519 - DNA, 660 bp, Klebsiella pneumoniae subsp. pneumoniae MGH 78578
  CDS (1)..(660): transl_table=11
atggatcgcataattacatcatcgcgtgaccgttcctcgctgctcagcacgcacaaggttctgcgtaacacctacttcctgctcagcctgacgctggcgttttccgctatcaccgccaccgccagcacagtgctgatgctcccttcgccgggtctcattttgaccctcgtggggatgtacggtctgatgttcctgacctacaaaacggcgaataaacccaccgggattatttccgccttcgccttcaccgggttcctcggctatatccttgggccgatgctgaacgcgtatctttctgccggcatgggcgatttaatcggcctggcgctgggcggcacggcgctggtcttcttctgctgctcggcctatgtgctgacgacgcgtaaagacatgtcattccttggcgggatgctgatggccggcgtggtggtcgtcctgattggtatggtcgctaacctgttcctgcagctgccggcgctgcacctggcgattagcgcggtgttcatcctgatctcttcgggcgccatcctgttcgagaccagcaacattatccgcggcggtgaaaccaactatatccgcgcgacggtcagtctgtatgtctcgctgtacaacatctttgtcagcctgctgagcatcctgggcttcgccagccgggactaa

SEQ ID NO: 144520 - protein, 219 aa, Klebsiella pneumoniae subsp. pneumoniae MGH 78578
MDRIITSSRDRSSLLSTHKVLRNTYFLLSLTLAFSAITATASTVLMLPSPGLILTLVGMYGLMFLTYKTANKPTGIISAFAFTGFLGYILGPMLNAYLSAGMGDLIGLALGGTALVFFCCSAYVLTTRKDMSFLGGMLMAGVVVVLIGMVANLFLQLPALHLAISAVFILISSGAILFETSNIIRGGETNYIRATVSLYVSLYNIFVSLLSILGFASRD

SEQ ID NO: 144521 - DNA, 660 bp, Erwinia carotovora subsp. atroseptica SCRI1043
  CDS (1)..(660): transl_table=11
atggatcgtattgttgtttcctctacccgtgaaagttcactactcagcactcacaaagtgctgcgtaatacctatttcctgctgtcgctgacgctgggtttttctgccattactgcaacggcaagtactgtacttaacctgcccgcccctggcttaattctgatgctagttgggttttatggtctgatgttcctgacgcataaactggcgaacagccctgctggtattttggcgacattcgcactgactgggtttatgggttatacgctaggcccaattttaagctcactgatttcttccggtgcaggcgacattgtcatgttggcgttgggcggtacggcactggtgttcttctgctgttcagcctatgtattaacgacacgtaaggatatgtccttcttgtctggcatgatgatggcaggattcgttgtactgattgttgccgtcattgccaatctgttcctacagatcccagccttgcatctggctatcagcaccctgtttattctattttctgcgggtgccatcctgtgggaaaccagtaacatcattcacggtggcgaaaccaactacatccgggcgacggttagcctgtatgtcgcgatatacaatatcttcgttagcctgttgagcattctgggcatcatgcgtaacgactaa

SEQ ID NO: 144522 - protein, 219 aa, Erwinia carotovora subsp. atroseptica SCRI1043
MDRIVVSSTRESSLLSTHKVLRNTYFLLSLTLGFSAITATASTVLNLPAPGLILMLVGFYGLMFLTHKLANSPAGILATFALTGFMGYTLGPILSSLISSGAGDIVMLALGGTALVFFCCSAYVLTTRKDMSFLSGMMMAGFVVLIVAVIANLFLQIPALHLAISTLFILFSAGAILWETSNIIHGGETNYIRATVSLYVAIYNIFVSLLSILGIMRND

SEQ ID NO: 144523 - DNA, 672 bp, Mannheimia succiniciproducens MBEL55E
  CDS (1)..(672): transl_table=11
atggcagattcccgtattgtccttgatgcccgcgagcaatcaacttcattacttagcacacataaagtattacgtaatacttactttttattgggcatgacacttgccttctccgcattcgtcgcctatatttccatctcattaggcttgccgcatcccggtattatcgtgacgttagtcggcttttacggcttattgtttttaaccaattcgttagctaacagcggttggggaattctatccgcctttgcctttaccggttttcttggctataccttagggccgattctgaatgtttatatcggcgcagggttaagcgaaaccgtagttcttgcattgtcaggtacggccgcggtgttctttgcttgctcggcttacgtactgacgacccgcaaagatatgtcattcctttccggcatgattttctcgctctttatcgtgttattgctgggcatggtggcaagcatattcttccaaacgccggctttgcatttggcgattagcggtttgtttgtaattttctcaagtgccgcaatcttatttgaaacaagcaatattattcatggcggtgaaacaaattatatcagagcgaccgttagcctatttgtttcaatctacaacctattcttaagtttgttacaattattgggcatctttggcggtgacgattaa

SEQ ID NO: 144524 - protein, 223 aa, Mannheimia succiniciproducens MBEL55E
MADSRIVLDAREQSTSLLSTHKVLRNTYFLLGMTLAFSAFVAYISISLGLPHPGIIVTLVGFYGLLFLTNSLANSGWGILSAFAFTGFLGYTLGPILNVYIGAGLSETVVLALSGTAAVFFACSAYVLTTRKDMSFLSGMIFSLFIVLLLGMVASIFFQTPALHLAISGLFVIFSSAAILFETSNIIHGGETNYIRATVSLFVSIYNLFLSLLQLLGIFGGDD

SEQ ID NO: 144525 - DNA, 714 bp, Burkholderia pseudomallei K96243
  CDS (1)..(714): transl_table=11
atgttaggagaaaccatgaacgactatccgtacaacttcggccgcggcggcgcgatcggcacggccgagacccgcaaccgcgtgctgcgcaacacctactggctcctcgcgctgtcgatggtgccgaccgtgctcggcgcctgggtcggcgtcgcgacgggtttctcgctgttcgccgcgacgagcccgatgatgagcctcctcgcgttcttcgcgatcgcgttcggcttcatgttcgcgatcgagcgcacgaagaacagctcggccggcgtgttcgtgctgctcggcttcacgttcttcatgggcctgatgctgtcgcgcctcttgagcttcatcctcggcttctcgaacggcccgtcgctcatcatgctcgcattcggcggcaccggcgtgatcttcgccgcgatggcgacggtcgcgaccgtcagcaagcgcgacttctcgggcctcggcaaatggctcttcgtcggcgtgatcgtgctgctgctcgcgatggtcgcgaacatgttcctgcaactgccggcgctgatgctgaccgtgtcggtgctcgcgatcgtgatcttctcggcgtacatgctgtttgacgtccagcgcgtcgtgaacggcggcgagacgaattacatcagcgcgacgctcgcgatctacctcgatctgtacaacgtgttcacgaacctgctcgcgctgctcggcatcttcggcggcaaccgcaactga

SEQ ID NO: 144526 - protein, 237 aa, Burkholderia pseudomallei K96243
MLGETMNDYPYNFGRGGAIGTAETRNRVLRNTYWLLALSMVPTVLGAWVGVATGFSLFAATSPMMSLLAFFAIAFGFMFAIERTKNSSAGVFVLLGFTFFMGLMLSRLLSFILGFSNGPSLIMLAFGGTGVIFAAMATVATVSKRDFSGLGKWLFVGVIVLLLAMVANMFLQLPALMLTVSVLAIVIFSAYMLFDVQRVVNGGETNYISATLAIYLDLYNVFTNLLALLGIFGGNRN

SEQ ID NO: 144527 - DNA, 678 bp, Methylococcus capsulatus str. Bath
  CDS (1)..(678): transl_table=11
atgagtattccccgtgaacaggtcttgagccgcggcgcttatgccgtcgtgccccgccacaaggttctgaccaacacctatgcgctgctgtcgctgacgctgctgttcagtgcgttcaccgctggcgtgtccatggtgctggcgctgccccaccccggcatcatcgtcaccctggtgggctatttcggcctgctgtggctgaccaacaaatatgccaacagcgcgctcggtctcctgtgggtgtttgctctgaccggcttcatgggctatacgctgggcccggttctgaacgcctacgtcacgcacttcgccaacggcacccagctggtcatgatggccatgggcggtacgggcgcagtgttcctcggcctctcggcctacgcgctgacgacccgcagggacttcagtgtcctcggcggcctgctgggcgcaggtgtgctggtcgccttcctggccggtctggtcgccgtcttcgtgcccggcctgatggggctcagcctcgccgtgtcggcgatgttcgtggttctgatggccggaatgatcctgttccagaccagcgcgatcatccacggcggcgaaaccaactacatcctcgccacggtgtcgctgtacgtgacgatcttcaacctgtttaccagtctcctgcagttgctcggcgtgttcggcagcgacgattga

SEQ ID NO: 144528 - protein, 225 aa, Methylococcus capsulatus str. Bath
MSIPREQVLSRGAYAVVPRHKVLTNTYALLSLTLLFSAFTAGVSMVLALPHPGIIVTLVGYFGLLWLTNKYANSALGLLWVFALTGFMGYTLGPVLNAYVTHFANGTQLVMMAMGGTGAVFLGLSAYALTTRRDFSVLGGLLGAGVLVAFLAGLVAVFVPGLMGLSLAVSAMFVVLMAGMILFQTSAIIHGGETNYILATVSLYVTIFNLFTSLLQLLGVFGSDD

SEQ ID NO: 144529 - DNA, 666 bp, Azoarcus sp. EbN1
  CDS (1)..(666): transl_table=11
atggaaaaccgaatcggtacgatgacgaggtcggaggcctcggtcctctcgacgaacagggtcatccgcaacacctacatgctgctgtcgttgacgctggcattctcggcgctcaccgccggcgcgtcgctcgcgctcggcctgccgcacccgggcatcatcctcacgctggtggggtatttcggcctgctgttcctgacgacgaagttccgcgacagcgggctgggcatcctgttcgtgttcgcgctcaccggcttcatgggctacacgctcggcccgatcgtgtcccactacctcgcgatgcccaacggcgggcaggtggtgatgcaggcgatgggcggtaccgcggcgattttccttggcctgtcggcgtacgcgctgaccagccgcaaggacttctcgttcatgggcggcttcctggtggtcggcatcctcgtcgccttcctcgccggcctgggcgccatcttcttcgagatgcccggcttgtcgctcgcggtgtcggcaatgttcgtactgctgatgtccggtctcatcctctacgagaccagcaacatcatccacggcggtgagacgaactacgtgatggcgacggtgactttgtacgtgtcgatctacaacctcttcacgagcctgctgcacatcctcggcgtgatgaacaacgactga

SEQ ID NO: 144530 - protein, 221 aa, Azoarcus sp. EbN1
MENRIGTMTRSEASVLSTNRVIRNTYMLLSLTLAFSALTAGASLALGLPHPGIILTLVGYFGLLFLTTKFRDSGLGILFVFALTGFMGYTLGPIVSHYLAMPNGGQVVMQAMGGTAAIFLGLSAYALTSRKDFSFMGGFLVVGILVAFLAGLGAIFFEMPGLSLAVSAMFVLLMSGLILYETSNIIHGGETNYVMATVTLYVSIYNLFTSLLHILGVMNND

SEQ ID NO: 144531 - DNA, 663 bp, Azoarcus sp. EbN1
  CDS (1)..(663): transl_table=11
atgcaaaaccgtatgacgatgacgcgcaccgacgcctcggtgctgtcgaccaacaaggtcatccgcaacacctacatgttgctgtcgctaacgctggcgttctcggcgctaaccgccgggctgtcgatggccatgggtgccccgcgcctggggatcatcgttacgctcgcaggctacttcggcctgctgtttgcgaccaccaagttccgcaacagcagcctcggcatcgtgttcgtgttcgcgctgaccggcttcatgggcttcaccctcggcccgatcatctcatcctatttggcgctgcccaacggcgccagcatcgtgatgcaggcgatggccggcacagcggcgatcttcctgggtctgtcggcctacgcggtgacgagcaagaaggacttctccttcatgggcggtttcctgatggtcggcatcctggtcgccttcctggccggcctgggcgcgatcttcttcgagatcccggcgctgtcgctgaccgtgtcggcggccttcgtgctgctgatgtcgggcctcatcctgtacgagaccagcaacatcatccacggcggcgagaccaactacatcatggccacggtgtcgctgttcgtgtcgatcttcaacctcttcaccagcctgctgcacctgcttggcttcgccaacagcgactaa

SEQ ID NO: 144532 - protein, 220 aa, Azoarcus sp. EbN1
MQNRMTMTRTDASVLSTNKVIRNTYMLLSLTLAFSALTAGLSMAMGAPRLGIIVTLAGYFGLLFATTKFRNSSLGIVFVFALTGFMGFTLGPIISSYLALPNGASIVMQAMAGTAAIFLGLSAYAVTSKKDFSFMGGFLMVGILVAFLAGLGAIFFEIPALSLTVSAAFVLLMSGLILYETSNIIHGGETNYIMATVSLFVSIFNLFTSLLHLLGFANSD

SEQ ID NO: 144533 - DNA, 672 bp, Pseudomonas fluorescens Pf-5
  CDS (1)..(672): transl_table=11
atgcgcgaacaggattacgcagttaacaacggcgtgcaggccgagcagctagaggttagccgcgtcctgcgcaacacttacggcctgctggccctgaccctcgcgttcagtggggtgatggcctatgtggcacagcagatgcgtgtcggttatccgaacatcttcgtggtgctgatcggcttctacggtctgttcttcctcaccaacaaactccgtgactcggcctggggcctggtgtcggctttcgccttgaccggtttcatgggctttctgctcggcccgattctcaaccgctacctgggcatgcagggcggcgccgaagtggtcagttcggcctttgccatgacggcactggtattcggcggtctgtcggcctatgtgctgatcacccgcaaggacatgagcttcctcggcggcttcatcaccgccggtttcttcgtcctgatgggcgccgtgctggccagcctgttcttccagatcagcggcctgcaactggcgatcagcgccggcttcgtgctgttctcctcggtgtgcatcctgttccagaccagcgccatcatccacggcggcgaacgtaactacatcatggccaccatcagcctgtatgtatcgatctacaacctgttcgtcagcctgctgcaactgttcggcatcatgggtcgcgatgactga

SEQ ID NO: 144534 - protein, 223 aa, Pseudomonas fluorescens Pf-5
MREQDYAVNNGVQAEQLEVSRVLRNTYGLLALTLAFSGVMAYVAQQMRVGYPNIFVVLIGFYGLFFLTNKLRDSAWGLVSAFALTGFMGFLLGPILNRYLGMQGGAEVVSSAFAMTALVFGGLSAYVLITRKDMSFLGGFITAGFFVLMGAVLASLFFQISGLQLAISAGFVLFSSVCILFQTSAIIHGGERNYIMATISLYVSIYNLFVSLLQLFGIMGRDD

SEQ ID NO: 144535 - DNA, 669 bp, Colwellia psychrerythraea 34H
  CDS (1)..(669): transl_table=11
atgcaatctaatatgagttttcaaacggcgagtaaaagttcggcgatagaaattaataaagtattgagaaatacttacatgctgttatcaatgacacttgcatttagtgccgtaacagctggcgtttcaatggcaatgaacctatcacacggtgttgcacttgttatgatgctagtcgcgttcggtttaatgtttgtagtaaacaaaaaagctgattctgctagtggtgtttattggatttttgcttttactggtttaatgggcgcatcattgggtcctatgcttagcgcatacgctgcaatggatggtggtccggcaatgataatgcaagcacttggtggaaccgcattaatatttttcgcactgtcaggttatgcgcttacgagtaaaaaagacttctcatttatgggtggctttttaatggtaggtttgattgttgttgttgttgcaagtcttgctaacatcttctttcaaatccctgctctttcattagcggtaagtgctgcagttatcatgattatgtctggtttaattttgtatgatacaagccgtataattaatggtggcgaacgtaactacattcgcgctacggtttctttgtacttaaacatatacaacatttttgtgcatttattatcgttacttggcgtattcggcagcgatgattag

SEQ ID NO: 144536 - protein, 222 aa, Colwellia psychrerythraea 34H
MQSNMSFQTASKSSAIEINKVLRNTYMLLSMTLAFSAVTAGVSMAMNLSHGVALVMMLVAFGLMFVVNKKADSASGVYWIFAFTGLMGASLGPMLSAYAAMDGGPAMIMQALGGTALIFFALSGYALTSKKDFSFMGGFLMVGLIVVVVASLANIFFQIPALSLAVSAAVIMIMSGLILYDTSRIINGGERNYIRATVSLYLNIYNIFVHLLSLLGVFGSDD

SEQ ID NO: 144537 - DNA, 693 bp, Dechloromonas aromatica RCB
  CDS (1)..(693): transl_table=11
atgaacaccaacttcgagattgccaaccagggctcttcggggcttgcactgcagcagaaccgcgttctgcgcaatacctacatgctactcggcctgtccatggtgccgacggttatcggcgcactggtcggcatccagatgggattcagcttcctggcgggcagccctctcatgtctttcctgctcttcatgggcatcgccatgggcttcatgtggggcattgagaaaaacaaggacagcggcctgggtgtcgccctgctgctcggctttaccttcttcatgggcctgatgctgtcgcgcatcctgcaagtcgcgctaggtttctccaatggcggctcgatgattgccatggcggcaggcggcacgggtgccgtgttcttcacgatgtcgaccgtcgccgctgtcagcaagcgggatttcaccggcatgggaaaattcctgttcgtcggcatgatcgtcattttgctcgctgccgttgcgaacatcttcttccagattcctgcgctgtcgctgaccattgccgtcgcagtcgttggcatcttctcggcttatatcctgtacgacatcagccgtatcgtccaaggcggcgaaaccaactacgtcagtgccaccctggcggtctatctggacgtatacaacgtattcgtcagcctactgcagctgatcatggcgttcaccggcgagcgcgactga

SEQ ID NO: 144538 - protein, 230 aa, Dechloromonas aromatica RCB
MNTNFEIANQGSSGLALQQNRVLRNTYMLLGLSMVPTVIGALVGIQMGFSFLAGSPLMSFLLFMGIAMGFMWGIEKNKDSGLGVALLLGFTFFMGLMLSRILQVALGFSNGGSMIAMAAGGTGAVFFTMSTVAAVSKRDFTGMGKFLFVGMIVILLAAVANIFFQIPALSLTIAVAVVGIFSAYILYDISRIVQGGETNYVSATLAVYLDVYNVFVSLLQLIMAFTGERD

SEQ ID NO: 144539 - DNA, 702 bp, Ralstonia eutropha JMP134
  CDS (1)..(702): transl_table=11
atggataacaagctgaacacctacggtttcggcaatgcgtcgacggtcagcgatgtcgtcgtgcgtaatcgggtattgcgcaacacctactggctgctcgccatttcgatgatcccgaccgtgctcggcgcatggatcggcgtggccacgggcttcagcttcatggccggcagccccggcttgtcgctgatcctgttcctcggcatcgcattcgcgttcttctacggcatcgagaagaccaagaacagcagcatgggcgtggtcctgctgctcgccttcacgttcttcatgggcctgatgctgtcgcgcctgatcggcgcggtgctgcagttctcgaatgggccggcgctgatcatgtatgcctttggcggcacagcggcggtgtttggcgccatggctaccattgcgacggtcagcaagcgtgatttctcgggcctcagcaagttcctgttcgtcggcctgattctgctgattctggcgagcgtggccaatatctggctgcaacttccgtcgctgatgatcacggtgtcggtgatcgccatcggcattttctcggcgtacatcctgttcgatgtgcagcgcgtggtaaatggcggcgaaaccaactacatcacggccacgctggcgatctacctcgacgtctacaacgttttcacgaacctgctggccctgctgggcatcttcggcggcagccgcgactga

SEQ ID NO: 144540 - protein, 233 aa, Ralstonia eutropha JMP134
MDNKLNTYGFGNASTVSDVVVRNRVLRNTYWLLAISMIPTVLGAWIGVATGFSFMAGSPGLSLILFLGIAFAFFYGIEKTKNSSMGVVLLLAFTFFMGLMLSRLIGAVLQFSNGPALIMYAFGGTAAVFGAMATIATVSKRDFSGLSKFLFVGLILLILASVANIWLQLPSLMITVSVIAIGIFSAYILFDVQRVVNGGETNYITATLAIYLDVYNVFTNLLALLGIFGGSRD

SEQ ID NO: 144541 - DNA, 666 bp, Thiobacillus denitrificans ATCC 25259
  CDS (1)..(666): transl_table=11
atgaatccgcaagtcaccaccctcggccgcagccagactgcggtcacctcgaccaacaaggtcgtcaagaacacctacatgctgctggcgatgacgctggcgttttcggcactcacggccggcctgtcgatggccatgaacctgccgcatcccggcctcatcatcacgctcgtgggttacttcggcctgctgttcctgacgaccaaattccgcgacagcggcctcggcatcgccttcgtcttcgccctgaccggcttcatgggctacacgctcggaccgatcctcaacgcctacctcgcgctgccgaacggtggccaggtcgtgatgatggcgatgggcggcacggcggcgatcttcctcggcctgtcggcctacgtcatgacgacccgccgcgacttcagcttcatgggcggcttcctgatggtcggcatcctggtcgccttcctcgccggcctcggcgcgatcttcttcgaggtgcccgcgctgtcgctcgcggtctcggcgatgttcgtgctcctgatgtcgggtctcatcctctacgagaccagcaacatcatccacggcggcgagaccaactacgtgatggcgaccgtcaccctgttcgtcgcgatcttcaacctcttcacgagcctgctgcatctgctcggcttcgccagcaacgactag

SEQ ID NO: 144542 - protein, 221 aa, Thiobacillus denitrificans ATCC 25259
MNPQVTTLGRSQTAVTSTNKVVKNTYMLLAMTLAFSALTAGLSMAMNLPHPGLIITLVGYFGLLFLTTKFRDSGLGIAFVFALTGFMGYTLGPILNAYLALPNGGQVVMMAMGGTAAIFLGLSAYVMTTRRDFSFMGGFLMVGILVAFLAGLGAIFFEVPALSLAVSAMFVLLMSGLILYETSNIIHGGETNYVMATVTLFVAIFNLFTSLLHLLGFASND

SEQ ID NO: 144543 - DNA, 672 bp, Pseudomonas fluorescens PfO-1
  CDS (1)..(672): transl_table=11
atgcgcgaacaggattacgcagttcacaacagcgtgcaggctgagcagctagaggttagccgcgtcctgcgcaacacttacggtctactggcgctcaccctcgcattcagcggtgtgatggcgttcgtggcccagcagatgcgggtcggctacccgaacattttcgtggtactgatcggtttttacgggctgttcttcctcaccaacaagcttcgtgactctgcctggggcctggtgtcggcgtttgccctgaccggtttcatgggtttcctcctcggcccgatcctcaaccgttacctgggcatgcagggcggcgctgaagtggtcagctccgcgtttgcgatgactgcactggtgttcggtggtctgtcggcctacgtgctgatcacccgtaaggacatgagcttcctcggtggcttcatcaccgccggtttcttcgtcctgctgggcgcgacgctggcgagcatgttcttccagatcagcggcctgcaactggcgatcagcgcaggtttcgtgctgttctcgtcggtctgcatcctgttccagaccagcgccatcatccacggcggcgagcgcaactacatcatggcgaccatcagcctgtatgtatcgatctacaacctgttcgtcagcctgttgcagatcttcggcatcatgagccgcgacgactga

SEQ ID NO: 144544 - protein, 223 aa, Pseudomonas fluorescens PfO-1
MREQDYAVHNSVQAEQLEVSRVLRNTYGLLALTLAFSGVMAFVAQQMRVGYPNIFVVLIGFYGLFFLTNKLRDSAWGLVSAFALTGFMGFLLGPILNRYLGMQGGAEVVSSAFAMTALVFGGLSAYVLITRKDMSFLGGFITAGFFVLLGATLASMFFQISGLQLAISAGFVLFSSVCILFQTSAIIHGGERNYIMATISLYVSIYNLFVSLLQIFGIMSRDD

SEQ ID NO: 144545 - DNA, 687 bp, Francisella tularensis subsp. holarctica
  CDS (1)..(687): transl_table=11
atgaacaacttacaaaacaacactcgtgtgatagactccctctctcaagagtctgtactaggagcaaacaaagttcttagaaatacatactggttgctatctatgacactactatttagtgcttttacagcatttatagcaatgagcacaggtgcaatgataatgaatccattattaatgctagtagtttatattggtttattatttggtattaatgctactaaaaactcaccatggggtatagttttaacttttgcgctaacaggtcttttaggctattcgcttggtcctatacttaatatgtaccttactatgtttaaaaacggtgcagaactaatcatgatggcatttggaactactggtctgatttttctaggcttatctgtagttgcaatgagccctgcaagaaattttaatagattaggttcattctgtgcgattggtgcgattgttgcattagtagctttagtaattaatatattcctacaacttcctgctttagctttagttatatcactagtatttgcattcatatctggtggttttatattatggcaaacaaatgctattgtaagaggtgaagaaactaactacatattagctactgtaaatatttatgtgtctttattcaatatctttgtaactctattacaaatctttggtgcagtagctggcgatagagaataa

SEQ ID NO: 144546 - protein, 228 aa, Francisella tularensis subsp. holarctica
MNNLQNNTRVIDSLSQESVLGANKVLRNTYWLLSMTLLFSAFTAFIAMSTGAMIMNPLLMLVVYIGLLFGINATKNSPWGIVLTFALTGLLGYSLGPILNMYLTMFKNGAELIMMAFGTTGLIFLGLSVVAMSPARNFNRLGSFCAIGAIVALVALVINIFLQLPALALVISLVFAFISGGFILWQTNAIVRGEETNYILATVNIYVSLFNIFVTLLQIFGAVAGDRE

SEQ ID NO: 144547 - DNA, 654 bp, Saccharophagus degradans 2-40
  CDS (1)..(654): transl_table=11
atgcaagaactctacacacatgctgggacacaaagttccacacaggaagtgagtaaagtattacgcaacacatatgcattattggcaatgaccattgccttttctgcggcaatggccgttacatctatggcattaggcgtaccctacctaggcctatggatgctactaccctatatcggcttactctttcttgtagagaaaaccaagaattccgccatgggtattgtttctgtgtttgcccttaccggctggctgggctttagcattggccccatcatcagctactacattggcgtaagcggtatagagcccattcttacggccttgggcggtacagcactaaccttctttgtactttctggttacacccttgccaccaagaaagacatgagcaagtacactggctttttaatgactggcttagtagtaattctggttgccatggttgctaactggtttttacaaatttctgcacttagcctaaccattagctgcgcattcttgtttttgtcgtccatgctaattatgtggcaaaccagtgaaattattcatggcggtgagcgcaactacatttctgcaaccgttacgctatatgtatcgctgtataacatcttcagcattttgctaagctttttaggcggcagcgacgactaa

SEQ ID NO: 144548 - protein, 217 aa, Saccharophagus degradans 2-40
MQELYTHAGTQSSTQEVSKVLRNTYALLAMTIAFSAAMAVTSMALGVPYLGLWMLLPYIGLLFLVEKTKNSAMGIVSVFALTGWLGFSIGPIISYYIGVSGIEPILTALGGTALTFFVLSGYTLATKKDMSKYTGFLMTGLVVILVAMVANWFLQISALSLTISCAFLFLSSMLIMWQTSEIIHGGERNYISATVTLYVSLYNIFSILLSFLGGSDD

SEQ ID NO: 144549 - DNA, 699 bp, Burkholderia xenovorans LB400
  CDS (1)..(699): transl_table=11
atgaacgatcatccgtatagctttggccgcaatggcgcggtcagcacggtcgaaacgcgtaaccgcgtgctgcggaacacctactggctgctcgcgctgtccatgattccgacagtgctcggtgcgtgggtgggcctcgccacgggtttctcgctgttcgccgccacgagtcccgccatgagcatgctggcgttcttcgcgatcgccttcggattcatgttcgccatccagaagaccaaagacagcgcggccggcgtgttcgtgctgctaggcttcacgttcttcatgggcctgatgctgtcgcgcatcctgagcttcgtgctcggtttttcgaacggcccgtcgctgatcatgctcgccttcggtggcactggcgtgatcttcgcgtcgatggcgaccatcgccacggtcagcaagcgcgacttctcgggcctcggcaagtggctgttcatgggcgtgatcgtgctgctgctcgcgtcggtcgcgaacgtgttcctgcacctgccggcgctgatgctcacggtgtcggtcatggccatcgtgatcttctcggcctacatgctgttcgacgttcagcgcgtggtgaacggcggtgaaacgaactacattaccgccacgcttgcgatctacctggatctgtacaacgtgttcgtcaaccttctcgcgctgctcggtatcttcggcggcaatcgcaactag

SEQ ID NO: 144550 - protein, 232 aa, Burkholderia xenovorans LB400
MNDHPYSFGRNGAVSTVETRNRVLRNTYWLLALSMIPTVLGAWVGLATGFSLFAATSPAMSMLAFFAIAFGFMFAIQKTKDSAAGVFVLLGFTFFMGLMLSRILSFVLGFSNGPSLIMLAFGGTGVIFASMATIATVSKRDFSGLGKWLFMGVIVLLLASVANVFLHLPALMLTVSVMAIVIFSAYMLFDVQRVVNGGETNYITATLAIYLDLYNVFVNLLALLGIFGGNRN

SEQ ID NO: 144551 - DNA, 708 bp, Ralstonia metallidurans CH34
  CDS (1)..(708): transl_table=11
atgaacaacaagctgaatacctatgggttcggcaatagtgctgcgagcgtcactgatgtagccgtccgcaaccgggtccttcgtaatacttactggctgctggccatttcgatgattccaaccgtgatcggcgcctggatcggcgtggtcactggtttcaccgcgatgatcgctggcagcccgatgatgtcggccgtgctgttcctcgcggtcgccttcggcttcatgttcgccatcgagaagaccaagaacagcggcatgggcgtggtcctgctgctggccttcaccttcttcatgggtctgatgctggcacgcatcctcagcttcacgctgtcgttctcgaacggccccgcgctgatcatgtacgcctttggcggtaccgcagcggttttcggcgtgatggccaccattgccagcgtgagcaagcgtgatttctccggcttggccaagttcctgttcgtcggcgtgatcctgctgatcctggccagcctggccaacatctggctgcaactgccggcgctgatgatcacgctgtcggtgatcgccatcggcatcttctcggcgttcatcctggtggacgtgcagcgcgtggtgaatggcggcgaaaccaactacgtgaccgccacgctcgcgatctacctggacgtgtacaacgtgttcgtgaacctgctggccctgctcggcatcgcaggcggcagccgcgactga

SEQ ID NO: 144552 - protein, 235 aa, Ralstonia metallidurans CH34
MNNKLNTYGFGNSAASVTDVAVRNRVLRNTYWLLAISMIPTVIGAWIGVVTGFTAMIAGSPMMSAVLFLAVAFGFMFAIEKTKNSGMGVVLLLAFTFFMGLMLARILSFTLSFSNGPALIMYAFGGTAAVFGVMATIASVSKRDFSGLAKFLFVGVILLILASLANIWLQLPALMITLSVIAIGIFSAFILVDVQRVVNGGETNYVTATLAIYLDVYNVFVNLLALLGIAGGSRD

SEQ ID NO: 144553 - DNA, 663 bp, Haemophilus somnus 129PT
  CDS (1)..(663): transl_table=11
atgcaatctcgttttattgttgatactaaagaagaatcggtactggcaacaaataaggttttacgtaacacctactttttattagcattgacattggctttttcttctgttgtcgccttcagtgcaatgcaattaaacctccctccacttcatttcggtgtcatgttggtaggtttttatggattattattcctcaataatatgttagcaaacagtgcttggggacttttatctacattcgcattaacaggattattaggctattctttaggtcctattttaagctattatgttggctcaggattaggtgatttggttgttcttgctctagccggaactgcaagtgtattttttacatgctcggcctatgtgctaacaacaaaaaaagatatgtcattcttatccggcatgatgcttgctctctttatcgtactggttataggcatgatagcaagtttcttctttaatatgagtggctttcacatcgtatttagttcgttatttatcgttttctcaactatggctattttatatgaaaccagcaatatcattcatgggggagaaactaattatattagagctacggttagtttgtatgtttcactttacaatctttttgtcagcttgctcaatttactaggtattttcaaccgtgatgaataa

SEQ ID NO: 144554 - protein, 220 aa, Haemophilus somnus 129PT
MQSRFIVDTKEESVLATNKVLRNTYFLLALTLAFSSVVAFSAMQLNLPPLHFGVMLVGFYGLLFLNNMLANSAWGLLSTFALTGLLGYSLGPILSYYVGSGLGDLVVLALAGTASVFFTCSAYVLTTKKDMSFLSGMMLALFIVLVIGMIASFFFNMSGFHIVFSSLFIVFSTMAILYETSNIIHGGETNYIRATVSLYVSLYNLFVSLLNLLGIFNRDE

SEQ ID NO: 144555 - DNA, 660 bp, Shewanella sp. MR-4
  CDS (1)..(660): transl_table=11
atgactcagcaaactttgtactcagcgagtgcatccaccttagaagtgaataaacttcttaaaaatacctatttattgttggccatgaccctcgccttctcggcattgtgtgcaggcttagcgatggcactcaatattagccctctgatgtcactcggtttatctatcggtggtttagtgctgttgttcgttaccctacgcaaagctgactcggctgcgggcatcttctgggtatttgccttcaccggtatggaaggcgcctcattaggttacatgcttaaccactacgctggcatgaccaatggctctgagcttatcatgcaagctttaggattaacctcggttatctttattgcgctctcagcctatgcagtcacaacgaagaaagatttctctttcctacgtggtttcctgttcgccggattgattgtggtgatcgccgctgcgctgattaacattttcgtgggtaacagtgtggcctttatggcgattaacgcggctcttgcactgttaatgaccggctttatcctgttcgatactagccgtatcgtgaatggtggcgagactaactatatccgcgccactatctccttgtatctggactttttaaacctgttcattgccattttgcatttgcttggcattggtaacgatgattaa

SEQ ID NO: 144556 - protein, 219 aa, Shewanella sp. MR-4
MTQQTLYSASASTLEVNKLLKNTYLLLAMTLAFSALCAGLAMALNISPLMSLGLSIGGLVLLFVTLRKADSAAGIFWVFAFTGMEGASLGYMLNHYAGMTNGSELIMQALGLTSVIFIALSAYAVTTKKDFSFLRGFLFAGLIVVIAAALINIFVGNSVAFMAINAALALLMTGFILFDTSRIVNGGETNYIRATISLYLDFLNLFIAILHLLGIGNDD

SEQ ID NO: 144557 - DNA, 660 bp, Shewanella sp. MR-7
  CDS (1)..(660): transl_table=11
atgactcagcaaaccttgtactcagcgagtgcatccaccttcgaagtgaataaacttcttaaaaatacctatttattattggccatgaccctcgccttctcggcattgtgtgcaggcttagcgatggcacttaatatcagccctctgatgtcactcggtttatctatcggtggtttagtgctgttgttcgttaccctacgcaaagccgactcggctgcgggcatcttctgggtatttgccttcaccggtatggaaggcgcctcattaggttacatgcttaaccactacgctggcatgaccaatggctctgagcttatcatgcaagctttaggattaacctcggttatctttattgcgctctcagcctatgcagtcacaacgaagaaagatttctctttcctacgtggtttcctgttcgccggattgattgtggtgatcgccgctgcgctgattaacattttcgtgggtaacagtgtggcctttatggcgattaacgcgggtcttgcgctgttaatgaccggctttatcctgttcgatactagccgtatcgtgaatggtggcgagactaactatatccgcgccactatctccttgtatctggactttttaaacctattcattgccattttgcatttgcttggcattggtaacgatgattaa

SEQ ID NO: 144558 - protein, 219 aa, Shewanella sp. MR-7
MTQQTLYSASASTFEVNKLLKNTYLLLAMTLAFSALCAGLAMALNISPLMSLGLSIGGLVLLFVTLRKADSAAGIFWVFAFTGMEGASLGYMLNHYAGMTNGSELIMQALGLTSVIFIALSAYAVTTKKDFSFLRGFLFAGLIVVIAAALINIFVGNSVAFMAINAGLALLMTGFILFDTSRIVNGGETNYIRATISLYLDFLNLFIAILHLLGIGNDD

SEQ ID NO: 144559 - DNA, 672 bp, Alkalilimnicola ehrlichei MLHE-1
  CDS (1)..(672): transl_table=11
atgacagaccgctaccaggccccagccccggcgcggccggccgagtcggtactggccaccaacaaggtcatccgcaacacctacatgctgctgtccatgacgctgctcttcagcgcggccatggccggcgtctccatggtgcttcaggtaccgcaccccggggtgatcatcaccctggtgggctatttcggcctgctgttcctggtcagctatctgcgtaacagcatctgggcactgcctgctgtattcgccctcaccggcttcatgggctttaccctggggccgattgtcagcgcctacctggccctgcccaacggggggcagatcgtcatgcaggcctttggcggcaccgccgccatcttcctgtcgctgtcggcctacgccctgacctcgcgcaaggacttcagcttcatgggcgggttcctgttcgccggcatcatcgtggcctttctggccgggctggcggcgatctttttccagatgcccatgctctcgctggcggtcagcgtgatgttcgtgctgctgatgtccggtctcatcctgtgggagaccagcaacatcatccacggcggcgagaccaactacgtcatggccaccgtcaccctgtttgtggccatcttcaacctgttcatcagcctcctgaacatcctcggcgtgatgaacagcgactga

SEQ ID NO: 144560 - protein, 223 aa, Alkalilimnicola ehrlichei MLHE-1
MTDRYQAPAPARPAESVLATNKVIRNTYMLLSMTLLFSAAMAGVSMVLQVPHPGVIITLVGYFGLLFLVSYLRNSIWALPAVFALTGFMGFTLGPIVSAYLALPNGGQIVMQAFGGTAAIFLSLSAYALTSRKDFSFMGGFLFAGIIVAFLAGLAAIFFQMPMLSLAVSVMFVLLMSGLILWETSNIIHGGETNYVMATVTLFVAIFNLFISLLNILGVMNSD

SEQ ID NO: 144561 - DNA, 666 bp, Azoarcus sp. BH72
  CDS (1)..(666): transl_table=11
atggaaaaccgtgtaactgcccttggccggtcggaagcctcgacgctgtcgaccaacaaggtcatccgcaacacctacatgctgctgtcgatgacgctcgcgttctcggcgctcaccgcgggtgtgtccctttcgctgggattgccgcacccgggcatcctgatcacgctggtgggttatttcgggctgctgttcctgaccaccaagttccgaaacagcggtctgggcgtgctgttcgtgttcgcgctgacgggcttcatgggctatacgctcggcccgatcctgtcgtactacctggcgctgcccaacggtagtcaggtggtgatgcaggccatgggcggtaccgcagcgatcttcctcggcctgtcggcttacgccctgacgacccggaaggacttttccttcatgggcggcttcctgatggtaggcatcctggttgccttcctggcgggcctgggcgcggtgttcttcgaaatgccgggcctgtcgctggcggtgtcggcgatgttcgtgctgctcatgtcgggcctgatcctgttcgagacgagcaacatcatccacggtggcgaaacgaactacgtgatggctacggtgtcgctgtacgtgtcgatctacaacctcttcacgagcctgctccacctgctgggtttcgccagcaacgactga

SEQ ID NO: 144562 - protein, 221 aa, Azoarcus sp. BH72
MENRVTALGRSEASTLSTNKVIRNTYMLLSMTLAFSALTAGVSLSLGLPHPGILITLVGYFGLLFLTTKFRNSGLGVLFVFALTGFMGYTLGPILSYYLALPNGSQVVMQAMGGTAAIFLGLSAYALTTRKDFSFMGGFLMVGILVAFLAGLGAVFFEMPGLSLAVSAMFVLLMSGLILFETSNIIHGGETNYVMATVSLYVSIYNLFTSLLHLLGFASND

SEQ ID NO: 144563 - DNA, 684 bp, Neisseria meningitidis FAM18
  CDS (1)..(684): transl_table=11
atgcaacacgacgtttacgactacaccgcgcatacggtttctaaaaacaccgtcctgcagaaaacctaccgcctgctcggattttcattcattccggcagccgcaggcgcggcacttgccgccaatgccggtttcaatttttacgccgccttcggttcgcgctggatagggtttgccgtcgtgttggcgtttttctacggtatgatccacttcatcgagaaaaaccgttacagcaataccggcgttaccctgctgatggtattcacattcggtatgggcgtattgatcggccccgtgctgcaatacgcgctccatattgccgacggtgcgaaaatcgtcggcattgccgccgcgatgaccgccgccgtctttttaacgatgtccgccttggcgcgccgaacccggctcgatatgaacgcgctcggacgcttcctgaccgtaggtgcggtcattctgatggtcgccgtggttgccaatctgtttttgggtattcccgcactcgccctgaccatttccgccggttttgtcttgttcagttccttaatgattatgtggcaggtacgcaccgtcatcgacggcggcgaagacagccacatcagcgcggcactgacactgtttatctcgctttacaacatcttcagcagcctgctgaacatcctgttgtctttaaacggcgaggattga

SEQ ID NO: 144564 - protein, 227 aa, Neisseria meningitidis FAM18
MQHDVYDYTAHTVSKNTVLQKTYRLLGFSFIPAAAGAALAANAGFNFYAAFGSRWIGFAVVLAFFYGMIHFIEKNRYSNTGVTLLMVFTFGMGVLIGPVLQYALHIADGAKIVGIAAAMTAAVFLTMSALARRTRLDMNALGRFLTVGAVILMVAVVANLFLGIPALALTISAGFVLFSSLMIMWQVRTVIDGGEDSHISAALTLFISLYNIFSSLLNILLSLNGED

SEQ ID NO: 144565 - DNA, 693 bp, Acidovorax sp. JS42
  CDS (1)..(693): transl_table=11
atgaacccagaaatcaccagtgtcggctccgcgggctatggcatctcgcaggagcagcgccaccgcgtgctgcgcaacacgtactggctgctggcgctcagcctgctgcccaccgtgctgggcgcctggatcggcgtggccacgggcatcacgcagtcgctgcgcggcggcctggggctgatcgtgttcctcggcggcgccttcggcttcatgttcgccatcgagaagaccaagcgctctgccgcgggcgtgccggtgctgctggccttcaccttcttcatgggcctgatgctgtcgcgcctgatcggcatggtgctgggcttcaagaacggcaccgacctcatcatgacggccttcgccggcacggcgggcgtgttcttcgtcatggccagcctggccagcgtcatcaagcgcgacctgtcaggcatgggcaagtggctgttcgtgggcgcgctggtgctcatggtgggcgccatcatcaacgtgttcgtgggctcgtcggccggcatgatggccatctcggtggcggcgatcggcatcttcagcgcctacatgctgtacgacctgaagcagatcctggacggcggcgagaccaactacatcagcgccacactcgcgctgtacctggacatcttcaacgtgttccagagcctgctggccctgctgggcatcatgggcggcgagcgcgactga

SEQ ID NO: 144566 - protein, 230 aa, Acidovorax sp. JS42
MNPEITSVGSAGYGISQEQRHRVLRNTYWLLALSLLPTVLGAWIGVATGITQSLRGGLGLIVFLGGAFGFMFAIEKTKRSAAGVPVLLAFTFFMGLMLSRLIGMVLGFKNGTDLIMTAFAGTAGVFFVMASLASVIKRDLSGMGKWLFVGALVLMVGAIINVFVGSSAGMMAISVAAIGIFSAYMLYDLKQILDGGETNYISATLALYLDIFNVFQSLLALLGIMGGERD

SEQ ID NO: 144567 - DNA, 669 bp, Pseudoalteromonas tunicata D2
  CDS (1)..(669): transl_table=11
atggggtttaatcatacttatagtaatgaacgttctgttcattctgttgtagaaacgaataaagttttacgcaatacctatcttctgttaggcatgacattagcatgtagtgctgtaacagccgggatctcaatggctttacaacttccttattttatggggttggtgtttagtattattgggtttggtttattgtttgttgtaaacaaaaaagccgatagcgcatctgggattggttggatttttgcttttactgcctgtatgggcgcaggccttggcccattattaaaccactacgctgcaatgccaagtggccccatgttaataatgcaagcattaggctcaactgcattagtattttttggcctttcggcttacgctatgaccactaagaaagacttctcttatcttggaggatttttaacagttggtttattagtggtaatcgtcgcaagcttagtgaatatctttttaggtagtagtacagtgtttctagccgtaaatgctgctgttatcttcattatgtctggttttatcttgtttgatacaagccgcattattaatggtggtgagactaattatattcgcgccactttgtcgctttatttaaatatctataacctgtttgtttcaatcttgcagttattaggttttgcaaataatgattaa

SEQ ID NO: 144568 - protein, 222 aa, Pseudoalteromonas tunicata D2
MGFNHTYSNERSVHSVVETNKVLRNTYLLLGMTLACSAVTAGISMALQLPYFMGLVFSIIGFGLLFVVNKKADSASGIGWIFAFTACMGAGLGPLLNHYAAMPSGPMLIMQALGSTALVFFGLSAYAMTTKKDFSYLGGFLTVGLLVVIVASLVNIFLGSSTVFLAVNAAVIFIMSGFILFDTSRIINGGETNYIRATLSLYLNIYNLFVSILQLLGFANND

SEQ ID NO: 144569 - DNA, 669 bp, Photobacterium sp. SKA34
  CDS (1)..(669): transl_table=11
atgaacgatcgtatagttaatcgtgacggcggttacgaaggcttactatctaccaacaaggttctacgtaacacctacttcctactttcgttaactttgttattttctgcaggtattgcaggtgtagcgatggcaatgaatgtaccgccagtacactggattgtattacttgtaggtttctatggtttaattttcttaaccgaacgtaaccgagagagtagcttgggcttagttttcgtcttcgcactaactggatttatgggttataccttaggtccaattctaaacatgtatgttggcgcgggtatgggtgatgttgtaatgacagccctaggcggtacagcggtaactttccttggttgttcagcttacgcactaaccactaagcgtgacctatcgttcttaaacggtatgttaatggcaggctttatcgcaattattgttgctgtggttgctaatatcttcttgaagatgccaatgctgtcacttgctattagcggtatgtttgttctgttctcatcagctgcaattctattgacaacacagtcaattgttcgtggtggtgaaacaaactacatctcagcaacagtaacgttgtacgtatcaatctacaacctgttcctaagcttgttgcaaattcttggtgttatcaatagcgataataactag

SEQ ID NO: 144570 - protein, 222 aa, Photobacterium sp. SKA34
MNDRIVNRDGGYEGLLSTNKVLRNTYFLLSLTLLFSAGIAGVAMAMNVPPVHWIVLLVGFYGLIFLTERNRESSLGLVFVFALTGFMGYTLGPILNMYVGAGMGDVVMTALGGTAVTFLGCSAYALTTKRDLSFLNGMLMAGFIAIIVAVVANIFLKMPMLSLAISGMFVLFSSAAILLTTQSIVRGGETNYISATVTLYVSIYNLFLSLLQILGVINSDNN

SEQ ID NO: 144571 - DNA, 672 bp, Oceanospirillum sp. MED92
  CDS (1)..(672): transl_table=11
atgaatacatctatacgatcatctgcaactcaaacgcaaacatcggcgttggagtccaataaggtactacgcaacacctatgcattgttgtcccttacattgctgttcagtgctatcactgcgggtgcatctttactactccagctgcctcaccccggcatcatcatctctttagtaggcttctttggtctgtattttctgaccaccaagcttcgcaatagtatatgggggctgccttcagtgtttgctctcacaggtttcatgggatacaccctggggccaatcattggtcattatctgtcgatgcccggcggcggtacgattgtgatgaatgcgatggccatgacggggcttatttttctgagcttgtcggcctatgtgttaacaacccgtaagaactttagctttatgggtggctttttgatggttggtattctgctggcgttttttgctgggctcgcagctgtatttttccagatccctgcgttagcactagcggtttcagcaatgttcgtgctgttgatgtcaggtttcattctttatgaaaccagcaatatccttcatggaggtgagaccaattacatcatggcaacggtttccctatatgtatcgatttacaatttgtttaccagtttgttacagattctaggcttcctcggaggcgatgaataa

SEQ ID NO: 144572 - protein, 223 aa, Oceanospirillum sp. MED92
MNTSIRSSATQTQTSALESNKVLRNTYALLSLTLLFSAITAGASLLLQLPHPGIIISLVGFFGLYFLTTKLRNSIWGLPSVFALTGFMGYTLGPIIGHYLSMPGGGTIVMNAMAMTGLIFLSLSAYVLTTRKNFSFMGGFLMVGILLAFFAGLAAVFFQIPALALAVSAMFVLLMSGFILYETSNILHGGETNYIMATVSLYVSIYNLFTSLLQILGFLGGDE

SEQ ID NO: 144573 - DNA, 681 bp, Oceanospirillum sp. MED92
  CDS (1)..(681): transl_table=11
atgcgtaccgttaatacttacgatactcgctctgaacaatccgttcttcagacgaataaagtcattcgcaatacttatatgcttctggcaatgacaatggtggttagcaccatcactgccggtatttcaatggcgctgcagatgccgtttattgtttacatcggcagtttcgttcttagctttgtaatgctgtttattcttaataaaaagcagaacagtgcggcagcactacccctagtatttctgtttacaggcatgatggggttcggtctcggaccgttacttaaccattatctagcaatggcaaatggtggccagatcatcatgactgctcttggaactaccgccctcacattctttggcctctctgcatacgtccttaccagcaaaaaagacttcagttttatgggcggttttctggctgcgggtatgatggttgcactgatcaccatggttgcgctcttcgtcctacctctatttggcattgaacttggtgcacttcaccttgcattttctgctttggtagtactactgatgtgtggcttcattctttacgatacaagcaatatcgtgaatggcgtttataccaactacatcatggcaactgtcagcttgtacctgaacatttacaacctattcattcatctgcttagtctagtgggtgtattaagtgacgactga

SEQ ID NO: 144574 - protein, 226 aa, Oceanospirillum sp. MED92
MRTVNTYDTRSEQSVLQTNKVIRNTYMLLAMTMVVSTITAGISMALQMPFIVYIGSFVLSFVMLFILNKKQNSAAALPLVFLFTGMMGFGLGPLLNHYLAMANGGQIIMTALGTTALTFFGLSAYVLTSKKDFSFMGGFLAAGMMVALITMVALFVLPLFGIELGALHLAFSALVVLLMCGFILYDTSNIVNGVYTNYIMATVSLYLNIYNLFIHLLSLVGVLSDD

SEQ ID NO: 144575 - DNA, 675 bp, Rickettsiella grylli
  CDS (1)..(675): transl_table=11
atggcttcaagtaaaatattattaaatcctagcttagaatctgttttagcgaccaataccgtcttacggaatacctacattcttttagggttaacactgattttcagcgcatttacagcggggttggcattgattacaaatgcgccaccactcaatccattgattacactgattggatatttcggcttattatttttaactaacttcacgcggaatagttcttggggtttgttatccgtgtttagtttaactggatttatgggatatacattgggacctattttgaatcattatatccacggatttaccaatggacatgaattaattatgatgtcattgggtgcaacgggccttatctttttcgcgttgtctgcttatgcgttaaccaccaagaaagattttagtttcatggcaagttttctgatggtgggaatgattgtggcttttctagccagtataggtgcacttttcttccatattcctgcattgatgctgaccctgtctgcggtatttatattactgtcatcgggtataattttgctacaaaccagccaaattatccatgggggagaaacgaattacattatggcaacagtgacactttatgtatcactttataacatctttttaagtttattaaatttactaggggcgtttagtgggaatcgagattag

SEQ ID NO: 144576 - protein, 224 aa, Rickettsiella grylli
MASSKILLNPSLESVLATNTVLRNTYILLGLTLIFSAFTAGLALITNAPPLNPLITLIGYFGLLFLTNFTRNSSWGLLSVFSLTGFMGYTLGPILNHYIHGFTNGHELIMMSLGATGLIFFALSAYALTTKKDFSFMASFLMVGMIVAFLASIGALFFHIPALMLTLSAVFILLSSGIILLQTSQIIHGGETNYIMATVTLYVSLYNIFLSLLNLLGAFSGNRD

SEQ ID NO: 144577 - DNA, 681 bp, Oceanobacter sp. RED65
  CDS (1)..(681): transl_table=11
atggacccacaagtatatacacagcacgcaagtgcccaatcggttgataccaacaaggtattgcgtaacacgtatttgctactcagcatgacccttgtgttcagcgctctaaccgctggcgcgagcatggctatgaacttaagtcatagtgctgcgttaatcatgatgctggcatctcttgccattgtctggtttgtattaccgcgtgttgctaactcagcaatgggcctacctgttgttttcctattcacaggcctgctaggcgcatcattaggtcccatgcttaaccactaccttgccctaccaaacggtagcagcatcgtaatgcaagcgctgggcggtaccgctgccattttcctttctttgtccgcttacgtgacgacgaccaagaaagactttagcttcatgggcggtttcctattcgcaggccttatggtcgtaattgtaggtgctattggtgccatgatcgcaagctggggctttggtgtagacgtttctgcgttctctctagccatctcggcggctgtggttttactaatgtctggcttcatccttttcgatactagccgtatcgttaacggcggtgaaaccaactacatcatggcaacagttggtctatacctaacgatctacaacctgtttactagtcttttacaccttatcggtgcaatggacgaataa

SEQ ID NO: 144578 - protein, 226 aa, Oceanobacter sp. RED65
MDPQVYTQHASAQSVDTNKVLRNTYLLLSMTLVFSALTAGASMAMNLSHSAALIMMLASLAIVWFVLPRVANSAMGLPVVFLFTGLLGASLGPMLNHYLALPNGSSIVMQALGGTAAIFLSLSAYVTTTKKDFSFMGGFLFAGLMVVIVGAIGAMIASWGFGVDVSAFSLAISAAVVLLMSGFILFDTSRIVNGGETNYIMATVGLYLTIYNLFTSLLHLIGAMDE

SEQ ID NO: 144579 - DNA, 669 bp, Oceanobacter sp. RED65
  CDS (1)..(669): transl_table=11
atgaacaacgatattatcaatcaagtagatactccagttgttagtcagggcgttaagaataaggtgcttaaaaacacctatatgctgctcgcaatgacactactttttagtggtgcggttgctgccgtatccacgtctatgaatttgccgcatccggggctgctgattacgcttgtcgtattctttgggctactgtttgcgatctctaagtttcagaatagtgccatgggcattgtactcgtatttgcgttgactgggtttatggggctcaccttgggtccaatcctaaatgcatacttgagtctaccgggcggtagttcgatcgtgatgaatgccatgggggtcaccggcgcaattttcttgggtttgtctgcctatgtgctgacaacgaaaaaagattttagctttatgggcggcttccttacggtcggtattatcgttggctttttagctggtttaggcgccattttctttgagatgccggcattatcgcttgcggtttcggccatgtttgtattgctcatgtcgggtctcatcttgtatgaaaccagcaatattataaacggcggcgaaaccaattatattatggcgacaacaacactgtttgtttcaatctttaatttgtttactagcttgttgcacttgttgggttttgcgagtcaggaataa

SEQ ID NO: 144580 - protein, 222 aa, Oceanobacter sp. RED65
MNNDIINQVDTPVVSQGVKNKVLKNTYMLLAMTLLFSGAVAAVSTSMNLPHPGLLITLVVFFGLLFAISKFQNSAMGIVLVFALTGFMGLTLGPILNAYLSLPGGSSIVMNAMGVTGAIFLGLSAYVLTTKKDFSFMGGFLTVGIIVGFLAGLGAIFFEMPALSLAVSAMFVLLMSGLILYETSNIINGGETNYIMATTTLFVSIFNLFTSLLHLLGFASQE

SEQ ID NO: 144581 - DNA, 663 bp, Vibrio sp. Ex25
  CDS (1)..(663): transl_table=11
atgaacagtccaatgtttacccgcacttcaacacaagaaagtgctctacaaacaaacaaagtgttgcgtaatacttacgcactactttcaatgacgcttttatggtcggcagtcgttgctggcgtagcaatggcatttaacctgccacatccaggaatcatcctaatgttggttggtttctacggcctgttattcttaacagagaaaaaccgtaacaacagccttggccttgtgtttacgttcttattcactggtttcttaggctacacgattggtccaatcttaaacatgtacatcggtgctgggatgggcgatatcgtattaaccgctctaggtggtacggcgctatctttcatggcggcatcagcttatgcactaacaacaaaacgtgacctatctatgatgggcggcttgatgctatcgctgtttgttgtgcttgttgtgggtatgattgcaagcttctttattcaatcaaccatgttacacttggcgttgagcagcttgtttatcattttctctacgatggcgatcctgatgacaacacaaagcattattcgtggcggtgaaacaaactacatctctgcgacagtgactttgtatgtatcaatctacaacatcttcatcagcctactaagcattctaggtattatgaacgacgattaa

SEQ ID NO: 144582 - protein, 220 aa, Vibrio sp. Ex25
MNSPMFTRTSTQESALQTNKVLRNTYALLSMTLLWSAVVAGVAMAFNLPHPGIILMLVGFYGLLFLTEKNRNNSLGLVFTFLFTGFLGYTIGPILNMYIGAGMGDIVLTALGGTALSFMAASAYALTTKRDLSMMGGLMLSLFVVLVVGMIASFFIQSTMLHLALSSLFIIFSTMAILMTTQSIIRGGETNYISATVTLYVSIYNIFISLLSILGIMNDD

SEQ ID NO: 144583 - DNA, 666 bp, Alteromonadales bacterium TW-7
  CDS (1)..(666)
atggcgtttaatcaatcgtacaataccgctaaaccggtaatgtctaccattgaaacaaacaaggtacttaaaaacacctactttttacttgcgatgacacttgcatttagtgcagtgactgccggtatctcaatggcactacaattaccttactttatgggaattgtgttcacactggtttcgtttggtttattatttgttgtaaacaaaaaagctgacaccgcatctggtgtattttgggtatttgctttcacaggtttaatgggggctggtttaggtccaatgttaaaccattacgctgccatgcctaatggcccaatgcttataatgcaagctcttggttcaacagcacttattttctttggtctatctgcatatgcgctcaacaccaaaaaagacttctcttttatgggcggctttttaacggttggcctaattgtggttattgttgcaagcattgttaacatattcatcggtagttctttaatgtttatggtgcttaacgctgcggttgtattaattatgtctggcttaattttatttgatacaagccgcattattaacggcggagaaactaactacattcgcgctacagtatctttatacctaaatgtgtacaatctatttacttcactactgcacctacttggcgcaagtgatgactaa

SEQ ID NO: 144584 - protein, 221 aa, Alteromonadales bacterium TW-7
MAFNQSYNTAKPVMSTIETNKVLKNTYFLLAMTLAFSAVTAGISMALQLPYFMGIVFTLVSFGLLFVVNKKADTASGVFWVFAFTGLMGAGLGPMLNHYAAMPNGPMLIMQALGSTALIFFGLSAYALNTKKDFSFMGGFLTVGLIVVIVASIVNIFIGSSLMFMVLNAAVVLIMSGLILFDTSRIINGGETNYIRATVSLYLNVYNLFTSLLHLLGASDD

SEQ ID NO: 144585 - DNA, 684 bp, marine gamma proteobacterium HTCC2080
  CDS (1)..(684): transl_table=11
atgagcgacaagccagtcttttcatctcaagtagacgtgttaggggcagacaatgccgttagcacgaataaagttctcagaaatacatacatgcttctaggtatgaccctagccttcagtgcagccaccgcggggacatctatggccctcggtctctcacacatggcgggacttgtgatgatgctagtgggttttggcctgctatttgttgttaaccgcatggcagacacggctaaaggtctccccgccatttttgccttcactggtgtaatgggcgcggcactcggccccatgcttaattattacgtcgcgctacctgggggccctagtatggtcatgcaggccttgggcggcactgcgctggtctttttcagcttgtctgcgtacgcattgaacagccgcaaagattttagttacatgggcgggttcctgatgacaggactcatcgtagcaatcgtagcgagcattgcgaatattttcctcggaattccagcgctgtcactaacgatttccgctgcgataattatgattatgtcgggcttgattttatttgataccagccgaattattaacggcggcgaaactaattacattcgcgcaactgtatcgctctacctcaacatttataacttgtttatccacatgctccacctcgtgggtgcctttggcggcggcgacgactga

SEQ ID NO: 144586 - protein, 227 aa, marine gamma proteobacterium HTCC2080
MSDKPVFSSQVDVLGADNAVSTNKVLRNTYMLLGMTLAFSAATAGTSMALGLSHMAGLVMMLVGFGLLFVVNRMADTAKGLPAIFAFTGVMGAALGPMLNYYVALPGGPSMVMQALGGTALVFFSLSAYALNSRKDFSYMGGFLMTGLIVAIVASIANIFLGIPALSLTISAAIIMIMSGLILFDTSRIINGGETNYIRATVSLYLNIYNLFIHMLHLVGAFGGGDD

SEQ ID NO: 144587 - DNA, 720 bp, Marinobacter sp. ELB17
  CDS (1)..(720): transl_table=11
atggaaaacagacagtacaacgttcagcagagtgctagcgacaagattgcccgcgggtccgcgaccgcacctatcagtgcttcagcgaccaaggttctgcgcaacacgtacaccctgcttgcaatgacgctggcattcagtgcagttatggcggctgttgcaatgtcggtcggcctgggccggggcacaagcctgatgtgtagcctgggcgctattgctctggtttggtttgtattgccacgtaccgccaacagctctgccggtattgccgtggtgttcgcattcaccggcctgctgggtctttcactaggcccgattctgcttcactaccttcagttcgccaacggcgggcagattatcacccaggctcttggcggaaccgctctggtgttctttgcgctttctggctacgttctgaccacaaaaaaagacttcagcttcatgcgcggcatgctggttgcgggcttggttgtggtactgattgcggccgtaggtggcatagtggccagtatgtttggagttgagataacggccttcagcctcgctctcagtgctgctatcgtgctgctgatgtcaggcttcattctgtacgacacaagtcgtatcgttaacggtggtgaaaccaactacatcatggcaaccaccgggttatacctgaacatctacaacctgtttttggccttgctgcacctgctgggtgcgttcggtggtaacgactga

SEQ ID NO: 144588 - protein, 239 aa, Marinobacter sp. ELB17
MENRQYNVQQSASDKIARGSATAPISASATKVLRNTYTLLAMTLAFSAVMAAVAMSVGLGRGTSLMCSLGAIALVWFVLPRTANSSAGIAVVFAFTGLLGLSLGPILLHYLQFANGGQIITQALGGTALVFFALSGYVLTTKKDFSFMRGMLVAGLVVVLIAAVGGIVASMFGVEITAFSLALSAAIVLLMSGFILYDTSRIVNGGETNYIMATTGLYLNIYNLFLALLHLLGAFGGND

SEQ ID NO: 144589 - DNA, 663 bp, Moritella sp. PE36
  CDS (1)..(663): transl_table=11
atgcaacaacgtacgattcagactcagtcgcaagcaagcgtactcgcgacgaataaggtacttaaaaatacctatatgctattagcgatgacactggcgttttcagcgttagttgctggtgcagtggttacattaaacttaccttctccaggcttcatcattaccctagtcggtgtgtatggtttaatgtacctaacagaaaaaaaccgtaacaacacaatgggtattctatttgtattcttgttcaccggtttcttaggctataccgtaggcccattaattaaccgatacataggtgctggtatgggtgacattgtggtaatggcgtttgctggtactgcatttactttctttgctctgtctgcatatgtattaacaacaaagaaggatatgtctttccttaatggcatgatgatggctggttttgtggtacttatcgtggctatgatcggtaacatcttcttacaaattccagcgcttagccttgcaatcagtgccatgttcattctgttttcatctgctgctatcttgatgcaaacaagttcaatcattcatggtggtgaaacaagctacatctcagcgacggtaactatcttcctatcactgtataatatctttgttagcttattacaaatcttaggtattatgagtagcgacgactaa

SEQ ID NO: 144590 - protein, 220 aa, Moritella sp. PE36
MQQRTIQTQSQASVLATNKVLKNTYMLLAMTLAFSALVAGAVVTLNLPSPGFIITLVGVYGLMYLTEKNRNNTMGILFVFLFTGFLGYTVGPLINRYIGAGMGDIVVMAFAGTAFTFFALSAYVLTTKKDMSFLNGMMMAGFVVLIVAMIGNIFLQIPALSLAISAMFILFSSAAILMQTSSIIHGGETSYISATVTIFLSLYNIFVSLLQILGIMSSDD

SEQ ID NO: 144591 - DNA, 699 bp, Vibrio sp
  CDS (1)..(699)
atgtacttaaaagaaagtctcttatcgaggaagattatgaacagtccaatgtttacccgcacttcaacacaagaaagtgctctacaaacaaacaaagtgttgcgtaatacttacgcactactttcaatgacgcttttatggtcggcagtcgttgctggcgtagcaatggcatttaacctgccacatccaggaatcatcctaatgttggttggtttctacggcctgttattcttaacagagaaaaaccgtaacaacagccttggccttgtgtttacgttcttattcactggtttcttaggctacacgattggtccaatcttaaacatgtacatcggtgctgggatgggcgatatcgtattaaccgctctaggtggtacggcgctatctttcatggcggcatcagcttatgcactaacaacaaaacgtgacctatctatgatgggcggcttgatgctatcgctgtttgttgtgcttgttgtgggtatgattgcaagcttctttattcaatcaaccatgttacacttggcgttgagcagcttgtttatcattttctctacgatggcgatcctgatgacaacacaaagcattattcgtggcggtgaaacaaactacatctctgcgacagtgactttgtatgtatcaatctacaacatcttcatcagcctactaagcattctaggtattatgaacgacgattaa

SEQ ID NO: 144592 - protein, 232 aa, Vibrio sp
MYLKESLLSRKIMNSPMFTRTSTQESALQTNKVLRNTYALLSMTLLWSAVVAGVAMAFNLPHPGIILMLVGFYGLLFLTEKNRNNSLGLVFTFLFTGFLGYTIGPILNMYIGAGMGDIVLTALGGTALSFMAASAYALTTKRDLSMMGGLMLSLFVVLVVGMIASFFIQSTMLHLALSSLFIIFSTMAILMTTQSIIRGGETNYISATVTLYVSIYNIFISLLSILGIMNDD

SEQ ID NO: 144593 - DNA, 663 bp, Haemophilus influenzae
  CDS (1)..(663): transl_table=11
atgcaatcacgtcttattgtggatgctcaaaaagaatcgttactcagcacacataaagtgttgcgtaacacgtattttttactgggattaacaatggctttttcagcggttgttgcgtttatttcaatgagcttaaacttgccttatccaaatattattgtgttactagtgggtttttatggcttacttttcttaaccaataaattagctgatcgccctgctggtattttggcggcctttgctttcactggatttatgggatacaccatcgggccaattttaaatatgtatgtggcacgtggaatggaagatttgattatgcttgcattcgcaggaactgctatcgtattttttgcgtgttccgcttatgtattgactacgaaaaaagatatgtcattcttatcaagcgcaatgttcgcattatttattgtgttattgcttggtatggtggcgagtttcttcttccaaattcctgctttatcggtcgcaattagtgcattatttgtagtgttctcaacaatgaccattttgtatgaaaccagtaatattattcacggtggagaaacaaattacattcgcgcaaccgtgaacatctatgtttcaatctacaatttattcttgagtttattaagattactttctatcttttcaagtgatgaataa

SEQ ID NO: 144594 - protein, 220 aa, Haemophilus influenzae
MQSRLIVDAQKESLLSTHKVLRNTYFLLGLTMAFSAVVAFISMSLNLPYPNIIVLLVGFYGLLFLTNKLADRPAGILAAFAFTGFMGYTIGPILNMYVARGMEDLIMLAFAGTAIVFFACSAYVLTTKKDMSFLSSAMFALFIVLLLGMVASFFFQIPALSVAISALFVVFSTMTILYETSNIIHGGETNYIRATVNIYVSIYNLFLSLLRLLSIFSSDE

SEQ ID NO: 144595 - DNA, 672 bp, Vibrio cholerae
  CDS (1)..(672): transl_table=11
atgaatacgccaatgtttaccagaacttccagcttggaacgtactcttgaaaccaacaaggttttgaagaatacctacttcctgctttctatgacccttgtcaccagtgcgattgcagcaatggcgactatggctatcggcatttctcctatcgttgctttggtgatgcagttggctgccattggcattttgtttttcgtgatgccaaaagcgattaactcatcatcaggcctagtatggacgttcgtctttactggactgatgggaggagctcttggccctatgctgaatttctatgcggcgatgccaaatggcccaatcgttattgcgcaagcactcggcctgactggcatggtgtttttaggcctgtcggcttacaccattaccagcaagaaagatttctctttcatgcgtaatttcctgtttgctggcttgatcattgtgattgttgcggcattgattaacatctttgttggctcaacggtagctcatctggctatcagtagcgtttctgcactggtattttcgggtttcattctgtttgataccagccgtattgtgcgtggtgaagaaaccaactatatctcagcaacgatttctatgtacttgaatatcctgaacctgttcactagcttgttgagcattctgggtatcatgaacaataacgattaa

SEQ ID NO: 144596 - protein, 223 aa, Vibrio cholerae
MNTPMFTRTSSLERTLETNKVLKNTYFLLSMTLVTSAIAAMATMAIGISPIVALVMQLAAIGILFFVMPKAINSSSGLVWTFVFTGLMGGALGPMLNFYAAMPNGPIVIAQALGLTGMVFLGLSAYTITSKKDFSFMRNFLFAGLIIVIVAALINIFVGSTVAHLAISSVSALVFSGFILFDTSRIVRGEETNYISATISMYLNILNLFTSLLSILGIMNNND

SEQ ID NO: 144597 - DNA, 669 bp, Pseudomonas aeruginosa
  CDS (1)..(669): transl_table=11
atgcaagaacagcaatatcagctgaactccgccgtcgcggaacagcgtgaagtcagcggcgttctgcgcaatacctacggcctgctggcactcaccctggccttcagcggcctggtggcctacgtttcgcagcagatgcgcctgccctatccgaacgtgttcgtggtgctgatcggcttctacggcctgttcttcctcaccgtgaagctgcgcaacagcgcctggggtctggtcagcactttcgccctgaccggcttcatgggctacacgctcggcccgatcctcaacatgtacctcggcctgcccaacggcggcagcgtcatcacttcggcgttcgccatgaccgccctggtgttcttcggcctgtccgcctatgtgctgaccacccgcaaggacatgagcttcctgtccggcttcatcaccgccggcttcttcgtcctgctgggcgccgtgctggtatcgctgttcttccagatcagtggcctgcaactggcgatcagcgccggcttcgtcctgttctcctcggcgatgatcctctaccagaccagcgcgatcatccacggcggcgaacgcaactacatcatggccaccatcagcctgtacgtgtcgatctacaacctgttcatcagcctgttgcagatcttcggcatcgccggcggcgacgactga

SEQ ID NO: 144598 - protein, 222 aa, Pseudomonas aeruginosa
MQEQQYQLNSAVAEQREVSGVLRNTYGLLALTLAFSGLVAYVSQQMRLPYPNVFVVLIGFYGLFFLTVKLRNSAWGLVSTFALTGFMGYTLGPILNMYLGLPNGGSVITSAFAMTALVFFGLSAYVLTTRKDMSFLSGFITAGFFVLLGAVLVSLFFQISGLQLAISAGFVLFSSAMILYQTSAIIHGGERNYIMATISLYVSIYNLFISLLQIFGIAGGDD

SEQ ID NO: 144599 - DNA, 663 bp, Pasteurella multocida
  CDS (1)..(663): transl_table=11
atggaatctcgcattgttctagatagcagagaaacatctctacttaacacccacaaagtgttacgcaatacttatttcttattaggtttaaccctcgctttttcagcagtggtcgcttacatctcaatgagcctaaacttaccacgcccaggtctcattttgatgctagcaggcttctacggtttattatttttaacttataaattatccaacagtggtttagggattctttctacgttcgcatttaccggctttttaggctatacattaggaccaattttaaatgtctatgtcagtcacggtgcaggtgatattgtcgtcttagcccttgccggcacagcggctgtgttctttgcttgttcagcttatgtgttaacgacaaagaaagacatgtctttcctttctggtaccattttcgctttattcattgtccttttactcggtatggttgccagtttcttcttccaatcaccaatgctttacattgctatcagtggtttattcgtcgtgttctctactttgggtattctctacgaaaccagcaatattattcatggcggagaaaccaactatattcgtgcaacagtcagtattttcgtatcactgtataacttatttattagcttactcaatatcttctcgattttatccaatgaagattaa

SEQ ID NO: 144600 - protein, 220 aa, Pasteurella multocida
MESRIVLDSRETSLLNTHKVLRNTYFLLGLTLAFSAVVAYISMSLNLPRPGLILMLAGFYGLLFLTYKLSNSGLGILSTFAFTGFLGYTLGPILNVYVSHGAGDIVVLALAGTAAVFFACSAYVLTTKKDMSFLSGTIFALFIVLLLGMVASFFFQSPMLYIAISGLFVVFSTLGILYETSNIIHGGETNYIRATVSIFVSLYNLFISLLNIFSILSNED

SEQ ID NO: 144601 - DNA, 693 bp, Helicobacter pylori J99
  CDS (1)..(693): transl_table=11
atggcattgtatgacagagctaattctcgtaacgcgtatgcagaagattctgtgttgcatgaaagcgagctggtaagttttgttaaaacgacttataagttctttgcgggcagtttgttattagcgactgttggggcgttactgggtttaatgaattttcaagccgtagtgcagtataaatgggtattttttatcgctgaaattgtggcgttttttggtttgatgttttctaaatccaaacccggtttgaatttgttcatgctgtttgctttcacttcattatcaggggttactttagtgcctttgttgggtatggtgattgcaaaagctggtttaggagcggtttggcaagctttgggcatgacaactattgtttttggtttgatgagcgtgtatgcccttaagactaaaaacgatctagcgaatatgggtaaaatgctctttatcgctttgattgtggtggtggtgtgttcgctcattaacttgtttttgggtagccccatgttccaagtcgtcattgcgggagcgagtgcgattttattcagtctttatatcgcttatgacactcaaaacatcgttaaaggcatgtatgatagccccattgatgcggcggtgagcttgtatttagactttttgaatgtcttcatttctatcttgcaaatcattggtattttttcagacagagacaaatag

SEQ ID NO: 144602 - protein, 230 aa, Helicobacter pylori J99
MALYDRANSRNAYAEDSVLHESELVSFVKTTYKFFAGSLLLATVGALLGLMNFQAVVQYKWVFFIAEIVAFFGLMFSKSKPGLNLFMLFAFTSLSGVTLVPLLGMVIAKAGLGAVWQALGMTTIVFGLMSVYALKTKNDLANMGKMLFIALIVVVVCSLINLFLGSPMFQVVIAGASAILFSLYIAYDTQNIVKGMYDSPIDAAVSLYLDFLNVFISILQIIGIFSDRDK

SEQ ID NO: 144603 - DNA, 693 bp, Helicobacter pylori
  CDS (1)..(693): transl_table=11
atggcattgtatgacagagcgaattctcgtaatgcgtatgcagaagattctttattgcgtgaaagcgagctagtaagttttgttaaaacgacttacaagttctttgcgggtagtttgttattagcgactattggggcgttactaggtttaatgaattttcaagccgtagtgcagtataaatgggtgttttttatcgctgaaattgcggcgttttttggtttgatgttttctaaatctaaacccggattgaatctgttcatgctgtttgctttcacttcattatcaggggttacgctagtgcctttgttgggtatggtgattgcaaaagctggtttaggagcgatttggcaggctttgggcatgacaactattgtctttggtttgatgagcgtgtatgcccttaagactaaaaacgatctagcgaatatgggtaaaatgctcttcatcgctttgattgtggtggtggtgtgttcgctcattaacttgtttttgggcagccccatgttccaggttgtcattgcgggagcgagtgcgattttattcagtctttatatcgcttatgacacccaaaacatcgttaaaggcatgtatgatagccccattgatgcggcggtgagcttgtatttagactttttgaatgtctttatttctattttgcaaatcattggtattttttcagacagagacacatag

SEQ ID NO: 144604 - protein, 230 aa, Helicobacter pylori
MALYDRANSRNAYAEDSLLRESELVSFVKTTYKFFAGSLLLATIGALLGLMNFQAVVQYKWVFFIAEIAAFFGLMFSKSKPGLNLFMLFAFTSLSGVTLVPLLGMVIAKAGLGAIWQALGMTTIVFGLMSVYALKTKNDLANMGKMLFIALIVVVVCSLINLFLGSPMFQVVIAGASAILFSLYIAYDTQNIVKGMYDSPIDAAVSLYLDFLNVFISILQIIGIFSDRDT

SEQ ID NO: 144605 - DNA, 25 bp, Artificial sequence
  primer
atggatcgtattgttagttcttcac

SEQ ID NO: 144606 - DNA, 22 bp, Artificial sequence
  primer
ttaatcgcggctagcgaagccc

SEQ ID NO: 144607 - protein, 216 aa, Artificial sequence
  consensus sequence
  Variant (3)..(3): Xaa in position 3 is any amino acid
  Variant (7)..(7): Xaa in position 7 is any amino acid
  Variant (10)..(19): Xaa in position 10 to 19 is any amino acid
  Variant (21)..(40): Xaa in position 21 to 40 is any amino acid
  Variant (41)..(49): Xaa in position 41 to 49 is any or no amino acid
  Variant (51)..(63): Xaa in position 51 to 63 is any amino acid
  Variant (64)..(64): Xaa in position 64 is any or no amino acid
  Variant (66)..(72): Xaa in position 66 to 72 is any amino acid
  Variant (74)..(76): Xaa in position 74 to 76 is any amino acid
  Variant (78)..(79): Xaa in position 78 to 79 is any amino acid
  Variant (81)..(83): Xaa in position 81 to 83 is any amino acid
  Variant (85)..(90): Xaa in position 85 to 90 is any amino acid
  Variant (91)..(93): Xaa in position 91 to 93 is any or no amino acid
  Variant (95)..(99): Xaa in position 95 to 99 is any amino acid
  Variant (100)..(100): Xaa in position 100 is any or no amino acid
  Variant (102)..(104): Xaa in position 102 to 104 is any amino acid
  Variant (106)..(108): Xaa in position 106 to 108 is any amino acid
  Variant (110)..(112): Xaa in position 110 to 112 is any amino acid
  Variant (114)..(121): Xaa in position 114 to 121 is any amino acid
  Variant (123)..(123): Xaa in position 123 is any amino acid
  Variant (124)..(124): Xaa in position 124 is any or no amino acid
  Variant (126)..(133): Xaa in position 126 to 133 is any amino acid
  Variant (135)..(136): Xaa in position 135 to 136 is any amino acid
  Variant (138)..(146): Xaa in position 138 to 146 is any amino acid
  Variant (148)..(157): Xaa in position 148 to 157 is any amino acid
  Variant (158)..(163): Xaa in position 158 to 163 is any or no amino acid
  Variant (165)..(174): Xaa in position 165 to 174 is any amino acid
  Variant (177)..(181): Xaa in position 177 to 181 is any amino acid
  Variant (183)..(184): Xaa in position 183 to 184 is any amino acid
  Variant (186)..(188): Xaa in position 186 to 188 is any amino acid
  Variant (191)..(191): Xaa in position 191 is any amino acid
  Variant (195)..(195): Xaa in position 195 is any amino acid
  Variant (198)..(200): Xaa in position 198 to 200 is any amino acid
  Variant (202)..(205): Xaa in position 202 to 205 is any amino acid
  Variant (207)..(207): Xaa in position 207 is any amino acid
  Variant (209)..(210): Xaa in position 209 to 210 is any amino acid
  Variant (213)..(215): Xaa in position 213 to 215 is any amino acid
VLXNTYXLLXXXXXXXXXXAXXXXXXXXXXXXXXXXXXXXXXXXXXXXXGXXXXXXXXXXXXXXGXXXXXXXTXXXGXXLXXXLXXXXXXXXXGXXXXXXAXXXTXXXFXXXSXXXXXXXXDXXSXXXXXXXXGXXVXXXXXXXXXFXXXXXXXXXXXXXXXXSXXXXXXXXXXILXXXXXIXXGXXXGEXNYIXATXXXYXXXXNXFXXLLXXXG

SEQ ID NO: 144608 - protein, 29 aa, Artificial sequence
  protein pattern
  Variant (4)..(4): Xaa in position 4 is any or no amino acid
  Variant (6)..(6): Xaa in position 6 is any or no amino acid
  Variant (8)..(8): Xaa in position 8 is Ile or Val
  Variant (9)..(9): Xaa in position 9 is any amino acid
  Variant (11)..(11): Xaa in position 11 is Ala or Thr
  Variant (12)..(12): Xaa in position 12 is any amino acid
  Variant (13)..(13): Xaa in position 13 is Ala, Asp, Gly, Asn, Ser or Thr
  Variant (14)..(14): Xaa in position 14 is Ile, Leu or Val
  Variant (15)..(15): Xaa in position 15 is Phe or Tyr
  Variant (16)..(16): Xaa in position 16 is Ile, Leu, Met or Val
  Variant (17)..(17): Xaa in position 17 is Ala, Asp, Asn, Ser or Thr
  Variant (18)..(18): Xaa in position 18 is Phe, Ile, Leu or Val
  Variant (19)..(19): Xaa in position 19 is any amino acid
  Variant (21)..(21): Xaa in position 21 is Ile, Leu or Val
  Variant (23)..(24): Xaa in position 23 to 24 is any amino acid
  Variant (25)..(25): Xaa in position 25 is Phe, Ile, Leu or Met
  Variant (26)..(26): Xaa in position 26 is Ile or Leu
  Variant (27)..(27): Xaa in position 27 is any amino acid
  Variant (28)..(28): Xaa in position 28 is Phe, Ile or Leu
  Variant (29)..(29): Xaa in position 29 is Phe, Ile, Leu or Val
GGEXNXYXXAXXXXXXXXXNXFXXXXXXX

SEQ ID NO: 144609 - protein, 19 aa, Artificial sequence
  protein pattern
  Variant (2)..(3): Xaa in position 2 to 3 is any or no amino acid
  Variant (5)..(5): Xaa in position 5 is any amino acid
  Variant (6)..(6): Xaa in position 6 is any or no amino acid
  Variant (10)..(10): Xaa in position 10 is any amino acid
  Variant (13)..(13): Xaa in position 13 is Ala, Gly or Ser
  Variant (14)..(14): Xaa in position 14 is Ile, Leu or Met
  Variant (15)..(15): Xaa in position 15 is Ser or Thr
  Variant (16)..(16): Xaa in position 16 is Phe, Ile, Leu, Met or Val
  Variant (17)..(18): Xaa in position 17 to 18 is any amino acid
  Variant (19)..(19): Xaa in position 19 is Ser or Thr
VXXLXXNTYXLLXXXXXXX

SEQ ID NO: 144610 - protein, 19 aa, Artificial sequence
  protein pattern
  Variant (2)..(3): Xaa in position 2 to 3 is any or no amino acid
  Variant (5)..(5): Xaa in position 5 is any amino acid
  Variant (6)..(6): Xaa in position 6 is Phe, Leu, Met or Val
  Variant (7)..(7): Xaa in position 7 is any amino acid
  Variant (9)..(10): Xaa in position 9 to 10 is any amino acid
  Variant (12)..(12): Xaa in position 12 is Ala, Gly, Ser or Val
  Variant (13)..(13): Xaa in position 13 is any amino acid
  Variant (14)..(14): Xaa in position 14 is Ile, Leu, Met or Val
  Variant (15)..(15): Xaa in position 15 is Ile, Leu or Val
  Variant (16)..(18): Xaa in position 16 to 18 is any amino acid
  Variant (19)..(19): Xaa in position 19 is Ala, Ile, Leu or Val
FXXTXXXGXXLXXXXXXXX

SEQ ID NO: 144611 - DNA, 1371 bp, Escherichia coli K12
  CDS (1)..(1371)
atggaattatcctcactgaccgccgtttcccctgtcgatggacgctacggcgataaagtcagcgcgctgcgcgggattttcagcgaatatggtttgctgaaattccgtgtacaagttgaagtacgttggctgcaaaaactggccgcgcacgcagcgatcaaggaagttcctgcttttgctgccgacgcaatcggttaccttgatgcaatcgtcgccagtttcagcgaagaagatgcggcgcgcatcaaaactatcgagcgtaccactaaccacgacgttaaagcggttgagtatttcctgaaagaaaaagtggcggagatcccggaactgcacgcggtttctgaattcatccactttgcctgtacttcggaagatatcaataacctctcccacgcattaatgctgaaaaccgcgcgtgatgaagtgatcctgccatactggcgtcaactgattgatggcattaaagatctcgccgttcagtatcgcgatatcccgctgctgtctcgtacccacggtcagccagccacgccgtcaaccatcggtaaagagatggcaaacgtcgcctaccgtatggagcgccagtaccgccagcttaaccaggtggagatcctcggcaaaatcaacggcgcggtcggtaactataacgcccacatcgccgcttacccggaagttgactggcatcagttcagcgaagagttcgtcacctcgctgggtattcagtggaacccgtacaccacccagatcgaaccgcacgactacattgccgaactgtttgattgcgttgcgcgcttcaacactattctgatcgactttgaccgtgacgtctggggttatatcgcccttaaccacttcaaacagaaaaccattgctggtgagattggttcttccaccatgccgcataaagttaacccgatcgacttcgaaaactccgaagggaatctgggcctttccaacgcggtattgcagcatctggcaagcaaactgccggtttcccgctggcagcgtgacctgaccgactctaccgtgctgcgtaacctcggcgtgggtatcggttatgccttgattgcatatcaatccaccctgaaaggcgtgagcaaactggaagtgaaccgtgaccatctgctggatgaactggatcacaactgggaagtgctggctgaaccaatccagacagttatgcgtcgctatggcatcgaaaaaccgtacgagaagctgaaagagctgactcgcggtaagcgcgttgacgccgaaggcatgaagcagtttatcgatggtctggcgttgccagaagaagagaaagcccgcctgaaagcgatgacgccggctaactatattggtcgagctatcacgatggttgatgagctgaaataa

SEQ ID NO: 144612 - protein, 456 aa, Escherichia coli K12
MELSSLTAVSPVDGRYGDKVSALRGIFSEYGLLKFRVQVEVRWLQKLAAHAAIKEVPAFAADAIGYLDAIVASFSEEDAARIKTIERTTNHDVKAVEYFLKEKVAEIPELHAVSEFIHFACTSEDINNLSHALMLKTARDEVILPYWRQLIDGIKDLAVQYRDIPLLSRTHGQPATPSTIGKEMANVAYRMERQYRQLNQVEILGKINGAVGNYNAHIAAYPEVDWHQFSEEFVTSLGIQWNPYTTQIEPHDYIAELFDCVARFNTILIDFDRDVWGYIALNHFKQKTIAGEIGSSTMPHKVNPIDFENSEGNLGLSNAVLQHLASKLPVSRWQRDLTDSTVLRNLGVGIGYALIAYQSTLKGVSKLEVNRDHLLDELDHNWEVLAEPIQTVMRRYGIEKPYEKLKELTRGKRVDAEGMKQFIDGLALPEEEKARLKAMTPANYIGRAITMVDELK

SEQ ID NO: 144613 - DNA, 1371 bp, Yersinia pestis
  CDS (1)..(1371): transl_table=11
atggaattatcctcactgaccgccgtttcaccaattgatggacgttacggcgacaaagtcagcgcactgcgccccatctttagcgaattcggtttgctaaaattccgtgtgcaggtcgaagtgcgttggctgcaaaaactggcagcctgcgcagaaattaaagaggttcctgcttttgatgccaacgcaaacgcttaccttgataaaattgtgcaagagttcaatgaacaagatgcacaacgcattaagaccatcgaacgcacaaccaatcatgatgtgaaggctgtcgagtattttctgaaagaaaaagtggaaaatctccctgcgttacatgccgtgtctgagttcattcactttgcttgtacttcagaagatatcaataacctgtcccacgcattgatgctgcaaactgctcgccaggatgtcctgctgcccgcatggcggcagattattgactcaataaaagcactggcccaccaatatcgcgatttacccttactgtcccgcacccacggccagcccgcgacaccctcaaccatcggtaaagagctggcgaatgtggcgtaccgcatggaacgtcagttccgccaactaacacaagtggaaattctgggtaaaatcaacggtgcagtaggcaactataacgcccacatcgtggcctaccctgaggttgattggcatcagtttagtgaaagttttgtgacatcgctgggaatcaactggaacccatacaccacgcaaatcgagcctcatgattatattgctgagttatttgactgtgtggcccgtttcaatactattttgatcgattttgaccgtgatatctggggttatattgctctgaatcacttcaagcaaaaaaccatcgcgggcgaaatcggttcaagcaccatgccgcataaagttaatccaattgatttcgaaaactcggaaggcaatttgggtctatcgaatgccgtgctaggtcacatggccagcaaactaccggtttctcgctggcaacgtgatctgaccgactcgaccgtgctacgtaatctgggtgtgggtctgggttatgccctgattgcctatcaggcaaccatgaaaggcatcagcaaactggaagttaacgaagcacatctgttgcaagagcttgatcataattgggaagttctggctgaacctattcaaacgatcatgcgccgttacggtattgaaaaaccgtatgaaaaactgaaagaattgacccgtggcaaacgtgtcgatgccgcaggtatgcaagcatttatcgatgggctggatctaccagaagaagaaaaaaaccggttgaaggccatgacgccagcgaattacattggccgcgccaccaccatggttgatgaattaaagtaa

SEQ ID NO: 144614 - protein, 456 aa, Yersinia pestis
MELSSLTAVSPIDGRYGDKVSALRPIFSEFGLLKFRVQVEVRWLQKLAACAEIKEVPAFDANANAYLDKIVQEFNEQDAQRIKTIERTTNHDVKAVEYFLKEKVENLPALHAVSEFIHFACTSEDINNLSHALMLQTARQDVLLPAWRQIIDSIKALAHQYRDLPLLSRTHGQPATPSTIGKELANVAYRMERQFRQLTQVEILGKINGAVGNYNAHIVAYPEVDWHQFSESFVTSLGINWNPYTTQIEPHDYIAELFDCVARFNTILIDFDRDIWGYIALNHFKQKTIAGEIGSSTMPHKVNPIDFENSEGNLGLSNAVLGHMASKLPVSRWQRDLTDSTVLRNLGVGLGYALIAYQATMKGISKLEVNEAHLLQELDHNWEVLAEPIQTIMRRYGIEKPYEKLKELTRGKRVDAAGMQAFIDGLDLPEEEKNRLKAMTPANYIGRATTMVDELK

SEQ ID NO: 144615 - DNA, 1374 bp, Dichelobacter nodosus VCS1703A
  CDS (1)..(1374): transl_table=11
atgacggctcaaaatcatgcattaacggcaatttctcccatcgatggacgttatgcggaaaaaacggcggttttacgcactatttttagcgaatatggtttgatcaaatatcgttatcgcgtggaattacaatggctgcgttttttagccaatcatgatggaattccagaattgcaggcgttatcgcccagcgcagaacaatttttacaacaactttccgaacaatttgacgaacataaagcgctcgagatcaaagcgattgaaaaaacaacgaatcacgacgttaaagccgtggaatatcaattaaaaaaagatttggcaacgcacgatgaattagcaacaaaaattgaattcgtgcattttgcctgcaccagcgaagatattaataatttatcgtatgcattgatgttaaaagatgggcgcgatgttcttttgcaaatgtatcaagaaatatcaaatcaaatcaaacaaatagctttagcagaacaaaataccgcttttttagcgcatacgcacggacaacccgcgagcccaaccacgctcggcaaagaatttgccaacgttgcttttcggataaaacggcaattgtcgttactcgattctcaagaaatgttgggcaaaatcaacggtgcggtcggcaattttaatgcacatcatgtagcttatccggacgttgattggcaacgcagcgcgcagcaattcgttgagcaattgggattgacgtacaatccgctcaccacgcaaatcgaaccgcacgattatatcgcggaattattacatactttaagccgtatcaatttgattttattagatttttgccgagatgtttggacgtatatcagcttaaattattttaaacaaaaagtaattagcggtgaggtgggctcatcaacgatgccgcataaagttaaccccattgatttcgaaaatgcggaaggcaatttcggtttagccaacgcgcttgccgaacatttagcgcataaattgcccatttctcgaatgcaacgcgatttaaccgattcaacggtgttgcgcagtttgggcagcgtttttgcgtatacagttattgctttagcgtctttgaaaaagggattgacgaaactcgaaactaatcacgccgccattgctgccgatttagcggcaaatccagaagttttagcggaagccgtgcaaacggtgatgcggcgttacgcgattccagaaccgtatgaaaaattaaaagcgttaacgcgcggacaaaaaatcacgccggaaattttggtaacttttatcgatggtttggatttgccagaagaagttaaagcgcggttgcgcggtttaacgccgaaagattacgtcggactcgcacaaaagctggcgcaatgcgtacaatag

SEQ ID NO: 144616 - protein, 457 aa, Dichelobacter nodosus VCS1703A
MTAQNHALTAISPIDGRYAEKTAVLRTIFSEYGLIKYRYRVELQWLRFLANHDGIPELQALSPSAEQFLQQLSEQFDEHKALEIKAIEKTTNHDVKAVEYQLKKDLATHDELATKIEFVHFACTSEDINNLSYALMLKDGRDVLLQMYQEISNQIKQIALAEQNTAFLAHTHGQPASPTTLGKEFANVAFRIKRQLSLLDSQEMLGKINGAVGNFNAHHVAYPDVDWQRSAQQFVEQLGLTYNPLTTQIEPHDYIAELLHTLSRINLILLDFCRDVWTYISLNYFKQKVISGEVGSSTMPHKVNPIDFENAEGNFGLANALAEHLAHKLPISRMQRDLTDSTVLRSLGSVFAYTVIALASLKKGLTKLETNHAAIAADLAANPEVLAEAVQTVMRRYAIPEPYEKLKALTRGQKITPEILVTFIDGLDLPEEVKARLRGLTPKDYVGLAQKLAQCVQ

SEQ ID NO: 144617 - DNA, 1347 bp, Thermoplasma volcanium GSS1
  CDS (1)..(1347): transl_table=11
atggtagtctccccattagagtatagatacggcagggaacagataaagagaatatttgacgatgaaaaccgcctctactatatgcttaaagtagaggcagcaatatcaaaggcagaagcggaatatggtattataccgcccgaggccgccgaagatattgggaaagtagtcgcagaccgcatagtacagctgcagagagtaagagaaatagaagcagagataaagcacgatgtaatggctatggtgaaagcgttatcagaaaaatgcaaagttggcgccagttacgtacattacggcgtcacatctaacgacgtaaacgatacggcaacagcactgcaaatgcatgatttcttttctttcctgaagcaggatatagaagatattatggagacactcatcgaattgacgttaagatataaatcgagcccaatgatgggtaggacgcatggccagcacgcttcaccaatcactatcggcctaaaatttgccgtttacctttcagagttttcaaggcactatgatcgtatgattgaaatgtcaaaaagagctttcgctggcaaagtgctcgggccggtaggaacaggtgctgccctaggccccaaagcccttgatatacagaatagagttatggagatactgggtatatacgcagaagagggcccaacacagatagtaaatagagaccgatacatagaatatctatccgtaataaacgggatctctgtaacattagaaaagataggtacagagataaggaacctgcagaggccagagatagatgagatgtccgaatattttgatgtggagaggcaggtcggttctagttcaatgcccagcaaggtgaacccaataaattctgaaaatgtagttagtttatcgaggcttataagatccatgataataccggaatacgaggctggcgttacatggcacgaaagggatctgacgaacagcgctctggaaaggtttacgataccatattcttcgatacttgtggattatatccttgttaagatgaactcaatcctatctagccttattattaaggaggataagattaggaaaaatcttgaaatggatgacagcatattttctgagagcttggtagctgctcttactcaggccggcatgccaaggcaggacgcacacgaattcataaggagatgttcaatgaaagcaagatctgaaggcaagacactgaaacatgtagtcgtagaagagggcataaccaattatataagaagagatgagctagatcgcctgatggatcctgcaaacttcattggttccgcaccagaaatatgtgatatagtggtaaataatgcaaggaggaggctgatcaactga

SEQ ID NO: 144618 - protein, 448 aa, Thermoplasma volcanium GSS1
MVVSPLEYRYGREQIKRIFDDENRLYYMLKVEAAISKAEAEYGIIPPEAAEDIGKVVADRIVQLQRVREIEAEIKHDVMAMVKALSEKCKVGASYVHYGVTSNDVNDTATALQMHDFFSFLKQDIEDIMETLIELTLRYKSSPMMGRTHGQHASPITIGLKFAVYLSEFSRHYDRMIEMSKRAFAGKVLGPVGTGAALGPKALDIQNRVMEILGIYAEEGPTQIVNRDRYIEYLSVINGISVTLEKIGTEIRNLQRPEIDEMSEYFDVERQVGSSSMPSKVNPINSENVVSLSRLIRSMIIPEYEAGVTWHERDLTNSALERFTIPYSSILVDYILVKMNSILSSLIIKEDKIRKNLEMDDSIFSESLVAALTQAGMPRQDAHEFIRRCSMKARSEGKTLKHVVVEEGITNYIRRDELDRLMDPANFIGSAPEICDIVVNNARRRLIN

SEQ ID NO: 144619 - DNA, 1584 bp, Arabidopsis thaliana
  CDS (1)..(1584)
atggagctcaatttatcttcgatggccaccaaaatcccttgttccggccttatacccataagaagtcttttaaacccatcaaaatctctgtctcatcttccaagagtttcattctctgtttcttctcctcattctctcaagctaatgacttcaacaaagttgatagcaatggctagtgcaagttccagagattttgagatgtcgaatttaacagcattatcgcctttggatggacgttattggggaaaagttaaggacttggcttcttctatgagcgagtttggattgatctatttccgagtacttgtcgagatcaaatggcttattaagctttcaaatatacctcaagtcactgaagttccaagctttagcaaagaagctcataagtacttgcaaggtataatcgatggatttagtatggatgatgcattgcaagttaagaagattgagagagtgacaaatcacgatgtgaaagcagtggagtattttttgaaacaaaagtgtgaatcacatccagagattgctaaggttctagagtttttccatttcgcttgtacgtctgaggacatcaacaatctttcccatgctttgatgcttcaagaagcacttagttcggttatacttcctaccatggatgagttgatcaagtctatctctctgatggctaagagctttgcatatgtacctatgctttcacgaactcatgggcagccagcttcacctacaacattggggaaggaaatggcgatttttgctgtgaggttaagtgtagaaaggagatatctttcagaaactaagattaaggggaaatttgcgggtgctgttggaaactacaacgcgcatatttccgcgtattctaatattgactggcctcatgttgcagaggagtttgttacttctcttggattaacatttaacccatacgtgactcagattgaaccacatgactatatggctagactttttaatacaattagccaattcaacaatgtcttgattgattttgacagagatatatggagctacatatctctaggttactttaagcagataactaaagcgggtgaaatcggatcatcgacaatgcctcacaaagtgaatcctattgactttgagaacagcgaagggaatctaggtaaagcaaatgcagagcttgcttttctcagcatgaagcttcccatttcacgaatgcagcgtgatttaacagattcaactgtcttgagaaacatgggtggagctttaggacactctcttctggcttacaagagcgcgatacagggaattgggaagcttcaggttaatgaagctcggttaaaagacgatttggatcatacttgggaagtcctcgctgaaccgatacaaactgtgatgaggagatatggtgttccagagccgtatgagaagctgaaggagctaacaagaggaagagctgtgaatgaagaaagcattagaaagtttattaaaagtttggaattgcctgaagaagcaaaagaccaacttttgaagctaactccacacacatatgttggcgctgctgctgcattggcactagccgtggatgatgctgtgcacttgggacattaa

SEQ ID NO: 144620 - protein, 527 aa, Arabidopsis thaliana
MELNLSSMATKIPCSGLIPIRSLLNPSKSLSHLPRVSFSVSSPHSLKLMTSTKLIAMASASSRDFEMSNLTALSPLDGRYWGKVKDLASSMSEFGLIYFRVLVEIKWLIKLSNIPQVTEVPSFSKEAHKYLQGIIDGFSMDDALQVKKIERVTNHDVKAVEYFLKQKCESHPEIAKVLEFFHFACTSEDINNLSHALMLQEALSSVILPTMDELIKSISLMAKSFAYVPMLSRTHGQPASPTTLGKEMAIFAVRLSVERRYLSETKIKGKFAGAVGNYNAHISAYSNIDWPHVAEEFVTSLGLTFNPYVTQIEPHDYMARLFNTISQFNNVLIDFDRDIWSYISLGYFKQITKAGEIGSSTMPHKVNPIDFENSEGNLGKANAELAFLSMKLPISRMQRDLTDSTVLRNMGGALGHSLLAYKSAIQGIGKLQVNEARLKDDLDHTWEVLAEPIQTVMRRYGVPEPYEKLKELTRGRAVNEESIRKFIKSLELPEEAKDQLLKLTPHTYVGAAAALALAVDDAVHLGH

SEQ ID NO: 144621 - DNA, 1371 bp, Neisseria meningitidis MC58
  CDS (1)..(1371): transl_table=11
atgatcaaccccatcgcctcgctttcccctttagatggccgttatgcccaatccgttgaagcattgcgcccgattttttccgaatacggcctgatgaaggcgcgcgtcaaagtcgaattaaactggctcaaagccctcgccgccgagccgaagattgccgaagtgccgcccttcagtgccgaaacgcttgccgaaatcgacacggtgattgaaaacttttcattggaagacgcggccgccgtcaaagccatcgaagccaccaccaatcacgatgtcaaagccatcgaatattggctgaaaaaacgttttgccgaagtgccggaagtcgccgccgtgagtgagttcatccacttcgcctgcaccagcgaagacatcaacaacctgtcccacgctttaatgctgcaagaagcgcgtgaggctgttttgctgccgaagctggccgaaatcatcgaaaaactgaccgctatggcgcacgaccttgccgccgtcccgatgatgagccgcacccacggccagcccgccacgccgaccactttgggcaaagaaaccgccaatgtcgtgtaccgcctgcaacgccagtttaaaaacctgcaagcgcaagagttcctcggcaaaatcaacggcgcggtcggcaactacaacgcccatatggtcgcctatcctgatgtagattgggaaacccactgccgcaacttcgtcgaaatcagcctcggtctgaccttcaacccctacaccatccaaatcgaaccgcacgactatatggcggaattcttccaaaccctcagccgcatcaacacgattctcatcgactttaaccgcgacgtttggggttatatttcattgggttacttcaaacaaaaagtcaaagcaggcgaagtcggttcttccaccatgccgcacaaagtcaaccccatcgactttgaaaactccgagggcaacctcggtatggcaaacgccgtattgggctttttgtccgaaaaactgccgatttcccgctggcagcgcgacctgaccgacagcaccgtattgcgcaatatgggcgtaggcgtgggctatgccgtattgggtttcgccgcccacctgcgcggtctgaacaagctcgaacccaaccccgccgcgcttgccgccgatttggatgccacttgggagctgctcgccgagccgattcaaaccgtaatgcgccgttacggtgtcgccaatccttacgaaaaactgaaagacctgacgcgcggcaaaggcggcatcacgcccgaagtgctgaaaggctttatcggattgctggaaatccccgccgaagccaaagccaaattgcttgagctgacccccgcgctgtatgtgggcaaggctgaagcgttggcgaaacggatttga

SEQ ID NO: 144622 - protein, 456 aa, Neisseria meningitidis MC58
MINPIASLSPLDGRYAQSVEALRPIFSEYGLMKARVKVELNWLKALAAEPKIAEVPPFSAETLAEIDTVIENFSLEDAAAVKAIEATTNHDVKAIEYWLKKRFAEVPEVAAVSEFIHFACTSEDINNLSHALMLQEAREAVLLPKLAEIIEKLTAMAHDLAAVPMMSRTHGQPATPTTLGKETANVVYRLQRQFKNLQAQEFLGKINGAVGNYNAHMVAYPDVDWETHCRNFVEISLGLTFNPYTIQIEPHDYMAEFFQTLSRINTILIDFNRDVWGYISLGYFKQKVKAGEVGSSTMPHKVNPIDFENSEGNLGMANAVLGFLSEKLPISRWQRDLTDSTVLRNMGVGVGYAVLGFAAHLRGLNKLEPNPAALAADLDATWELLAEPIQTVMRRYGVANPYEKLKDLTRGKGGITPEVLKGFIGLLEIPAEAKAKLLELTPALYVGKAEALAKRI

SEQ ID NO: 144623 - DNA, 1371 bp, Neisseria meningitidis Z2491
  CDS (1)..(1371): transl_table=11
atgatcaaccccatcgcctcgctttcccctttagacggccgttatgcccaatccgttgaagcattgcgcccgattttctcagagtacggcctgatgaaagcgcgcgtcaaagtcgaattaaactggctcaaagccctcgccgccgagccgaagattgccgaagtgccgcccttcagtgccgaaacgcttgccgaaatcgacacggtgattgaaaacttttcattggaagacgcggccgccgtcaaagccatcgaagccacgaccaatcatgatgtcaaagccattgaatattggctgaaaaaacgttttgccgaagtgccggaagtcgccgccgtgagtgagttcatccacttcgcctgcaccagcgaagacatcaacaacctgtcccacgctttaatgctgcaagaagcgcgtgaggctgttttgctgcccaaactggcagaaatcatcgaaaaactgaccgctatggcgcacgaccttgccgccgtcccgatgatgagccgcacccacggccagcccgccacgccgaccactttgggcaaagaaaccgccaatgtcgtgtaccgcctgcaacgccagtttaaaagccttcaggcgcaagagttcctcggcaaaatcaacggcgcggtcggcaactacaacgcccacatggtcgcctatcccgacgtcgattgggaaacccactgccgcaacttcgtcgaaatcagccttggcctgaccttcaacccctacaccatccaaatcgagccgcacgactacatggctgaattcttccaaaccctcagccgcatcaacaccatcctgatcgactttaaccgcgacgtttggggctacatttctttggggtacttcaaacaaaaagtcaaagcgggcgaagttggttcttccaccatgccgcacaaagtcaaccccatcgactttgaaaactccgagggcaaccttggtatggcaaacgccgtattgggttttttggcggaaaaactgccgatttcccgttggcagcgcgacctgaccgacagcaccgtcttacgcaatatgggcgtgggcgtgggctatgccgtgttgggtttcgccgcccacctgcgcggtctgaacaagctcgaacctaaccccgccgcgcttgccgccgatttggatgccacttgggagctgctcgccgagccgattcaaaccgtaatgcgccgttacggcgtggccaatccttacgagaagctgaaagacctgacgcgcggcaaaggcggcatcacgcccgaagtgctgaaaggctttatcggattgctggaaatccccgccgaagccaaagccaaattgcttgagctgacccccgcgctgtatgtgggcaaggctgaagcgttggcgaaacggatttga

SEQ ID NO: 144624 - protein, 456 aa, Neisseria meningitidis Z2491
MINPIASLSPLDGRYAQSVEALRPIFSEYGLMKARVKVELNWLKALAAEPKIAEVPPFSAETLAEIDTVIENFSLEDAAAVKAIEATTNHDVKAIEYWLKKRFAEVPEVAAVSEFIHFACTSEDINNLSHALMLQEAREAVLLPKLAEIIEKLTAMAHDLAAVPMMSRTHGQPATPTTLGKETANVVYRLQRQFKSLQAQEFLGKINGAVGNYNAHMVAYPDVDWETHCRNFVEISLGLTFNPYTIQIEPHDYMAEFFQTLSRINTILIDFNRDVWGYISLGYFKQKVKAGEVGSSTMPHKVNPIDFENSEGNLGMANAVLGFLAEKLPISRWQRDLTDSTVLRNMGVGVGYAVLGFAAHLRGLNKLEPNPAALAADLDATWELLAEPIQTVMRRYGVANPYEKLKDLTRGKGGITPEVLKGFIGLLEIPAEAKAKLLELTPALYVGKAEALAKRI

SEQ ID NO: 144625 - DNA, 1425 bp, Sulfolobus solfataricus P2
  CDS (1)..(1425): transl_table=11
atgagattacagtataagttaataaatgttgaacatactttacaattagccatggaggatagtatatgtcctttagaatggagatacggtagtaatgagatgagaaagtttttcagtagagaagaaatcttgaaaaggagaattcaagtagaaatagcgttattaaaagcattaaccaaatatggtttagtaaaagaggaagacgttcaaaaagttgagaaagcttcattaacaataagaccagaggaagtagatgaacttgaatcaaaaattggtcatgatgtaatggctatggtagtcttaatggcagaaagaagtggagattctggaagatacgttcattttggggcaacaagttatgatattgtagatacagcttatgcgttagtatttagagacgcaataagattagtaaagacaaaagtagtagaaatattggaaatgatggttagtttagcaattaagtataaagatttagcaatggtaggaagaactcatgggcagcatgcattgcctataacattaggctttaaaattgcaaattatatctatgaattttctagatcactagagaggttaaatgaggttgagaaaagaatagtaaaaggtaaaatggcaggtgcagttggcacgatggcagcttggggcaatatagggttagaaatagaagagaatgttatgaaatttttaggattaagacctcatgagatttcaactcaagttgctccacgagacgcatttgcagaattaacttctgatcttgcaattttggcatctcaatgtgatcgattcgcattagaagttagggaactaatgagaccggaaataaatgaaataagtgaaggcgtagaaggtcgtgtaggaagtagtactatgcctcagaaggaaaatccagtcacgtcagaaaagattgggggtttagcaaaagttttacgctctcttgtcgtagcgtcactagaaaatattccattatggcacgaaagagatctgactaacagttcgtcagagaggataataatatcacatgaatttctagttattgacgaaatattagatagtatgataagtcttttgaggaatttaagggttaacttcgagaatattgaaaagaatttgaacttaactaaaggacaaataatggcagaaagtctgatgataaacttaaccttaaagggcatgaaaaggcatgaagctcatcaatacgttaacaaactgacgtcaaaagtaagacaaactggaaaaacgttattagaggtttgcctagaggatagtttaattttaagttatttctctaagcaagaacttgagaacgtacttaatcctaaaaactacttgggttcctatgataaattaatagagagagctattagctatgcaaaaggcgtaatcaaaggttcagaaatacgagaagctcaagatagatga

SEQ ID NO: 144626 - protein, 474 aa, Sulfolobus solfataricus P2
MRLQYKLINVEHTLQLAMEDSICPLEWRYGSNEMRKFFSREEILKRRIQVEIALLKALTKYGLVKEEDVQKVEKASLTIRPEEVDELESKIGHDVMAMVVLMAERSGDSGRYVHFGATSYDIVDTAYALVFRDAIRLVKTKVVEILEMMVSLAIKYKDLAMVGRTHGQHALPITLGFKIANYIYEFSRSLERLNEVEKRIVKGKMAGAVGTMAAWGNIGLEIEENVMKFLGLRPHEISTQVAPRDAFAELTSDLAILASQCDRFALEVRELMRPEINEISEGVEGRVGSSTMPQKENPVTSEKIGGLAKVLRSLVVASLENIPLWHERDLTNSSSERIIISHEFLVIDEILDSMISLLRNLRVNFENIEKNLNLTKGQIMAESLMINLTLKGMKRHEAHQYVNKLTSKVRQTGKTLLEVCLEDSLILSYFSKQELENVLNPKNYLGSYDKLIERAISYAKGVIKGSEIREAQDR

SEQ ID NO: 144627 - DNA, 1353 bp, Sulfolobus tokodaii str. 7
  CDS (1)..(1353): transl_table=11
atggaaaattcagtttgtgtattagactggagatacggaagcaaagagatgagagaattattccaaagagctacaattcttaaaagaatggctacagtagaagtagcgttactttatgctttatcaaagataggtttagtaagagaagaggatgtactggttgtgcaaaaaaacatagacaaaataaatataagcagagtagaagaattagagaagaaattaggacatgatgttatggcattaactgtgcatttagctgaattatctggcgaatctggtaaatttattcattttggtgctacaagttatgacatagtagatacagctaatgtattaatttttagggatgccataaatataataaagaaaaaattaaaaaatataataataatattaatggaatatgctgaaaaataccaagaacttgtaatggtaggtagaacacatgggcaacacgcgttaccaataacgctgggttttaaatttgcaaattacgtttatgagtttactcgttcgttagagaggcttaacgatacaagcaaaagattacttaaaataaaaatggctggggcagtaggcacaatggcaggttggaaagataaaggtttagagatagaaaaatatgtttcagaatacttaggattacctcctcatgaaatctctactcagatagctcctcgtgacggatatactgagttagtctcagatcttgcaattttagcgtctcagcttgacagatttgccttagaaataagggagctaatgagacctgaaattttagagttagctgaaggttctgcagaatcaagagtaggaagtagtactatgcctcataaggagaatccagtaactgcggaaaaaatcagtggattagccaaggtattgaggggctttgtaatatctgagctagaaaatatacctttatggcatgaaagagatctaactaacagctcatctgaaaggataattctttctcactcttttcttataatggatgagatgttagagagtatggaagctcttttaagaaatctaagagtttacccagaaaatatgagaaagaacctagaactcactaaaggtcttattatggctgaaagcttaatgattaatcttacattagcaaatgttccaaggcatatagctcatgaacttgttatgaaagtatctagagaagcagaaagagaagggaaatcattgcttgaagctgctttagacaatgaggaaatagttaaaatactaggtaaggagaaaataatagaagcattaaatccgtatagctatttaggagaatacaagaaattaataagtagagcattatcatatgcaaagaatgttattgaacagacgtaa

SEQ ID NO: 144628 - protein, 450 aa, Sulfolobus tokodaii str. 7
MENSVCVLDWRYGSKEMRELFQRATILKRMATVEVALLYALSKIGLVREEDVLVVQKNIDKINISRVEELEKKLGHDVMALTVHLAELSGESGKFIHFGATSYDIVDTANVLIFRDAINIIKKKLKNIIIILMEYAEKYQELVMVGRTHGQHALPITLGFKFANYVYEFTRSLERLNDTSKRLLKIKMAGAVGTMAGWKDKGLEIEKYVSEYLGLPPHEISTQIAPRDGYTELVSDLAILASQLDRFALEIRELMRPEILELAEGSAESRVGSSTMPHKENPVTAEKISGLAKVLRGFVISELENIPLWHERDLTNSSSERIILSHSFLIMDEMLESMEALLRNLRVYPENMRKNLELTKGLIMAESLMINLTLANVPRHIAHELVMKVSREAEREGKSLLEAALDNEEIVKILGKEKIIEALNPYSYLGEYKKLISRALSYAKNVIEQT

SEQ ID NO: 144629 - DNA, 1308 bp, Sinorhizobium meliloti 1021
  CDS (1)..(1308): transl_table=11
atgatctcccgttactcccggccggaaatggtggccatctggtcgccggaaaccaagttccgcatctggttcgagatcgaggcgcatgcctgcgacgccttggccgaaatcggcgtgatccccaaggaagctgcaaagaccatatgggaaaagggcggcgcggcaaccttcgacgtcgcccgcatcgatgagatcgaagccgtcaccaagcacgatgtcatcgccttcctcacccatcttgcggaattcgtcggccccgacagccgcttcatccatcagggcatgacctcttccgacgtgctggacacctgcttcaacattcagctcgtccgcgccaccgatctcctgcttgccgatctcgataagctgctcgaagcgctgaagcggcgtgccttcgagcacaaggacacggtgaccatcggtcgttcgcacggcatccacgccgagccgacgaccttcggcgtcaagctcgcgctcgcctatgcggagttcgaccgctgcaagcaacgccttctcgctgcccgcgaggagattgcgacctgtgccatttccggagcggtcggcaccttcgccaacatcgatccgcgcgtcgaggaacacgtggcagaggcgctcggcctcaagcctgaacccgtctcgacccaggtgatcccgcgcgatcgccacgcgatgtatttcgccacactcggcgtcgtcgcctcctcgatcgagcgccttgcgaccgagatccggcatttgcagcgcaccgaggttctggaagcggaggaatatttctctccgggccagaagggctcttccgccatgccgcacaagcgcaatccggtcctgacggaaaacctgaccggcctctcccgaatggtccgcgccttcgtcgttccggccatggaaaacgtcgcgctgtggcacgaacgcgatatctcgcactcgtcggtcgagcggatgatcggtccggatgcgacggttacgctcgatttcgcgctcgcccgcctgaccggcgtcatcgacaagcttctcgtctacccggacaacatgctgaagaatatgaacaagttccgcgggcttgttcattcgcagcgtgtccttctcgccctcacccaggccggagtgtcgcgcgaggacgcctaccgcctcgtacaacgcaacgccatgaaggtctgggaacagggcaaggacttcctcgaagaactgctcgccgacacggaagtccgtgcggctctttccgaagaggacattcgggagaaattcgacctcggctaccataccaagcatgtcgacacgatcttccggcgggttttcggttccgtctag

SEQ ID NO: 144630 - protein, 435 aa, Sinorhizobium meliloti 1021
MISRYSRPEMVAIWSPETKFRIWFEIEAHACDALAEIGVIPKEAAKTIWEKGGAATFDVARIDEIEAVTKHDVIAFLTHLAEFVGPDSRFIHQGMTSSDVLDTCFNIQLVRATDLLLADLDKLLEALKRRAFEHKDTVTIGRSHGIHAEPTTFGVKLALAYAEFDRCKQRLLAAREEIATCAISGAVGTFANIDPRVEEHVAEALGLKPEPVSTQVIPRDRHAMYFATLGVVASSIERLATEIRHLQRTEVLEAEEYFSPGQKGSSAMPHKRNPVLTENLTGLSRMVRAFVVPAMENVALWHERDISHSSVERMIGPDATVTLDFALARLTGVIDKLLVYPDNMLKNMNKFRGLVHSQRVLLALTQAGVSREDAYRLVQRNAMKVWEQGKDFLEELLADTEVRAALSEEDIREKFDLGYHTKHVDTIFRRVFGSV

SEQ ID NO: 144631 - DNA, 1368 bp, Thermoplasma acidophilum DSM 1728
  CDS (1)..(1368): transl_table=11
atggtagtctcgcccatagaatacaggtatggcagaagacaagtcaagaaaatattcgatgatgaaacacgcctaaattacatgcttaaggttgaagccgcaatagcgaaggcagaatccgagcttggtataataccgcaagatgcctacaatgagatccagagagcggtagattccggatcaataactctggacgaggtcaggcaggttgaggatgagataaaacatgacgttatggccgttgtccgggttctttcaaaatattccggatcagggtctaagtatgtacacttcggtgtcacatcaaacgatataaacgataccgcaactgcacttcagctgcatgatttctcttctatctacagatcgaaccttgtatcattcatggaaacacttgtaggcctcgcatctaaatatcgcgatcttccaatgatgggtaggactcatggccagcatgcctcgccgataacccttggcctgaagtttgcggtctatcttgcggagatgataaggcatctcgaccggtgggatgagatggctggcagagcatttgccgggaaggtgctgggtcctgtcggtactggagcagctctgggagaaatggcactggatgttcagaagagggtcatggacatactgggtatatatccggaggacggcgcaacgcagatcgtcaacagggatcgttacatagagtatctctccgtcataaatggtatatcggtgacgctggaaaagatagctaccgagataaggaatcttcaaagaccagagatagatgaactctccgaatactttgactttgaaaagcaggtcggctcaagctccatgccaagcaaggtaaatccaataaattccgaaaacgtggtgagcctctcacgcttcataagatccttgataatatctgagtacgaggccggtgttacatggcatgaacgggatctcaccaatagtgcatctgaacgctttgttataccgtacgcgagcatactgatagattatgctactgatcgattaaacggtgttctgaaaaccctcatcgtcaaggaggacaatatacgcaggaatctggaaaacgatgacagcatctactctgaaagtatagtaacgatactgactgagcgcggtatggcaaggcaggacgcacatgaatttgtccgaagatcggccatgaatgcaaggagcaagggtatgagcttcaggcagggcctgctagagaatggcattgaaagatatctcagcaaagccgatcttgacagggcgatggatccggccaacttcataggattggcaccgatcatatgtgatacgatagtaaagaaggcgaaagagaggatcgggatgaaagatggagagcaagcttcctga

SEQ ID NO: 144632 - protein, 455 aa, Thermoplasma acidophilum DSM 1728
MVVSPIEYRYGRRQVKKIFDDETRLNYMLKVEAAIAKAESELGIIPQDAYNEIQRAVDSGSITLDEVRQVEDEIKHDVMAVVRVLSKYSGSGSKYVHFGVTSNDINDTATALQLHDFSSIYRSNLVSFMETLVGLASKYRDLPMMGRTHGQHASPITLGLKFAVYLAEMIRHLDRWDEMAGRAFAGKVLGPVGTGAALGEMALDVQKRVMDILGIYPEDGATQIVNRDRYIEYLSVINGISVTLEKIATEIRNLQRPEIDELSEYFDFEKQVGSSSMPSKVNPINSENVVSLSRFIRSLIISEYEAGVTWHERDLTNSASERFVIPYASILIDYATDRLNGVLKTLIVKEDNIRRNLENDDSIYSESIVTILTERGMARQDAHEFVRRSAMNARSKGMSFRQGLLENGIERYLSKADLDRAMDPANFIGLAPIICDTIVKKAKERIGMKDGEQAS

SEQ ID NO: 144633 - DNA, 1374 bp, Ralstonia solanacearum GMI1000
  CDS (1)..(1374): transl_table=11
atgtcgtcgctttccgccctgaccgccctgtctcccatcgatggccgctatgccgccaaggccgatccgctgcgcgagtggctgtccgaagccgccttcatgcgccaccgcgtcaaggtggaggtgcactggctgatcgcgctgtcgcaggcgggcctggcggagattccgcgcttttcggccgatgccgagcgcgcgctgctggccctggtcgaccactttgccgaggccgatgccgcccgcatcaaggaaatcgaagccgtcaccaaccacgacgtgaaggcggtcgagtactggctcaaggagcgtgtcaagggcaacgccgagctggaagccgccagcgagttcatccacttcgcctgcacgtcggaagacatcaacaacacctcgcacggcatgatgctcaagggcgcgcgcgacaccgtgatcgtgccgacgctgcgccgcgtgcaggcccgcctggtcgagctcgcccacgccaatgccgatgtgccgatgctctcgcgcacccacggccagccggccagcccgaccacgctgggcaaggaaatggccaacgtcgccgcgcgcctggaccgcgccatccgccgcatcgaagctgtcgagctgctgggcaagatgaacggcgcggtgggcaactacaacgcgcacctgtcggcctacccggatgcggactgggaagccttctccaagagcgtgatcgagacccgcctgggcctgacgttcaatccgtacaccatccagatcgagccgcacgactacatggccgagctgttcgatgccgtggcgcgcgccaacaccatcatcctggacctggaccgcgacgtctggggctacatctcgcagggctacttcaagcagaagaccaaggccggcgagatcggctcgtcgaccatgccgcacaaggtcaacccgatcgatttcgagaactccgaaggcaacgtcggcctggccaacgcggtgctgcgccacctgtcggaaaagctgccggtctcccgctggcagcgcgacctgaccgattcgaccgtgctgcgcaatatcggtgtggcgttcggctacagcctgctggcctacgacgcctgcctgcgcggcctgggcaagctggaaaccaacccggcccgcctggccgaagacctggatgcctgctgggaagtgctggccgagccggtgcagaccgtgatgcgccgctacggtatcgccaacccgtacgagcagctcaaggaactgacgcgcggcaagggcatttcgcgcgaggcgctgcgcgaattcatcgggaccctggcgattcccgaggctgcccgccagcagctgctggacatgacgccgggcagctatgtcggcaaggcggtggagctggcccgccggatcgcctga

SEQ ID NO: 144634 - protein, 457 aa, Ralstonia solanacearum GMI1000
MSSLSALTALSPIDGRYAAKADPLREWLSEAAFMRHRVKVEVHWLIALSQAGLAEIPRFSADAERALLALVDHFAEADAARIKEIEAVTNHDVKAVEYWLKERVKGNAELEAASEFIHFACTSEDINNTSHGMMLKGARDTVIVPTLRRVQARLVELAHANADVPMLSRTHGQPASPTTLGKEMANVAARLDRAIRRIEAVELLGKMNGAVGNYNAHLSAYPDADWEAFSKSVIETRLGLTFNPYTIQIEPHDYMAELFDAVARANTIILDLDRDVWGYISQGYFKQKTKAGEIGSSTMPHKVNPIDFENSEGNVGLANAVLRHLSEKLPVSRWQRDLTDSTVLRNIGVAFGYSLLAYDACLRGLGKLETNPARLAEDLDACWEVLAEPVQTVMRRYGIANPYEQLKELTRGKGISREALREFIGTLAIPEAARQQLLDMTPGSYVGKAVELARRIA

SEQ ID NO: 144635 - DNA, 1353 bp, Pyrococcus furiosus DSM 3638
  CDS (1)..(1353): transl_table=11
atggcgattcacccaattgattatcgctatggtagcgaggagatgaagaggatatgggatgaggagaataagttgcaaaagctacttgacgtggaggccgcacttgctagggctcatgctaaggtaggaaatatcccagaggaaagtgcaagggtgatttcagagagggccaacaccaagtgggtaaagcttgagagggttaaagagatagaggccgagattcatcacgacataatggccgtggttaaggccttaagcgaagtttgcggtgagcatgggaagtacgttcacctgggagcgacttccaacgacatcatcgatactgcaaacgcccttctaataaaggaaagccttgagatcgtggagagagacctaaaggaactcaggtcaatattgaaaaagttagctaaggagcatatagatacagtttgcattggaagaactcatggacagcatgcaatcccaacaacatacggaatgaaatttgccttgtggttggacgagattcagaggcacatcgagaggttgtaccaattaaaggagagagttttagttggaaagatgagaggagctgtgggaactgcagcctcatttggagaaaaggcctttgaaatagagaggctagttatggaagacttgggattaaagccggcaagaataacaaatcaaataatccagagagatgtttatgccgagcttatgttcttcttggcattggtagcttcaactttggacaagatgggattagagataagaaaccttcagagaacggaaattcttgaggttagtgagccctttggagagaagcaggttggttcttcaacaatgccacacaagaggaatccaataaggactgagaaagtctgtggattggccagggttctttactcaaacgttattccagccctcttaaacaatccattgtggcatgagagagatttgacgaactcttcagttgagagggtaatcctcccagagagctttatattgcttgacgaaatgttgaaaacaatgaaaaaggttctttcgggattggagttcttccccgagaatattaagagaaacctatatctaacgaagaatttgataatggctgaaccattaatgctcaagcttgcggagaaaggaatgggaaggcaggaggcacatgagctagttaggcaaatatccatgaaggcctttaaggagaacagagatctcttggaagtggcaaaggagaatgaggaagttagaaaatatttaacagagaaagattttgaatctttgaagccagaaaactacataggaaaggccagagaaatagtagagaatgttatagcttatgttgaagaaatggaggctaaaggtctttaa

SEQ ID NO: 144636 - protein, 450 aa, Pyrococcus furiosus DSM 3638
MAIHPIDYRYGSEEMKRIWDEENKLQKLLDVEAALARAHAKVGNIPEESARVISERANTKWVKLERVKEIEAEIHHDIMAVVKALSEVCGEHGKYVHLGATSNDIIDTANALLIKESLEIVERDLKELRSILKKLAKEHIDTVCIGRTHGQHAIPTTYGMKFALWLDEIQRHIERLYQLKERVLVGKMRGAVGTAASFGEKAFEIERLVMEDLGLKPARITNQIIQRDVYAELMFFLALVASTLDKMGLEIRNLQRTEILEVSEPFGEKQVGSSTMPHKRNPIRTEKVCGLARVLYSNVIPALLNNPLWHERDLTNSSVERVILPESFILLDEMLKTMKKVLSGLEFFPENIKRNLYLTKNLIMAEPLMLKLAEKGMGRQEAHELVRQISMKAFKENRDLLEVAKENEEVRKYLTEKDFESLKPENYIGKAREIVENVIAYVEEMEAKGL

SEQ ID NO: 144637 - DNA, 1431 bp, Corynebacterium glutamicum ATCC 13032
  CDS (1)..(1431): transl_table=11
atggctgataaaaagaagatcgcaaacgtcctgtcgaaccgttacgcctccgcggaactttctaacctgtggagtgccgaagagaagatcatcatggagcgccagctctggatcgccgtgatgaaagcccagaaagatttgggagttgagatccctgccgaggcaattgaatcctatgaagcagtgatcgaccaggttgatttggcaagcatcgccgatcgtgagcgcgtcacccgccacgatgtgaaggcccgcatcgaagaattcaatgcactggctggccatgagcacatccacaagggcatgacctcccgcgacctcaccgaaaatgttgaacagctgcagatccaccgctcccttgagctggtccgcaacaagggcattgcagttgttgcagctatcggatcccgcgcagcgcagtaccaaagcctggtcatggctggccgttcccacaacgtggcagcgcaggcaactaccttgggcaagcgtttcgcaaccgcagctgatgaaatgctcgtggcacttgagcgcgtcaccgaactgctcaaccgctacccacttcgcggaatcaagggcccaatgggaaccgcccaagacatgcttgacctcatggaaggcgacgaggctcgtctctccgatctggaaacccgcatcgcagcacacctcggctttgatcgcgtcttcgactccgtcggccaggtctacccacgttcccttgacttcgatgcagtatctgctctggttcagcttggctccggcccatcatcgctgtcccacaccattcgtctcatggccggcaccgaaactgttaccgaaggttttaaggaaggccaggtcggttcctctgcaatgcctcacaagatgaacgctcgctcctgtgagcgcgtgggcggcctgcaggttattcttcgcggatacctcaccatggttgctgatctttccggccagcagtggaacgaaggcgatgtcttctgctccgtgatccgccgcgttgcactgccagacgcattcttcgcgattgacggaatgtttgaaactttcctgacagtcctggatgaattcggtgcattccctgccatgatcgagcgcgaacttgagcgttacctgccattcctggcaactacccgtatcctcatggccgctgtccgcgcaggcgttggccgcgaaaccgcacacgaagtaatcaaggaaaacgctgtcgcggttgccctcaacatgcgcgaaaatggcggtgaccaggaccttatccagcgcctcgctgctgatgagcgcctcccaatgagcgaagctgaccttgaggcagcgctggctgaccgccacgccttcatcggtgccgctgagtcccaggtctcccgtgtgctcgaccgcattcaggtgcttgtcgacgcccaccccggcgccgcagactaccgaccaggtgagattctttaa

SEQ ID NO: 144638 - protein, 476 aa, Corynebacterium glutamicum ATCC 13032; identical to SEQ ID NO: 67197

SEQ ID NO: 144639 - DNA, 1419 bp, Methanopyrus kandleri AV19; identical to SEQ ID NO: 67200
  CDS (1)..(1419): transl_table=11

SEQ ID NO: 144640 - protein, 472 aa, Methanopyrus kandleri AV19; identical to SEQ ID NO: 67201

SEQ ID NO: 144641 - DNA, 1356 bp, Methanosarcina acetivorans C2A
  CDS (1)..(1356): transl_table=11
atgatcgatgtggcaattcatccgatagaataccggtacggtacagcagaaatgaaatacgtatggagtcaggaaaacagactagctaagatcttgcagaccgaggcagcccttgctctggcagaagcggatatgggacttatcccggcagaagcggctgagattatctccgaatgcgttccctccgtaaaggcggaaagagttgacgaaatcgaagccgagatccaccacgacatgatggctgttgttgttgcgatttctgagaagtgcagggaagatgcgggaaagtgggtccatttcggcgccacttcaaacgacatccttgacacagcaaccgcgctccagataaaggacgcaatcgaccttctggaagataaactcaaaatcctgctcagggtgctggtaaaccaggcagaagcccataagaacactgtttgctgtgggaggacacacgggcagataggcgttcccacaacatacgggctccgttttgcaatctgggcttccgagatttcaagacaccttgaccgcctttacgagctgactccgagagctaccgtggggcagatgaccggggctgtcggaactcaggcagcttttgggaagtccggaatcctgatccagaaacttacgatgcagcacctcggaatcggggctgtggatgtctcaaaccagataatccagagagacaggcatgccgaatttgtgatgtggatggcaaatactgttacgaccctggacaagatcggcatcgaaatcaggaatctgcagcgcagtgaaatcgccgagattgaggaaagtttcgggaaaaagcaggtgggttcgtctaccatgccccacaagcggaacccgatcaagtccgagcagatctgcgggcttgcgaggatcgtaagggcaatggttgaacctgaactccttaacaacaccctctgggacgaacgggaccttacaaattcttcctgcgagagagtcgtcttcccggaagcctgtgtgcttacggaccatatccttaaacttgggatccgtgtgcttgagaatctcaggttctatcccgaaaatatccgcaggaacctggacctgctaagaggcctgaacatgggcgaagctgtaatgatcgaacttgcaaaaaggggtgtaggcaggcaggaagcccatgagcttgtcaggacttcggctatggaagcccatgagacggggcagcacttcaaacaggtacttctggatactccttccgtttcaaggtacttgagtgtagaagatatcgaaaaactcgtaaatcccgataagtatataggaacagctgtagaacaggtcgaagcgctcgttgtaagacttcgtgaagcttattccctctga

SEQ ID NO: 144642 - protein, 451 aa, Methanosarcina acetivorans C2A
MIDVAIHPIEYRYGTAEMKYVWSQENRLAKILQTEAALALAEADMGLIPAEAAEIISECVPSVKAERVDEIEAEIHHDMMAVVVAISEKCREDAGKWVHFGATSNDILDTATALQIKDAIDLLEDKLKILLRVLVNQAEAHKNTVCCGRTHGQIGVPTTYGLRFAIWASEISRHLDRLYELTPRATVGQMTGAVGTQAAFGKSGILIQKLTMQHLGIGAVDVSNQIIQRDRHAEFVMWMANTVTTLDKIGIEIRNLQRSEIAEIEESFGKKQVGSSTMPHKRNPIKSEQICGLARIVRAMVEPELLNNTLWDERDLTNSSCERVVFPEACVLTDHILKLGIRVLENLRFYPENIRRNLDLLRGLNMGEAVMIELAKRGVGRQEAHELVRTSAMEAHETGQHFKQVLLDTPSVSRYLSVEDIEKLVNPDKYIGTAVEQVEALVVRLREAYSL

SEQ ID NO: 144643 - DNA, 1359 bp, Methanosarcina mazei Go1
  CDS (1)..(1359): transl_table=11
atggtgattgatatggctattcatcctatagaataccggtacggtacagcagaaatgaaatatgtgtggagtcaggaaaacagacttgctaagatcttgcagaccgaggcagctcttgcccgggcagaagcggatatggggcttattcccgcagaagcggctgaaattatattcgaaagcattgcctctgtaaaagccgagagagtcgatgaaatagaatccgagatccaccatgacatgatggctgtcgttgttgcaatttcagagatgtgcagggatgacgcaggaaaatgggttcacttcggagccacttcaaacgatattcttgataccgcaacagctctccagattaaagacgcaattgatattctggaagacaaactcaaaacccttctaaaagttctggtaaaccaggctgaagcccacaaaaatactgtctgctgcggaaggactcacgggcagataggtgttccaaccacttacggtcttcgttttgcaatctgggcttctgaaatctcaaggcatcttgaccgcctgtacgaactgactccaagagctactgtggggcagatgaccggcgctgtaggcactcaggcagcttttggaaaatcgggaatccttattcagaaacttacaatgcaacacctcggaatcggggctgttgatgtctcaaaccagattatccagagggacagacatgccgagtttgttatgtggatggcaaatgtagttacaacactggacaagatcgggatcgaaatcaggactcttcaacgcagtgagatcgccgagatagaggaaagtttcgggaaaaagcaggtaggttcatccaccatgcctcacaagcgtaatcctatcaagtccgaacagatctgcgggctcgcccgaatagtaagggcaatggttgagcctgaactccttaacaacacactatgggacgagagggacctcacgaattcttcaagtgaacggattgtcttccctgaagcctgtatacttaccgatcatatcattaaactcgggatcagcgttcttgaaaacctcaggttctatcctgaaaatatccgcaggaaccttgattccttaaatggtctgaatatgggcgaggctgttatgatagaacttgcaaaaagaggtgtcggcaggcaggaagcccacgaacttgtccggactgcagctatgagagctcatgatacagggcagcatttcaaacaggttcttctggatactccttccgtttcaaaatatctgagtgcaggagatattgagaaccttgtaaaccctgacaaatatatagggacagcagtggaacaggtagaagggctcgttataaagcttcgagaagcctattcactctga

SEQ ID NO: 144644 - protein, 452 aa, Methanosarcina mazei Go1
MVIDMAIHPIEYRYGTAEMKYVWSQENRLAKILQTEAALARAEADMGLIPAEAAEIIFESIASVKAERVDEIESEIHHDMMAVVVAISEMCRDDAGKWVHFGATSNDILDTATALQIKDAIDILEDKLKTLLKVLVNQAEAHKNTVCCGRTHGQIGVPTTYGLRFAIWASEISRHLDRLYELTPRATVGQMTGAVGTQAAFGKSGILIQKLTMQHLGIGAVDVSNQIIQRDRHAEFVMWMANVVTTLDKIGIEIRTLQRSEIAEIEESFGKKQVGSSTMPHKRNPIKSEQICGLARIVRAMVEPELLNNTLWDERDLTNSSSERIVFPEACILTDHIIKLGISVLENLRFYPENIRRNLDSLNGLNMGEAVMIELAKRGVGRQEAHELVRTAAMRAHDTGQHFKQVLLDTPSVSKYLSAGDIENLVNPDKYIGTAVEQVEGLVIKLREAYSL

SEQ ID NO: 144645 - DNA, 1305 bp, Chlorobium tepidum TLS
  CDS (1)..(1305): transl_table=11
atgataccacgttactcgccgaaagacatctcggcaatctggagcgatgaagccaaattcgaacgctggctgcaactcgaaatcgctgccgtcgaggcacgcatggaagccggcatcgttccggcggacgcccttgcgaccattaaagaaaaagccaggttcaacgtcgaagagattcttatcattgaaaacgagacgaagcacgacgtcattgcctttctaaccaacgtcgccggctacgtcggccccgaatcacgttacatccacgagggtctcacctcttcggacgtggtcgatacctgcctggcgatgcagatgcgcgatgcgggcaagatcatcgtggctgacatcgagtcgcttatcgaggtgctcggcaaaaaggccgtcgaacacaaatacacccttcagatgggccgcacgcacggcattcacgccgagccgaccacgttcggcctgaagctgttgctctggtacgaggagatgaagcgcaacctcgaacgcatgaagcgcgcgctcgaaaccgtctcggtcggtaaaatttccggcgcggtcggcacctaccagcatctgtcaccggacatcgaggccgccgtctgccagaagcttggcctgaagccctcgtcgatctcgacgcagattctccagcgcgaccgacacgccgaatacgccacgacgctcgccatcgtcgcctcgtccatcgagaagttctcgaccgaactgcgccacctgcaacgcaccgaggttcgcgaaaccgaggagtttttcagcaagggccagaaaggcagctccgccatgccgcacaagcgcaacccgatcacctttgagcgcctcaccggcttggctcgcgtggtgcgctccaactccatcgccgccatggagaacgtcgccctctggcacgaacgcgacatttcgcactcctcggtcgagcgcgtcatcatgcccgactcgaccatcgcgctggtttatatgctgcgcaccttccgtgattcgatcgagaccttgctcgtctatccggagcgcatgaagcaaaacttcgacacctcctacggcctgaccctctcgcagacgctgctgctcgccctcaccggcaagggactcacccgtgaagacgcctaccgcctcgtgcagcgcaacgccatgaaaagctgggaggagaaaatccagctcaaggagctggtgattcacgacccggaaatcctcgaacacatcagcgcagaagagatcaaccagctcttcagcccggagacaattcaggacaagctcaaaaacagcgtggatattattttcaagcgcaacgggctgtga

SEQ ID NO: 144646 - protein, 434 aa, Chlorobium tepidum TLS
MIPRYSPKDISAIWSDEAKFERWLQLEIAAVEARMEAGIVPADALATIKEKARFNVEEILIIENETKHDVIAFLTNVAGYVGPESRYIHEGLTSSDVVDTCLAMQMRDAGKIIVADIESLIEVLGKKAVEHKYTLQMGRTHGIHAEPTTFGLKLLLWYEEMKRNLERMKRALETVSVGKISGAVGTYQHLSPDIEAAVCQKLGLKPSSISTQILQRDRHAEYATTLAIVASSIEKFSTELRHLQRTEVRETEEFFSKGQKGSSAMPHKRNPITFERLTGLARVVRSNSIAAMENVALWHERDISHSSVERVIMPDSTIALVYMLRTFRDSIETLLVYPERMKQNFDTSYGLTLSQTLLLALTGKGLTREDAYRLVQRNAMKSWEEKIQLKELVIHDPEILEHISAEEINQLFSPETIQDKLKNSVDIIFKRNGL

SEQ ID NO: 144647 - DNA, 1446 bp, Bifidobacterium longum NCC2705
  CDS (1)..(1446): transl_table=11
ttggaggttatgaagcttaccgatatttcccccgcaatcgcattgaccccgctcgacggccgttatcacaaggccaccgccccgctcgtcgaatacatgagcgaacctgccctgaaccgcgaacgcatgcgtgtcgaagtcgaatggatgattcttctggccaacggctttgagggcaacggcaaccagccgatcgttgacggcgtcaagccgttcactgccgaagagcaggccttcctgcgcgccattcccgaggacttcggcgccgaaggcatcaagcagcacgccgctcatgaggccatcacccaccacgatgtgaaggccgtggagtactacatcgatgatcagatcgacaaggctccggccgagctgaccaacatcaacgacgagctgaagaccctcgtacacttcgcctgcacgtccgaagacatcaacaacctctccatcgcccgttgcgtcaagaacgcgatggaaaacgtgtggaccccggagttcaagcgcatcatcgaccacctcgccggcaaggccgaggaattcaaggatatgccgctgctctctctcacccacggccagccggccacgccgaccacgctcggcaaggagctcgccgtctacgtctaccgtctgaaccgtcagctcaagcacatcgaaaaccaggagtacctgggcaagatcaacggcgcgaccggcacgttcggtgcccacttggccgcatgcccggatgtcgactggatcgctgtctcccgcgaattcgtcaccaaccgcatgggcctgacctggaacccgctgaccacgcagatcgaaagccacgactggcaggccgagctgtactccaccgtctcccacgccaaccgcatcatgcacaacctgtgtgtggacgtgtggatgtacatctcccgtggagtgttcgcccaggtgccggtcaagggtgccactggttcctccaccatgccgcacaaggtcaacccgattcgtttcgagaacgccgaagccaacttcgaaatcagctgctcgctgcttgacaccctctccgccacgctggtggaatcccgttggcagcgcgatctgaccgattcgaccacccagcgcaacatcggttccgcgctcggctactccttgctcgccctgaccaacctcatgggcggccttgagtccatccacccgaacacccacgtcatcgagcgtgagcttgatgagaactgggaggtgcttggcgagccgatccaaaccgccatgcgcgcctgcgagctcaagggcctgccgggcatggacaagccgtacgagaaggtcaaggggcttatgcgcggccgcaccatcaacaaggaacaggtcgagcagttcatcgaccagcagtccttcgacccggaaaccgccgctcgcttgaaggctctgacccccgccacctacaccggtgtggccagccagctcgtcgctttcggccgctga

SEQ ID NO: 144648 - protein, 481 aa, Bifidobacterium longum NCC2705
MEVMKLTDISPAIALTPLDGRYHKATAPLVEYMSEPALNRERMRVEVEWMILLANGFEGNGNQPIVDGVKPFTAEEQAFLRAIPEDFGAEGIKQHAAHEAITHHDVKAVEYYIDDQIDKAPAELTNINDELKTLVHFACTSEDINNLSIARCVKNAMENVWTPEFKRIIDHLAGKAEEFKDMPLLSLTHGQPATPTTLGKELAVYVYRLNRQLKHIENQEYLGKINGATGTFGAHLAACPDVDWIAVSREFVTNRMGLTWNPLTTQIESHDWQAELYSTVSHANRIMHNLCVDVWMYISRGVFAQVPVKGATGSSTMPHKVNPIRFENAEANFEISCSLLDTLSATLVESRWQRDLTDSTTQRNIGSALGYSLLALTNLMGGLESIHPNTHVIERELDENWEVLGEPIQTAMRACELKGLPGMDKPYEKVKGLMRGRTINKEQVEQFIDQQSFDPETAARLKALTPATYTGVASQLVAFGR

SEQ ID NO: 144649 - DNA, 1371 bp, Vibrio vulnificus CMCP6
  CDS (1)..(1371): transl_table=11
atggaactgtcagcattgactgctgtttcaccagtagacggccgttacggaagcaagacaattgcgttacgcgaaattttcagtgaatacggtctactaaagtaccgtactatcgttgaaatccgctggctacaaaagcttgctgctactgctgaaattgcagaagtgccagcgttcagcgcagaagcaaaccaattcctcgacgatcttgctgctaacttctctgaagcagacgcattacgcatcaaagagatcgagcgtactactaaccatgacgttaaagcggtggaatacttcttaaaagagaaagtcgctgacgttcctgagcttcacgctgttaacgagttcttccattttgcctgtacttctgaagacattaataacacctcacacgctttaatgcttaaagaagcacgtgagacggtcattcttccagaaattcgtaacctgattgacgcaatcaaagcacttgctgttgaataccgtgacattcctcttctatctcgtacacacggtcagccagcttctccatcaacaatgggcaaagaaatggcaaacgtggcgtaccgtatggagcgtcaatacaagcaaatcgaaaacgttgaaatcctagcgaaaatcaacggtgcggtaggtaactacaacgcacacctttctgcttacccagagctcgattggcacaaattctctgaagagttcatcactgaatctctcggtgttacttggaacccttacaccacgcagatcgaaccacatgactacatcgcagagctattcgatgctgtggcacgtttcaacacgattctgatcgacttcgaccgtgacgtttggggttacatcgcactaggccacttcaagcaaaaaaccattgctggcgagatcggttcttcaaccatgccacacaaagtgaacccaatcgactttgaaaactctgaaggaaacctaggtcttgcaaacgcagtgtttggccacctagcacaaaaactgccaatctctcgttggcaacgtgacctgacggactcaacagttctacgtaaccttggtgtgggtgttggctacgcaatcatcgcttacacatcgacgcttaaaggcatcagcaagcttgaagtcagccgtgaagcacttcttgcggaactagacaagaactgggaagtacttgcagagccagtacaaaccgttatgcgtcgttacggcattgagaagccatacgagaagctaaaagagctgactcgtggtaagcgtgtagacggtgaagcaatgcgtaatttcatcgacggtcttgagcttcctgagcacgagaaagcacgtctaaaagagatgacgccagcaaactacatcggtcaagctatcgagctgacagacaagctgtaa

SEQ ID NO: 144650 - protein, 456 aa, Vibrio vulnificus CMCP6
MELSALTAVSPVDGRYGSKTIALREIFSEYGLLKYRTIVEIRWLQKLAATAEIAEVPAFSAEANQFLDDLAANFSEADALRIKEIERTTNHDVKAVEYFLKEKVADVPELHAVNEFFHFACTSEDINNTSHALMLKEARETVILPEIRNLIDAIKALAVEYRDIPLLSRTHGQPASPSTMGKEMANVAYRMERQYKQIENVEILAKINGAVGNYNAHLSAYPELDWHKFSEEFITESLGVTWNPYTTQIEPHDYIAELFDAVARFNTILIDFDRDVWGYIALGHFKQKTIAGEIGSSTMPHKVNPIDFENSEGNLGLANAVFGHLAQKLPISRWQRDLTDSTVLRNLGVGVGYAIIAYTSTLKGISKLEVSREALLAELDKNWEVLAEPVQTVMRRYGIEKPYEKLKELTRGKRVDGEAMRNFIDGLELPEHEKARLKEMTPANYIGQAIELTDKL

SEQ ID NO: 144651 - DNA, 1377 bp, Nitrosomonas europaea ATCC 19718
  CDS (1)..(1377): transl_table=11
atggaaatctcgacacttcttgcactttctccgctggatgggcggtatcagcagaaggtggcagccttgcgaccctttttcagtgaatatgcattgattcgcaaccggattcatgtggaaattgaatggttcaaggcattgggcaatactccggccttgacaggggcgtcctctttatctaccggcgctgtcgtgcaactggatcagctcgtggagaatttttccgtaacggatgcagaagccgtcaaatcgatcgagacgcgaaccaatcatgacgtgaaggctgtggaatactggttgaaggaaaaactgaccggagatcaggagacggcggcaatttctgaattcgtgcattttgcctgtacatccgaggatatcaataatctttcacatggcctgatgctcaaacacagtcgggaccaggtcatgctccccgcgctcgatgaagtcatcaaaaggcttgctgtcctggccagagatctggcggatctcccgatgcttgctcgtacccatgggcaggcagccacccccacgaccatgggtaaggaaatggccaattttgtttatcggttacgcggggcgcgcgagcggcttgcagccgtggtcattaccggaaaaatcaatggagcagtgggtaactacaatgcgcacatgattgcttttcctgatttcgactgggaatcttttgcgcgatctttcgtcgagaagctcggcctgagtttcaatccatataccacccagatcgaaccgcatgacaccatggcagagctgttcgatgcccatgtccgtatcaatacgattcttctcgacctgaaccgcgatatctggggctatgtttcgctcggttacttcaggcagaaaaccagagctgatgaagtcggttcttccaccatgccacataaagtgaatccaatcgattttgaaaattcggaagggaatctcggtattgccaatgcgctgctcaaacatttgagtgaaaaacttcctgtctcacgctggcagcgcgatctcaccgattcgaccgtgttgcgcaatatgggtgtggcgcttggtcatactctgctggcttatgattcatgtctcaaagggctcggaaagctgcaggcggatccggcacgtctgtcggaggatttgcagaatgcctgggaagtcctggccgaaccgattcagacagtaatgcgccgttatggggtagccaatccctacgaacagctcaaggcattgacgcgcggaaaaacaggaatcgaccgtacgacacttcaacaattcatcgagcaactcgatattcctgctgccgagagagatcgcctgctgcaacttacaccctggggttatatcggcctggcagcgcacctggcaagggatatcggagactga

SEQ ID NO: 144652 - protein, 458 aa, Nitrosomonas europaea ATCC 19718
MEISTLLALSPLDGRYQQKVAALRPFFSEYALIRNRIHVEIEWFKALGNTPALTGASSLSTGAVVQLDQLVENFSVTDAEAVKSIETRTNHDVKAVEYWLKEKLTGDQETAAISEFVHFACTSEDINNLSHGLMLKHSRDQVMLPALDEVIKRLAVLARDLADLPMLARTHGQAATPTTMGKEMANFVYRLRGARERLAAVVITGKINGAVGNYNAHMIAFPDFDWESFARSFVEKLGLSFNPYTTQIEPHDTMAELFDAHVRINTILLDLNRDIWGYVSLGYFRQKTRADEVGSSTMPHKVNPIDFENSEGNLGIANALLKHLSEKLPVSRWQRDLTDSTVLRNMGVALGHTLLAYDSCLKGLGKLQADPARLSEDLQNAWEVLAEPIQTVMRRYGVANPYEQLKALTRGKTGIDRTTLQQFIEQLDIPAAERDRLLQLTPWGYIGLAAHLARDIGD

SEQ ID NO: 144653 - DNA, 1395 bp, Wigglesworthia glossinidia endosymbiont of Glossina brevipalpis
  CDS (1)..(1395): transl_table=11
atgaaattatctcatttaactgcaatttctcctgtagatggtagatattttgaatatgttaaatcacttagaaatatttttagcgaatttagtttgttaaaatatagattaattattgaaatagaatggtttaaaaaaatctctgaatgtgaaaaaattaatgatattgaacctctaatttctgaagaaaaaatttttttaaataacattttaaataattttagcttgaaagatgctatagaaataaaaaatattgagcgtaaaactaatcatgatattaaagcagtagagtattttttaaagaaaaaattttctttaatgaaaagtttagatgaaaaaaaagaatttatacattttgcatgtacatctgaagatataaataatctttcatatgctttgatgataatcaaaacaagaaatgaaataataattccaatttggtataaaataattaaaaatattgtttctttttctaaaaaatataaaaattttccaataatatctagaactcacggtcagcctgcaactccatctacattaggaaaagaattttgtaacttttcttatagattgataagacaatttaatcaattaaaaaaaattaaaattcttggtaaaataaatggaactgttggaaattataatgctcattttatttcttaccctaatgttgattggattaattttagcaaagaatttgtaaatagtcttggaatagaactaaatttgtttactactcagattgagcctcatgattatatatcagaaatattgcattgtttttctagatttaataatattttaataaattttaacagagacatatgggggtatttatctattaatttttttaagaacaaatataataaaggtaaaattggatcttctgttatgcctcacaaaataaatccaatagattttgaaaattctgaaggaaatttagaattatctaatgctattttaaatcatttatctaataaattatcaatatctagatggcaaagagatttgactgattctacttctttaagaaatataggattagcgataagctattcttttattgcatataaaaaatttttaaatggaatttcaaatttagaaattaataaatttaatataaaatctgatttaagatctcattgggaagttctttcagaacctatccaaactttgatgcgcaggaataaaattaaaaattcttatgagttagtaaaagattttttaatcaaaaaagatctagatcctgaaactttgaaaagttttgtagaaaatttgaaaattaaaaatagtgataaaaatattttaaaaaatattacacctgaaaaatatattggtttatcaactttgttagttgattgtatagaaaaatattttaataatatcgataaataa

SEQ ID NO: 144654 - protein, 464 aa, Wigglesworthia glossinidia endosymbiont of Glossina brevipalpis
MKLSHLTAISPVDGRYFEYVKSLRNIFSEFSLLKYRLIIEIEWFKKISECEKINDIEPLISEEKIFLNNILNNFSLKDAIEIKNIERKTNHDIKAVEYFLKKKFSLMKSLDEKKEFIHFACTSEDINNLSYALMIIKTRNEIIIPIWYKIIKNIVSFSKKYKNFPIISRTHGQPATPSTLGKEFCNFSYRLIRQFNQLKKIKILGKINGTVGNYNAHFISYPNVDWINFSKEFVNSLGIELNLFTTQIEPHDYISEILHCFSRFNNILINFNRDIWGYLSINFFKNKYNKGKIGSSVMPHKINPIDFENSEGNLELSNAILNHLSNKLSISRWQRDLTDSTSLRNIGLAISYSFIAYKKFLNGISNLEINKFNIKSDLRSHWEVLSEPIQTLMRRNKIKNSYELVKDFLIKKDLDPETLKSFVENLKIKNSDKNILKNITPEKYIGLSTLLVDCIEKYFNNIDK

SEQ ID NO: 144655 - DNA, 1368 bp, Haemophilus ducreyi 35000HP
  CDS (1)..(1368): transl_table=11
atggaagttactgctttaacagcattatcgccgattgatggtcgttaccaagataaaacaaatgcacttcgcacaatttttagtgaatttggcttactcaaatttcgagtaactgtggaagtgcgttggttacaaaaattggcatcacatccacaaattagcgaagtttcagctttgtcgcaaaaggcaaacgattacttagatcaaattgtggcaaacttttccattgatgatgctaagcgcataaaaatgattgagcgtgaaactaatcacgatgtaaaagcagttgaatattttttgaaagaaaaatgtaatgcattagctgaattacaagcgattaatgaatttattcattttgcttgtacctcagaagatattaataacacttctcacgcattaatgttaaaaatggcacgtgaagaagtattattaccagaatggcaaaaattgattgatgcaattgttgagcttgctaaacgttatcaacatattccactactgtctcgtacacacggtcaacctgcgagcccgaccactattggtaaagaaatggcgaatgtggcttatcgtttgcgccgtcaatataaacaattacaaaatttagatattttagctaaaattaatggcgccgttggaaactataatgcacatttatcagcttatccagaaattgattggcatacctttggtcaacaatttgttgaatctttaggagttaattggaatccatataccacacaaattgaaccacacgattatattgcagagttttttgattgtgtagcacgttttaatacgattatgattgattttgatcgtgatatgtggggctatattgcgttaaatcattttaaacagcgtactgttgctggagagattggatcatcaacaatgcctcataaagtgaatccgattgactttgaaaattcagaaggtaacttgggtttagctaatgccgtgatggcgcatttaggacaaaaattgccagtttcacgttggcaacgtgatttaactgattctacagtattacgtaatcttggtgttggtttaggctattgcttaattgcctattcagccactttaaaaggcatcagcaaattagaagtgaatgaacagcatttacaagatgaattaaatcaaaattgggaagtgttagctgaacccattcagactgtgatgcgtcgctatggtattgaaaaaccatatgaaaaacttaaagaattaacacgtggtaaatgtgtaaatgaagccgttatacggcagtttattgatacgctcgccattccagaaagtgaaaaagcacgtttaaaagaaatgagcccggctacttatattggatatgcgattgagcttgtagataagttataa

SEQ ID NO: 144656 - protein, 455 aa, Haemophilus ducreyi 35000HP
MEVTALTALSPIDGRYQDKTNALRTIFSEFGLLKFRVTVEVRWLQKLASHPQISEVSALSQKANDYLDQIVANFSIDDAKRIKMIERETNHDVKAVEYFLKEKCNALAELQAINEFIHFACTSEDINNTSHALMLKMAREEVLLPEWQKLIDAIVELAKRYQHIPLLSRTHGQPASPTTIGKEMANVAYRLRRQYKQLQNLDILAKINGAVGNYNAHLSAYPEIDWHTFGQQFVESLGVNWNPYTTQIEPHDYIAEFFDCVARFNTIMIDFDRDMWGYIALNHFKQRTVAGEIGSSTMPHKVNPIDFENSEGNLGLANAVMAHLGQKLPVSRWQRDLTDSTVLRNLGVGLGYCLIAYSATLKGISKLEVNEQHLQDELNQNWEVLAEPIQTVMRRYGIEKPYEKLKELTRGKCVNEAVIRQFIDTLAIPESEKARLKEMSPATYIGYAIELVDKL

SEQ ID NO: 144657 - DNA, 1449 bp, Bordetella parapertussis 12822
  CDS (1)..(1449): transl_table=11
ttgccacatatgttacagagagggcgaatggtaaaatcgcccggcttacaaccgcttccttcttacaccgacatgcagattgccgaccagcttacccaacttaatgctctttcgccactggatggacgctatgcgtcgcgcgccggggcgctgcgggggctgctgtccgaggccgggttcatggcgcatcgcgtcgaggtcgaggtggcctggctcgttgcgttgtccgatgcgggcctgcccgagctgccggcgttcccggccgccgcgcgcgagcgcctggccgcgctggtgcgcaatttttccgaggccgacgccgcccgcatcaaggacatcgagcgcgtgaccaatcacgatgtcaaggcggtcgagtactggctgaaagaacaggtggccgacgatgccgaattggcgcgtgccgccgagttcatccatttcgcgtgcacctccgaagacatcaacaatacttcgcatgcgctcatgctcacgcgtgcgcgcgccgaagtcgtcgtgccgcagctcaaccaggtgctggccaagctgaacgaactggcccggacgcatgccgaccagcccatgctgtcgcgcacgcacggccagcccgccagtccgaccacgctgggcaaggagttcgccaacgtggcggcgcgcctgcagcgcgccgtggccgccatcgaggcggtcgagccgctggccaagctcaatggcgccacgggcaactacaacgcgcatctgtcggcgtacccggaaatcgactggcccgccttcagccgcaatgtgctggccggcctgggcctgacccagaaccgccataccatccagatcgaaccgcacgactggatggcggcgctgtccgacgccgtggcgcgcgccaacgtcatcgtgctggacctggaccgcgacatctggggctacgtggccctgggctacttcaagcagcgcctgaaggagggcgaggtcggctcctcgaccatgccgcacaaggtcaacccgatcgatttcgagaactccgagggcaacctgggtctggccaatgccgtgctgcgccatctgtccgagaagctgccggtttcgcgctggcagcgcgacctgaccgattcgacggtgttgcgcaacctgggcgtgggcctgggctatgcgctggtcgcctgggatgcctgcctgcgcgggctgaacaagctggaagtcaacgccgcggcgatcgacgccgacatcgatgcgtgctgggaagtgctggccgagccggtgcagacggtcatgcgccgctacggcctgccgcagccgtacgagcagctcaaggcgctcacgcgcggcaagggcattaccgaagaggccttgcgcgaattcatcggcggcctggcgctgcccgacgagcccaaggcccgcctgctggcgatgacgccgcgctcgtatatcggcctggccgcgcaactggcgcgggcggtatag

SEQ ID NO: 144658 - protein, 482 aa, Bordetella parapertussis 12822
MPHMLQRGRMVKSPGLQPLPSYTDMQIADQLTQLNALSPLDGRYASRAGALRGLLSEAGFMAHRVEVEVAWLVALSDAGLPELPAFPAAARERLAALVRNFSEADAARIKDIERVTNHDVKAVEYWLKEQVADDAELARAAEFIHFACTSEDINNTSHALMLTRARAEVVVPQLNQVLAKLNELARTHADQPMLSRTHGQPASPTTLGKEFANVAARLQRAVAAIEAVEPLAKLNGATGNYNAHLSAYPEIDWPAFSRNVLAGLGLTQNRHTIQIEPHDWMAALSDAVARANVIVLDLDRDIWGYVALGYFKQRLKEGEVGSSTMPHKVNPIDFENSEGNLGLANAVLRHLSEKLPVSRWQRDLTDSTVLRNLGVGLGYALVAWDACLRGLNKLEVNAAAIDADIDACWEVLAEPVQTVMRRYGLPQPYEQLKALTRGKGITEEALREFIGGLALPDEPKARLLAMTPRSYIGLAAQLARAV

SEQ ID NO: 144659 - DNA, 1371 bp, Chromobacterium violaceum ATCC 12472
  CDS (1)..(1371): transl_table=11
atgaatctgactacgttgaccgccctctctccgctggatggccgctacgccggccaggtggaaggcctgcgcaacctgttctccgaattcggcctgatgaagtgccgcgtcaaggtggagctggaatggctgaaaatgctggccgccgagccgggcatcgaagaagtcaagccgttctccgacgccaccatccgcgagatcgacgacgtgatcgccaatttcagcgtcgagcacggcgaagaggtgaaggcgatcgaagtccgcaccaaccacgacgtcaaggcgatcgagtactggctgaaggagcgcctgtcgggcaatccggaagtgatggccgccagcgagttcatccacttcgcctgcacctccgaggacatcaacaacctcagccacgcgctgatgctgaagaccgcgcgcaacaccgtgctgctgccggcgctggacgaagtgatccacaagctgcagaagctggcgcacgagttggccgacacgccgatgatgtgccgcacccacggccagccggccacgccgtcgacgatgggcaaggagctggccaacgccgtctaccgcctgaagcgccagcgcgagcagctggtgcaccaggaaatcctgggcaagattaacggcgcggtcggcaactacaacgcccacctgtccgcctacccggacatcgactgggaaagcctgtgcggccgcttcgtcaccggtctgggcatcaccttcaatccgtacaccatccagatcgagccgcacgactacatggccgagctgtaccaggtggcgatgcgcgtcaacaccatcctgatcgacctgaaccgcgacatctggggctacatctcgctgggctacttcaagcagaaggtgaagaaggacgaagtgggcagctccaccatgccgcacaaggtcaacccgatcgacttcgaaaactcagaaggcaacctgggcatggccaacgccatcatgggccacctggcggaaaaactgccgatctcccgctggcagcgcgatctgaccgactccaccgtgctgcgcaatatgggggtcggcttcggctacaccatcctgggcctgaagtcctgcctgaaaggcctgaacaagctggagatcaatccggccctgatcgcggccgagctggacgccgcctgggagctgctggccgagccggtgcagaccgtgatgcgccgctacggcatcgccaacccgtacgagcagctgaaggagctgacccgcggcaagggcggcatcacccgcgagacgctgcacgccttcatccgcggcctggagctgccggacgcggtcaaggccagcctgctggaactgaccccgtccaactacttgggcaaggccgaggaactggcgcgccgcatctga

SEQ ID NO: 144660 - protein, 456 aa, Chromobacterium violaceum ATCC 12472
MNLTTLTALSPLDGRYAGQVEGLRNLFSEFGLMKCRVKVELEWLKMLAAEPGIEEVKPFSDATIREIDDVIANFSVEHGEEVKAIEVRTNHDVKAIEYWLKERLSGNPEVMAASEFIHFACTSEDINNLSHALMLKTARNTVLLPALDEVIHKLQKLAHELADTPMMCRTHGQPATPSTMGKELANAVYRLKRQREQLVHQEILGKINGAVGNYNAHLSAYPDIDWESLCGRFVTGLGITFNPYTIQIEPHDYMAELYQVAMRVNTILIDLNRDIWGYISLGYFKQKVKKDEVGSSTMPHKVNPIDFENSEGNLGMANAIMGHLAEKLPISRWQRDLTDSTVLRNMGVGFGYTILGLKSCLKGLNKLEINPALIAAELDAAWELLAEPVQTVMRRYGIANPYEQLKELTRGKGGITRETLHAFIRGLELPDAVKASLLELTPSNYLGKAEELARRI

SEQ ID NO: 144661 - DNA, 1371 bp, Vibrio vulnificus YJ016
  CDS (1)..(1371): transl_table=11
atggaactgtcagcattgactgctgtttcaccagtagacggccgttacggaagcaagacaattgcgttacgcgaaattttcagtgaatacggtctactaaagtaccgtactatcgttgaaatccgctggctacaaaagcttgctgctactgctgaaattgcagaagtgccagcgttcagcgcagaagcaaaccaattcctcgacgatcttgctgctaacttctctgaagcagacgcattacgcatcaaagagatcgagcgtaccactaaccatgacgttaaagcggtggaatacttcttaaaagagaaagtcgctgacgttcctgagcttcacgctgttaacgagttcttccattttgcctgtacttctgaagacattaataacacctcacacgctttaatgcttaaagaagcacgtgagacggtcattcttccagaaattcgtaacctgattgacgcaatcaaagcacttgctgttgaataccgtgacattcctcttctatctcgtacacacggtcagccagcttctccatcgacaatgggtaaagaaatggcaaacgtggcgtaccgtatggagcgtcaatacaagcaaatcgaaaacgttgaaatcctagcgaaaatcaacggtgcggtaggtaactacaacgcacacctttctgcttacccagagctcgattggcacaaattctctgaagagttcatcactgaatctctcggtgttacttggaacccttacaccacgcagatcgaaccacatgactacatcgcagagctattcgatgctgtggcacgtttcaacacgattctgatcgacttcgaccgtgacgtttggggttacattgcactaggccacttcaagcaaaaaaccattgctggcgagatcggctcttcaaccatgccacacaaagtgaacccaatcgactttgaaaactctgaaggtaacctaggtcttgcgaacgcagtgtttggtcacctagcacaaaaactgccaatctctcgttggcaacgtgacctgacggactcaacagttctccgtaaccttggtgtgggtgttggctacgcaatcatcgcttacacatcaacgcttaaaggcatcagcaagcttgaagtgaaccgtgaagcacttcttgctgaactagacaagaactgggaagtacttgcagagccagtacaaaccgttatgcgtcgttacggcattgagaagccatacgagaagctaaaagagctaactcgtggtaagcgtgtagacggtgaagcaatgcgtaatttcatcgacggtcttgagcttcctgagcacgagaaagcacgtctaaaagagatgacgccagcaaactacatcggtcaagctatcgagctgacagacaagctgtaa

SEQ ID NO: 144662 - protein, 456 aa, Vibrio vulnificus YJ016
MELSALTAVSPVDGRYGSKTIALREIFSEYGLLKYRTIVEIRWLQKLAATAEIAEVPAFSAEANQFLDDLAANFSEADALRIKEIERTTNHDVKAVEYFLKEKVADVPELHAVNEFFHFACTSEDINNTSHALMLKEARETVILPEIRNLIDAIKALAVEYRDIPLLSRTHGQPASPSTMGKEMANVAYRMERQYKQIENVEILAKINGAVGNYNAHLSAYPELDWHKFSEEFITESLGVTWNPYTTQIEPHDYIAELFDAVARFNTILIDFDRDVWGYIALGHFKQKTIAGEIGSSTMPHKVNPIDFENSEGNLGLANAVFGHLAQKLPISRWQRDLTDSTVLRNLGVGVGYAIIAYTSTLKGISKLEVNREALLAELDKNWEVLAEPVQTVMRRYGIEKPYEKLKELTRGKRVDGEAMRNFIDGLELPEHEKARLKEMTPANYIGQAIELTDKL

SEQ ID NO: 144663 - DNA, 1446 bp, Nasonia vitripennis; identical to SEQ ID NO: 67218
  CDS (1)..(1446)

SEQ ID NO: 144664 - protein, 481 aa, Nasonia vitripennis; identical to SEQ ID NO: 67219

SEQ ID NO: 144665 - DNA, 1389 bp, Burkholderia vietnamiensis G4
  CDS (1)..(1389): transl_table=11
atgtccgacactcgtcccgatacgcttttcgccctcaccgcgctctcgcccatcgacggccgctacgccagcaagaccgaagcgctgcgcgactggctctccgaagccgcgttcatgcgccaccgcgtcaccgtcgaggtgcactggctgatcgcgctgtcgcgcgccggcttcgccgaaattccgcgcttctccgacgcgtccgagcaattcctgctgcagctcgccgagcgcttcaccgcgcacgacgccgcccgcatcaaggacatcgagcgcgtgacgaaccacgacgtgaaggccgtcgaatactggctgaaggaatcggtgaagggccaggccgagctcgagaaggcgagcgagttcatccacttcgcctgcacgtccgaggacatcaacaacacgtcgcacgggatgatgctcgccggcgcgcgcgagcacgtgatcgtgccggcgctgcgcaccgtccaccagcgtctcgtcgcgctcgcgcacgccctggccgatcagccgatgctgtcgcgcacgcacggccagccggccagcccgacgacgctcggcaaggagctcgcgaacgtcgccgcccgtctgggccgcgcgatcgcacgcatcgagaaggtcgagatcctcggcaagatgaacggcgcggtcggcaacttcaacgcgcatctgtcggcgtatccggaattcgactgggaagcgttctcgcgcgacgtgatcgaaaaccgcctgaagctcaccttcaacccgtacacgatccagatcgagccgcacgactacatggccgagctgttcgacgcggtcgcgcgcgccaacacgatcctgctcgacctcgaccgcgacgtgtggggctacatctcggtcggctacttcaagcagaagacgaaggccggcgagatcggctcgtcgacgatgccgcacaaggtcaacccgatcgacttcgagaactcggaaggcaacctcggcctcgcgaacgcgacgctgcgccacctcgccgacaagctgccggtgtcgcgctggcagcgcgacctgaccgactcgacggtgctgcgcaacatgggcgtcgcgctcggctactcgctgctcgcgtacgactcgctgatccgcggcctcgacaagctcgaagtcaacccgcagcgcctgcacgacgacctcgacaactgctgggaagtgctcgcggagccggtgcagacggtgatgcgccgctacggcatcgagaatccgtacgagcagctgaaggagctcacgcgcggcaagggcatcacgcgcgaagcgctgcaggaattcgtcgcaacgctcgcgatcccgcaggacgcgaaggatcgcctgctcgcgatgacgcccgcgtcgtacatcggcaaggccgtcgaactcgcgaagcggatcgcataa

SEQ ID NO: 144666 - protein, 462 aa, Burkholderia vietnamiensis G4
MSDTRPDTLFALTALSPIDGRYASKTEALRDWLSEAAFMRHRVTVEVHWLIALSRAGFAEIPRFSDASEQFLLQLAERFTAHDAARIKDIERVTNHDVKAVEYWLKESVKGQAELEKASEFIHFACTSEDINNTSHGMMLAGAREHVIVPALRTVHQRLVALAHALADQPMLSRTHGQPASPTTLGKELANVAARLGRAIARIEKVEILGKMNGAVGNFNAHLSAYPEFDWEAFSRDVIENRLKLTFNPYTIQIEPHDYMAELFDAVARANTILLDLDRDVWGYISVGYFKQKTKAGEIGSSTMPHKVNPIDFENSEGNLGLANATLRHLADKLPVSRWQRDLTDSTVLRNMGVALGYSLLAYDSLIRGLDKLEVNPQRLHDDLDNCWEVLAEPVQTVMRRYGIENPYEQLKELTRGKGITREALQEFVATLAIPQDAKDRLLAMTPASYIGKAVELAKRIA

SEQ ID NO: 144667 - DNA, 1356 bp, Picrophilus torridus DSM 9790
  CDS (1)..(1356): transl_table=11
atgattatttctccaatagattatagatacggcagggataatgtaaaatacatattttctgaggagaacaggatgagacttatgttaagggttgaggctgcacttgcacaggccgagtatgaatataatataattagcagggatgcctttcttgacattaaaaatgcggtcgattcaaattccgtgagaattgaaagggttcatgaaatagagtcaagaatacatcatgatacaatggcacttgttgaggcactcacagagcagtgcagcgcaggaaaaaattttgttcattttggtgtaacatcaaatgatattattgatactgcaacagcaatgcagataaaatcagcagtaaaaataataaaagacgatataaaaaatcttatgaaaacattgataaaactaatagatgagaacaaggactcggtcatggttggaagaacgcatgggcagcacgcaagcccaataaccttcggccttaaattatctgtataccttgatgaaatgtccaggcatttaaaacgtttaacagaggccggggatagaatagtggccggaaagatatcaggacctgttggcaccggtgcatcccttggaaaggattcaatagagatacagaacagggtatgcgagatacttggaataaaaagcgagattgcatcctcgcagatcgtctgcagggacaggtacatagagtatttatcaattataaataatattgcaacatcacttgaaaagttcgcaaccgagataagaaaccttcaaaggcctgagataaatgaggtctctgaatacttcgatgagcgatcacaggttggttcaagctcaatgccaagcaagaggaatccaatagtttctgagaatatatcaagcctgtgcagattcataaggtcattaataataccagaatatgaggctgcggttatatggcacgaacgtgatcttgcaaacagtgctcttgaaagattcacgataccatacgcctctgtgcttattgattacgttttatataacatgaacgatgtgttctcacatctatatataaacaaagaggagatgcttagaaaggcaagatccgatgagtttataatgtccgaaagtatagtgagggcattaacgttgagtggcatgccaaggcaggaggcgcatgaatttgtaagaaaagcttctatggaggcctataaaaataataaatctttaaaatcatctctaatttcagcaggtgtattgaaatacattgatgaaaaaacacttgaggctgccatggatcctgttaaattcacagggcaggccgttagtatatgtaataacgtaataaataatgcggaaagggtgatgaaagacgcagatgaataa

SEQ ID NO: 144668 - protein, 451 aa, Picrophilus torridus DSM 9790
MIISPIDYRYGRDNVKYIFSEENRMRLMLRVEAALAQAEYEYNIISRDAFLDIKNAVDSNSVRIERVHEIESRIHHDTMALVEALTEQCSAGKNFVHFGVTSNDIIDTATAMQIKSAVKIIKDDIKNLMKTLIKLIDENKDSVMVGRTHGQHASPITFGLKLSVYLDEMSRHLKRLTEAGDRIVAGKISGPVGTGASLGKDSIEIQNRVCEILGIKSEIASSQIVCRDRYIEYLSIINNIATSLEKFATEIRNLQRPEINEVSEYFDERSQVGSSSMPSKRNPIVSENISSLCRFIRSLIIPEYEAAVIWHERDLANSALERFTIPYASVLIDYVLYNMNDVFSHLYINKEEMLRKARSDEFIMSESIVRALTLSGMPRQEAHEFVRKASMEAYKNNKSLKSSLISAGVLKYIDEKTLEAAMDPVKFTGQAVSICNNVINNAERVMKDADE

SEQ ID NO: 144669 - DNA, 1314 bp, Symbiobacterium thermophilum IAM 14863
  CDS (1)..(1314): transl_table=11
atgattgaacgctacacccggccgcgcatggccgagctgtggtcggcggcgaatcgctttcagaagtggctggaggtggagctcctcgcctgcgaggcctgggcgaagctgggggtcatcccggccgaggcggtggccgagctccgggcccgggcgttcaccgtggacgaggcctttgtccgccgggtggcggagatcgagcagaccacccggcacgacgtgatcgccttcaccaccgcggtggccgagcgcatcgaccacccggcggcccggtacatccactacggcctcacctccaccgacgtggtggacacggccctgtcggccgtgctcaacgaggccgtccgagagatccagaaggggctggacgggctgatcgccgcgctgggccgccaggcggtgcggtacaaggatacccccatcatggggcggacccacggcgtgcatgccgagccgacatccttcgggctgaagctggccgtcttctacgcccagttccggcgggacgccgaccggctggagcaggcgcgccggtccatcgccgtcggtaagctctccggggctgtgggcaactatggtaacatcgatccgttcgtggagcagtacgtctgcgagaggctggggctcggggtcgccgacatctccacgcaggtgctccagcgggaccggcacgcgcacctgctcaccaccctcgcgatcctcggctcctcgctggacagcctggccaccgagctccggctgctgcagaagaccgagacccgcgaggtggaggagcccttctccaagggccagaaaggctccagcgccatgccccacaagcgcaaccccgtcaccctggagcagatctccggcctcagccgcatcctgcgcgccaacgccatcgcggccttggagaacgtgccgctctggcacgagcgggatatctcccactcgtcggtggagcgggtcatcctgcccgactccaccatcctggccgactacctgctggacaagatgacgtggatcatcgagaacctgcacgtctaccccgagaacatgcggcggtccatgcaggcctcctacggcctcacctcctcgggctccgtgctgctgtccctggtggagaaagggctgtcgcgtgagcaggcctacgccgtcgtgcaggagaaggccatgcgggcctgggcggaggggatccacctgcgccggctgctggaggaggatccgacggtgcaggcgctgctcacgcctgcggagttggacgccgccttcgacctgaagcaccacctgcgtcatgtggataccatcatgaagcgactggggttgatcgaatga

SEQ ID NO: 144670 - protein, 437 aa, Symbiobacterium thermophilum IAM 14863
MIERYTRPRMAELWSAANRFQKWLEVELLACEAWAKLGVIPAEAVAELRARAFTVDEAFVRRVAEIEQTTRHDVIAFTTAVAERIDHPAARYIHYGLTSTDVVDTALSAVLNEAVREIQKGLDGLIAALGRQAVRYKDTPIMGRTHGVHAEPTSFGLKLAVFYAQFRRDADRLEQARRSIAVGKLSGAVGNYGNIDPFVEQYVCERLGLGVADISTQVLQRDRHAHLLTTLAILGSSLDSLATELRLLQKTETREVEEPFSKGQKGSSAMPHKRNPVTLEQISGLSRILRANAIAALENVPLWHERDISHSSVERVILPDSTILADYLLDKMTWIIENLHVYPENMRRSMQASYGLTSSGSVLLSLVEKGLSREQAYAVVQEKAMRAWAEGIHLRRLLEEDPTVQALLTPAELDAAFDLKHHLRHVDTIMKRLGLIE

SEQ ID NO: 144671 - DNA, 1368 bp, Azoarcus sp. EbN1
  CDS (1)..(1368): transl_table=11
atgcccgtttcgcccctgactgctctttctccgcttgacggccgttaccacgacaaggtcgcgggcctgcgcgcacacttctccgagcatggcctgatccgcaaccgggtcaaagtcgaagtcgcctggctgaaggcgctcgccgccgagccgggcctcgccgagatcgcgccgttctccgctgcgaccgtcgccgagctcgaggccctggtcgctgatttctcgaccgcggacagcgaagcagtcaaggccatcgaggcgaccacgaaccacgacgtcaaggcgatggagtactggctgaagggacgcctcgggcataacgacgaagtcacgaaagtctccgagttcatccatttcgcgtgcacctcggaagacatcaacaacacctcgcacgcgctgatgctgcgcgaggggcgtgacgcggtgctgctgccggcgctcgatcgcgtcatcgcccgggtgcgcgagcttgcgcaccagcacgccgacctggcgatgctgtcccgcacccacggccagccggcgagcccgacgacgctcggcaaggaaatggccaacatcgccgcgcgtctgatccgcgcgcgcgccgcgatcgcccgcgtgtcgctgacggcgaagttcaacggcgctgtcggcaactacaacgcgcacctgtcggcatgggacgaattcgactgggaaagcttcaaccgcggcttcatcgaatccctcggtctcgaattcaacccgtacacgatccagatcgagccgcacgacgcgatggccgagctcttcgatgcgatggcgcgcacgaacacgatcctgatcgatgcctgccgcgacttctggatgtatatctcgctgggttatttcaagcagaagctcaaggaaggcgaggtcggttcgtcgacgatgccgcacaaggtcaatccgatcgatttcgagaacgccgaaggcaacctcggcatcgccaacggtgtgctgcgtcatttctcggaaaagctgccggtgtcgcggatgcagcgcgacctgaccgattcgacggtgctgcgcaacatgggtgtcggtttcggccacatggtgctggcgctcgattcgtgcctgcgcgggctgaacaagctcgaagccgagccggcacggctggctgcggacctcgacggcgcctgggaagtgctcgccgagccggtgcagacggtgatgcgccgcttcggcatcgagaacccctacgaacagctcaaggcgatgacgcgcggcaagggcatcacgcgcgaggcgctgcacgagttcattcgcgggcttgcgattcccgaagccgaccgggcgcggctgctggcgatgacgcccgccagctatgtcggaaaggcggcgacgctggcaaaacgcatctga

SEQ ID NO: 144672 - protein, 455 aa, Azoarcus sp. EbN1
MPVSPLTALSPLDGRYHDKVAGLRAHFSEHGLIRNRVKVEVAWLKALAAEPGLAEIAPFSAATVAELEALVADFSTADSEAVKAIEATTNHDVKAMEYWLKGRLGHNDEVTKVSEFIHFACTSEDINNTSHALMLREGRDAVLLPALDRVIARVRELAHQHADLAMLSRTHGQPASPTTLGKEMANIAARLIRARAAIARVSLTAKFNGAVGNYNAHLSAWDEFDWESFNRGFIESLGLEFNPYTIQIEPHDAMAELFDAMARTNTILIDACRDFWMYISLGYFKQKLKEGEVGSSTMPHKVNPIDFENAEGNLGIANGVLRHFSEKLPVSRMQRDLTDSTVLRNMGVGFGHMVLALDSCLRGLNKLEAEPARLAADLDGAWEVLAEPVQTVMRRFGIENPYEQLKAMTRGKGITREALHEFIRGLAIPEADRARLLAMTPASYVGKAATLAKRI

SEQ ID NO: 144673 - DNA, 1365 bp, Thermococcus kodakarensis KOD1
  CDS (1)..(1365): transl_table=11
atggccgttcacccgattgactaccgctacgggagcgaggagatgaggagaatctgggacgaggagaacaagttgcagaagctcctcgacgttgaagcggcgcttgcaagggcgcacgcaaaggtcggcaacattccggaagagagcgcgcgcgtaatatccgagagagcgaacacgaagtgggtgaagcttgaaagggttaaagagattgaagcggagatacaccacgacataatggcagttgtcaaggcgttaagcgaggtgtgcggcgagcacgggaagtacgttcaccttggagcgacttcaaacgatataatagacaccgcaaacgcgctcctcataaaggaaagcctcgcgatagttgagagggatctgaaagagctccgctccgttctcaagcgtctcgcgatggagcacaagtacaccgtttgcatcggaagaactcacggtcagcacgcggtacccacaacctacggcatgaagttcgcgatatggctggacgaggtacagaggcatatagacaggatcaaccagctcaaggagagagttctcgttggtcagatgagcggcgcggttggaacaatggccagcttcggggagagaggccttgaaatacagaggttagtcatggaaggcctcggcctcaagcccgctagaataaccaaccagataatccagagggacgtttatgcagaactcatgatggttctcgccttaatagcctcaaccctcgacaagatagccctagaaatcagaaacctccagcggacggaaatacttgaggtaagcgagccctttgggaagaagcaggtgggctcgtcaaccatgccgcacaagaggaacccgataaggagcgagaaggtgagcggtttagccagggttctctactcaaacgtgattcccgcgttgttgaacaatcctctctggcatgagagagacctcacgaactcctctgtcgagcgcgtcatcctcccggagagcttcgttctcctcgacgagatgctgaagactacgataaaggtgctttcgggccttgagttcttccccgagaacattaagagaaacctttaccttaccaacaacctcataatggccgagccgctgatgttgaagctgacggagaagggtatggggagacaggaggcccacgaactcgttaggcagctggccatgaaggcgttccacgaaaagagagaccttcttgaggtcgttagggagagcgaagaggccatgaagtaccttacagaggaagaccttgagtcccttaagccggagaactacatcgggcttgcaccacagattgtggacaatgtaatagcgtttataggggaaaaagagagggaagaagcttttatgggtcgctaa

SEQ ID NO: 144674 - protein, 454 aa, Thermococcus kodakarensis KOD1
MAVHPIDYRYGSEEMRRIWDEENKLQKLLDVEAALARAHAKVGNIPEESARVISERANTKWVKLERVKEIEAEIHHDIMAVVKALSEVCGEHGKYVHLGATSNDIIDTANALLIKESLAIVERDLKELRSVLKRLAMEHKYTVCIGRTHGQHAVPTTYGMKFAIWLDEVQRHIDRINQLKERVLVGQMSGAVGTMASFGERGLEIQRLVMEGLGLKPARITNQIIQRDVYAELMMVLALIASTLDKIALEIRNLQRTEILEVSEPFGKKQVGSSTMPHKRNPIRSEKVSGLARVLYSNVIPALLNNPLWHERDLTNSSVERVILPESFVLLDEMLKTTIKVLSGLEFFPENIKRNLYLTNNLIMAEPLMLKLTEKGMGRQEAHELVRQLAMKAFHEKRDLLEVVRESEEAMKYLTEEDLESLKPENYIGLAPQIVDNVIAFIGEKEREEAFMGR

SEQ ID NO: 144675 - DNA, 1371 bp, Pseudomonas syringae pv. phaseolicola 1448A
  CDS (1)..(1371): transl_table=11
atgcagctttcttcgctcactgcggtttcccctgttgatggccgctacgccggcaaaacccaggccttgcgccctattttcagcgaatacggcctgatccgtttccgtgtgatggttgaagttcgctggctccagcgtctggcggcccacccgcagattaccgaagtcccggcgttctctgcgcaagccaacgccatcctcgacaccctggctgaagacttctcggttgagcacgccgagcgcgtgaaagagatcgagcgcaccaccaaccacgacgtcaaagccgttgagtatctgctcaaggagcaggctgccaagctgccggagctggacaaggtcagcgagttcatccactttgcctgcaccagcgaggacatcaacaacctgtctcacgccctgatgctgcgtgaaggccgtgacactgtgatgctgccgctgatgcgccagattgccgatgctatccgtgaactggcgatccgcttcgccgacgtgccgatgctctcgcgtacccacggtcagccagcgtccccgaccacgctgggcaaggaattggccaacgtggtttaccgtctggaacgccagatcaaccagatcgccgcagtgcccttgctgggcaagatcaacggtgcggtcggcaactacaatgcccacctctccgcctatgccgatatcgactgggaagccaacgcacgcgcgttcatcgaagacgagctggggctgggcttcaacccgtacaccacgcaaatcgaaccgcatgactacatcgccgagctgtttgatgcgattgcgcgtttcaacactatcctgatcgacttcgaccgcgatatctggggctatatatccctgggctacttcaagcagcgcaccattgctggcgaaatcggctcgtcgaccatgccacacaaggtcaacccgatcgacttcgaaaactccgaaggcaatctgggcatcgccaacgcgctgttccagcatctggcgagcaaactgcctgtctctcgctggcagcgcgacctgactgactccaccgtactgcgcaacctgggcgtcggttttgcccacagcgttattgcttacgaagccagcctcaagggcatcagcaagctggaactgaacgagcagcgcattgctgccgatctggacgcgtgctgggaagttctggcagagccgattcagaccgtcatgcgtcgttacaacatcgaaaacccgtacgaaaaactgaaagaactgacacgcggcaagggcatcggcccggaagcgctacagactttcatcgacggtctggacatgcctgccgaagcaaaggccgagctgaagaagctcacgccagccaactacatcggtaacgcagcggctcaggccaagcgcatctga

SEQ ID NO: 144676 - protein, 456 aa, Pseudomonas syringae pv. phaseolicola 1448A
MQLSSLTAVSPVDGRYAGKTQALRPIFSEYGLIRFRVMVEVRWLQRLAAHPQITEVPAFSAQANAILDTLAEDFSVEHAERVKEIERTTNHDVKAVEYLLKEQAAKLPELDKVSEFIHFACTSEDINNLSHALMLREGRDTVMLPLMRQIADAIRELAIRFADVPMLSRTHGQPASPTTLGKELANVVYRLERQINQIAAVPLLGKINGAVGNYNAHLSAYADIDWEANARAFIEDELGLGFNPYTTQIEPHDYIAELFDAIARFNTILIDFDRDIWGYISLGYFKQRTIAGEIGSSTMPHKVNPIDFENSEGNLGIANALFQHLASKLPVSRWQRDLTDSTVLRNLGVGFAHSVIAYEASLKGISKLELNEQRIAADLDACWEVLAEPIQTVMRRYNIENPYEKLKELTRGKGIGPEALQTFIDGLDMPAEAKAELKKLTPANYIGNAAAQAKRI

SEQ ID NO: 144677 - DNA, 1368 bp, Dechloromonas aromatica RCB
  CDS (1)..(1368): transl_table=11
atgaccttcaatcccttgactgccctttccccgctcgacggccgctatgccggcaaggttgacgccctgcgcgagcatttttccgaatttggcctgatccgcgcccgcctgaaagtggagatcgaatggctgaaggctttgtccgccgagtcgcatttcgccgagatcgctgccttctcgcccgctaccgtggccgaactcgatgcgctggtcgccaactttggcccgaccgaggctgccgaggtgaaggccatcgaagcgacgaccaaccacgacgtcaaggcactcgagtactggatcaaggacaagaccaagagcaatgtcgaggtcgtcaaggtcagtgaattcatccacttcgcctgcacctccgaggacatcaacaatctgtcgcacgccttgatgtgccagggcgcccgcgagcaggccatgctgccgatgctcgacaaggttatcgccaagctgaccgaaatggcgcatgcgcatgccgaagtgccaatgatgagccgcacccacggccagccggcgacgccgtcgacgatgggcaaggaaatggccaacacggcttaccgcctgcaacgcgcccgtgcccgcatcgccgcggtcgaactgctcggcaagatcaacggtgcggtcggcaactacaatgcccacctcgccgcctatcccggctacgactgggaaggcttcgccaagcgcttcgtcgaatcgctcggcctgaccttcaatccctacaccatccagatcgagccgcacgatgcgctggccgagctgttcgacgctttcgcccgtgccaacagcatcctggtcgacctcgaccgtgacgtctggggctacatctcccttggtttcttcaagcagaaggtcaaggctggggaaatcggttcctcgaccatgccgcacaaggtcaatccgatcgacttcgaaaactccgaaggcaatctcggcctggccaacgccatgctcaagcatctggccgaaaaactgccgatttcccgttggcagcgtgatctgactgactccaccgtgcttcgtaacatgggcgtcggtcttggttatgcgctgcttggctacgactcgctgttgaaggggctgggcaagctggaaatcaatgccgacacgatgaaggccgatcttgatgccaactgggaactgctggccgagccgatccagaccgtgatgcgccgctacgccgtgccaaacgcctacgaaaagctgaaggaactgacccgtggcacccgcgtttcccgcgaaggcatgcaggcttttgtctcgacgctggacattccggaagctgccaaggccgaactgctcaagctgacgccgtgggattacaccggcaaggcggccgaactggccaagcggatctaa

SEQ ID NO: 144678 - protein, 455 aa, Dechloromonas aromatica RCB
MTFNPLTALSPLDGRYAGKVDALREHFSEFGLIRARLKVEIEWLKALSAESHFAEIAAFSPATVAELDALVANFGPTEAAEVKAIEATTNHDVKALEYWIKDKTKSNVEVVKVSEFIHFACTSEDINNLSHALMCQGAREQAMLPMLDKVIAKLTEMAHAHAEVPMMSRTHGQPATPSTMGKEMANTAYRLQRARARIAAVELLGKINGAVGNYNAHLAAYPGYDWEGFAKRFVESLGLTFNPYTIQIEPHDALAELFDAFARANSILVDLDRDVWGYISLGFFKQKVKAGEIGSSTMPHKVNPIDFENSEGNLGLANAMLKHLAEKLPISRWQRDLTDSTVLRNMGVGLGYALLGYDSLLKGLGKLEINADTMKADLDANWELLAEPIQTVMRRYAVPNAYEKLKELTRGTRVSREGMQAFVSTLDIPEAAKAELLKLTPWDYTGKAAELAKRI

SEQ ID NO: 144679 - DNA, 1308 bp, Thermobifida fusca YX
  CDS (1)..(1308): transl_table=11
atgatcgagcgctacacccttccggaaatgggccgcatcttcagcgacgcccacaagtacgaactctggtgccaggtggaaaccctggtgatggaagcccatgcggcggccgggacgattcccgccgacgcggtggagccggtccgccaggctcctccgccgacaccggagcaggtggccgagatcgaagcggtgacccagcacgacgtcatcgcgttcctcaccgcgtgggccgacaacacgacgcctcgcgaggcggccaagtgggtgcacttcggcatgacctcgtccgacctgctggacacggcgctggcaaagcagctggtggaggccaccgacgttctgctggccaaggcggacgaactggtggcggtgctgcgcgaccacgctctggagcaccgggggacgctgcgggtgggccggacgcacggcatccacgccgaacctgacgtgtggggccaccgggtggcggacttcgcgttcgctatggcgcggtcccgggaccggctgcgccgcgcccgcgaggctgtgggtgtgatggcgatctccggtccggtgggcacctattcgaacatcgacccggcggtggaggactacgtcgccgagaagctggggctgcgccctgcagacgtgtccacccaggtggtgctgcgcgacgggatcgccgagtgggtcagcacgctggcggtcatcgccacggtgtgcgaagcgatcgcgctggagatccggcacggccagcgcaccgaggtgcgggagctgtgggagccgttcggcaaggggcagaagggctccagcgctatgccgcacaagaagaacccgatcctctcggagcgcatctgcggtctggcgcggatcgtgcgcgcccagatcgtgccggtcatggaggggatcccgctgtggcatgagcgggacatctcgcactcttccaccgagcggatcgcgctgccggacgcggctatcgccacggactacctgctccatttgacgactcggctgatgcggggactggtggtggacgccgagcggatgcggcagaacctggagtccaccaacggcttgatctactcctccacggtggtctccgagctgatcgagacgggcatgtcccgggaggacgtctacgcgctggtgcaggcggcggcgatgcgcacgtgggagacgggtgtggcgttccgacagaccctgcgggagcaggccgctgagcacggtgtggagctggacgaagcccggttggacgaggtgtgccgcccggagcggtttgtcagccgcctggaccgggtgtttgaccggttgaagaacctgagctga

SEQ ID NO: 144680 - protein, 435 aa, Thermobifida fusca YX
MIERYTLPEMGRIFSDAHKYELWCQVETLVMEAHAAAGTIPADAVEPVRQAPPPTPEQVAEIEAVTQHDVIAFLTAWADNTTPREAAKWVHFGMTSSDLLDTALAKQLVEATDVLLAKADELVAVLRDHALEHRGTLRVGRTHGIHAEPDVWGHRVADFAFAMARSRDRLRRAREAVGVMAISGPVGTYSNIDPAVEDYVAEKLGLRPADVSTQVVLRDGIAEWVSTLAVIATVCEAIALEIRHGQRTEVRELWEPFGKGQKGSSAMPHKKNPILSERICGLARIVRAQIVPVMEGIPLWHERDISHSSTERIALPDAAIATDYLLHLTTRLMRGLVVDAERMRQNLESTNGLIYSSTVVSELIETGMSREDVYALVQAAAMRTWETGVAFRQTLREQAAEHGVELDEARLDEVCRPERFVSRLDRVFDRLKNLS

SEQ ID NO: 144681 - DNA, 1347 bp, Methanosarcina barkeri str. Fusaro
  CDS (1)..(1347): transl_table=11
atgttgattcatcctatagactaccggtatggtacagcagaaatgaaacatgtgtggagccaggaaaacagacttaataagctccttcaagtcgaggcagcccttgcccgcgccgaagcggatatgggtttgatccccgcagattcggctgagattatatctgaaagtatctcttccgtaaaagctgagagggttgacgaaattgaagccgagatccatcatgatatgatggctgtggttactgcgatctctgaacagtgcagagatgacgctggaaaatgggtacatttcggagccacttcaaacgatattctagatacggcaacagctctccagattaaggatgcaatcgaccttatggaagataaactcaaaacgttactaggagttctgcttgacaaggccgaagcccacaagaatacggtctgctgcggaagaacacatggacagataggggttccgacaacatacggactgcgttttgctatatgggcttcggagatttcaaggcatctggaacgtctccatcaactcactccaagagcaactgtagggcagatgacaggtgcagttgggacccaggctgcttttggaaaatccgggattcttatccagaaacttacaatgcagtaccttggaatcggggctgtggatgtttccaaccagataattcagagggataggcacgctgaatttgtaatgtggatggcaaacacagtcacgactctggataagataggcatagaaatcaggactctccagcgcagtgaaattgccgagattgaggaaagttttggaaaaaagcaggtaggatcatctactatgccccataaacgcaatcctataaagtctgagcagatgtgcgggcttgcaagaattgtaagggccatggtcgagcccgaactccttaacaataccctgtgggatgaaagagatctgaccaactcttcttccgagcgggtagttttccctgaagcctgtgtgcttacggaccacatcctcaagataggaataaatgtaattgaacacctgagattctatcctgaaaatatccggagaaatctggaattgctaaggggccttaatatgggagaggctgtgatgattgagctcgcaaaaagaggagtaggcaggcaggaagcccatgagctcgtaaggactgcagcaatgaaagcccacgatacaggacaacatttcaaaaatgtacttctggaaactcctgacattgcaagatatttaactgctacatatatcgagaatcttgtaaatcccgataaatatatagggactgcagtggaacaagttgaagtacttgtcgcaaaacttcgtgaggcttattccctctaa

SEQ ID NO: 144682 - protein, 448 aa, Methanosarcina barkeri str. Fusaro
MLIHPIDYRYGTAEMKHVWSQENRLNKLLQVEAALARAEADMGLIPADSAEIISESISSVKAERVDEIEAEIHHDMMAVVTAISEQCRDDAGKWVHFGATSNDILDTATALQIKDAIDLMEDKLKTLLGVLLDKAEAHKNTVCCGRTHGQIGVPTTYGLRFAIWASEISRHLERLHQLTPRATVGQMTGAVGTQAAFGKSGILIQKLTMQYLGIGAVDVSNQIIQRDRHAEFVMWMANTVTTLDKIGIEIRTLQRSEIAEIEESFGKKQVGSSTMPHKRNPIKSEQMCGLARIVRAMVEPELLNNTLWDERDLTNSSSERVVFPEACVLTDHILKIGINVIEHLRFYPENIRRNLELLRGLNMGEAVMIELAKRGVGRQEAHELVRTAAMKAHDTGQHFKNVLLETPDIARYLTATYIENLVNPDKYIGTAVEQVEVLVAKLREAYSL

SEQ ID NO: 144683 - DNA, 1416 bp, Pseudomonas fluorescens PfO-1
  CDS (1)..(1416): transl_table=11
atgatacgcgccccatttcgttgcccgactgtccgagaacaccccatgcagctctcttcgctcactgcggtttcccctgttgacggccgctacgccggcaaaacccaggccctgcgcccaattttcagcgagtacggtctgatccgtgcccgcgttctggttgaagtgcgctggctccagcgcctggccgctcacgccggcatcccggaagtgccagccttctccgccgaagccaacgccgttctgaatgaactggccgagaacttctcgctagagcacgccgagcgcgtgaaagagatcgagcgaaccaccaaccacgacgtaaaagcgatcgaatacctgctcaaagagcaggcagccaagctgccggagctggccaaggtcagcgaattcatccacttcgcctgcaccagcgaggacatcaacaacctgtcccacgccctgatgctgcgcgaaggccgtgacgacgtgatgctgccgctgatgcgccagaccgccaacgccatccgcgaactggccatccgcttcgcagacgtaccgatgctgtcgcgcacccacggtcagccggcttcgccgaccaccctgggtaaagagctggcgaacgtggtttaccgtctcgagcgtcagatcgctcaggtcgctgccgttccgctgctgggcaagatcaacggcgctgtcggcaactacaacgctcacctgtccgcctacccgcagatcgactgggaagccaacgcccgcgccttcatcgaagacgagctgggtctgggcttcaacccgtacaccacgcagatcgagccgcacgactacatcgccgagctgttcgacgccattgcgcgcttcaacaccatcctgatcgactttgaccgtgacatctggggctacatctccctgggttacttcaagcagcgcaccatcgccggcgaaatcggttcgtcgaccatgccgcacaaggtcaacccgatcgacttcgaaaactccgaaggcaacctgggcatcgccaacgcgctgttccagcacctggcgagcaaactgccgatctcccgctggcagcgcgatctgactgactccaccgttctgcgcaacctcggtgtgggtttcgcccacagtgtgatcgcgtacgaagcgagcctcaaaggcatcagcaagctcgaactgaacgctgacaagatcgctgccgatctggacgcttgctgggaagtcctggccgagccgatccagaccgtgatgcgccgctacaacatcgaaaacccgtacgagaagctgaaagaactgacgcgcggcaagggcatcagccctgaagcgctgcagactttcatcgatggcctggacatgccggccgctgcgaaagccgagctcaagcaactgaccccggccaactacatcggcaacgctgtagcgcaagccaaacgcatctga

SEQ ID NO: 144684 - protein, 471 aa, Pseudomonas fluorescens PfO-1
MIRAPFRCPTVREHPMQLSSLTAVSPVDGRYAGKTQALRPIFSEYGLIRARVLVEVRWLQRLAAHAGIPEVPAFSAEANAVLNELAENFSLEHAERVKEIERTTNHDVKAIEYLLKEQAAKLPELAKVSEFIHFACTSEDINNLSHALMLREGRDDVMLPLMRQTANAIRELAIRFADVPMLSRTHGQPASPTTLGKELANVVYRLERQIAQVAAVPLLGKINGAVGNYNAHLSAYPQIDWEANARAFIEDELGLGFNPYTTQIEPHDYIAELFDAIARFNTILIDFDRDIWGYISLGYFKQRTIAGEIGSSTMPHKVNPIDFENSEGNLGIANALFQHLASKLPISRWQRDLTDSTVLRNLGVGFAHSVIAYEASLKGISKLELNADKIAADLDACWEVLAEPIQTVMRRYNIENPYEKLKELTRGKGISPEALQTFIDGLDMPAAAKAELKQLTPANYIGNAVAQAKRI

SEQ ID NO: 144685 - DNA, 1449 bp, Burkholderia sp. 383
  CDS (1)..(1449): transl_table=11
atggtaaaatgccggattctccttcccctcgctcgacccggccccaaggcccgcccgatcatgtccgacactcgtcccgatacgcttttcgccctcaccgcgctttcgcccatcgacggccgctacgccagcaagaccgaagcgctgcgcgactggctctccgaagccgccttcatgcgccaccgcgtcaccgtcgaggtgcactggctgatcgcgctgtcgcgcgccggcttcgcggaagtcccgcgcttctccgatgcgtccgaacaattcctgctgcagctcgccgagcgcttcaccgcgcacgacgccgcccgcatcaaggacatcgagcgcgtgacgaaccacgacgtgaaggccgtcgaatactggctgaaggaatcggtgaagggccaggaagaactcgaaaaagccagcgaattcatccacttcgcgtgcacgtcggaagacatcaacaacacgtcgcacgggatgatgctcgccggcgcgcgcgaacacgtgatcctgccggcgctgcgcacggtctaccagcgcctcgtcgcactcgcacacgcgcacgccgagcagccgatgctgtcgcgcacgcacggccagccggccagcccgacgacgctcggcaaggaactcgcgaacgtcgcggcccgcctcgcccgtgcgatcacgcgcatcgagaaggtcgagatcctcggcaagatgaacggcgcggtcggcaacttcaacgcgcatctgtccgcgtatccggaattcgactgggaagcgttctcgcgcgacgtgatcgagaaccgcctcaagctcacgttcaacccgtacacgatccagatcgagccgcacgactacatggccgagctgttcgacgccgtggcgcgcgcgaacacgatcctgctcgacctcgaccgcgacgtgtggggctacatctcggtcggctacttcaagcagaagacgaaggccggtgaaatcggctcgtcgacgatgccgcacaaggtcaacccgatcgacttcgagaactcggaaggcaacctcggcctcgccaacgcgacgctgcgccacctcgccgacaagctgccggtgtcgcgctggcagcgcgacctgaccgactcgacggtgctgcgcaacatgggcgtcgcgctcggctattcgctgctcgcgtacgactcgctgatccgcggcctcgacaagctcgaagtgaacccgcagcgcctgaacgaagacctcgacaactgctgggaagtgctcgccgagccggtgcagacggtgatgcgccgctacggcatcgagaacccgtacgagcagctgaaggagctgacgcgcggcaagggcatcacgcgcgaagcgctgcaggagttcgtcggcacgctcgcgatcccgcaagaggcgaaggatctcctgctcgcgatgtcgcctgcgtcgtacatcggcaaggccgtcgaactcgcgaagcggatcgcgtaa

SEQ ID NO: 144686 - protein, 482 aa, Burkholderia sp. 383
MVKCRILLPLARPGPKARPIMSDTRPDTLFALTALSPIDGRYASKTEALRDWLSEAAFMRHRVTVEVHWLIALSRAGFAEVPRFSDASEQFLLQLAERFTAHDAARIKDIERVTNHDVKAVEYWLKESVKGQEELEKASEFIHFACTSEDINNTSHGMMLAGAREHVILPALRTVYQRLVALAHAHAEQPMLSRTHGQPASPTTLGKELANVAARLARAITRIEKVEILGKMNGAVGNFNAHLSAYPEFDWEAFSRDVIENRLKLTFNPYTIQIEPHDYMAELFDAVARANTILLDLDRDVWGYISVGYFKQKTKAGEIGSSTMPHKVNPIDFENSEGNLGLANATLRHLADKLPVSRWQRDLTDSTVLRNMGVALGYSLLAYDSLIRGLDKLEVNPQRLNEDLDNCWEVLAEPVQTVMRRYGIENPYEQLKELTRGKGITREALQEFVGTLAIPQEAKDLLLAMSPASYIGKAVELAKRIA

SEQ ID NO: 144687 - DNA, 1380 bp, Saccharophagus degradans 2-40
  CDS (1)..(1380): transl_table=11
atggatttatcttcacttaccgcagttaccccaatagacggccgatacggcagtaaaaccgatgctttgcgtcctatttttagcgaatttggccttatccgttgccgcgttgaagtggaaattcgctggctacaacaattggcggcacacccagcaattaccgaagtgccagcgcttagcgaagaagcaaacaacctgcttaacggtattgtagataacttcagtgaagaagacgctctagcagttaaaaacatcgaacgcaccaccaaccacgacgtaaaagccgtggaatactttattaaagacaaattcggtagcaaccaagagctgcaagcaattaacgagtttgtgcactttgcctgtacatcagaagacattaacaacctgtcacacggtttaatgcttaaagccggccgcgacgccgccctacccgtgttgcaagaaattacagacgctattgccaatatggcgcaagcctatgctgcagtgcctatgctttcacgcacccacgggcaaacggcatcgccgagtactgttggtaaagaaatggctaacgtggcagctcgcttggcgcgtcaaattaagcaaattaaagcagtagaattactaggcaaaattaacggtgcagtaggcaactacaacgcccacctatctgcctacccagatgtagattgggaagctaacgcaaaaacatttgtagaaagccttggcttaagctggaacccttacaccacgcaaattgaaccacacgactatattgccgaattgtttgacgcatttgctcgtttcaacaccatactcatcgactttaaccgcgatgtgtggggctatatttctctgggctttttcaaacaaaaaaccatcgctggcgaagtgggttcatctaccatgccacacaaagttaaccctatcgactttgaaaactcggaaggtaacttgggcattgccaacgcaatatttaatcacctagcagctaagctacctatttctcgctggcagcgcgacttaacggactcaaccgtattgcgcaatatgggtgtgggttttggttatagctttattgcttacgcctctaacctaaaagggattggtaagttagaaattaacgaaaccgcattggcaaacgacttaaacaacgcgtgggaagtattggcagagccaatccaaaccgttatgcgtcgctacggcatcgaaaagccctacgagaagttaaaagaacttacccgcggccaaagcattaaccaagaagttatccaaggttttgtgcaaacgttagaaataccagaacaagccaaacaagaacttatggctttaacacccgctacctatattggtaacgcggtggcgcaagcaaatgccattaaagatcgcatggcctag

SEQ ID NO: 144688 - protein, 459 aa, Saccharophagus degradans 2-40
MDLSSLTAVTPIDGRYGSKTDALRPIFSEFGLIRCRVEVEIRWLQQLAAHPAITEVPALSEEANNLLNGIVDNFSEEDALAVKNIERTTNHDVKAVEYFIKDKFGSNQELQAINEFVHFACTSEDINNLSHGLMLKAGRDAALPVLQEITDAIANMAQAYAAVPMLSRTHGQTASPSTVGKEMANVAARLARQIKQIKAVELLGKINGAVGNYNAHLSAYPDVDWEANAKTFVESLGLSWNPYTTQIEPHDYIAELFDAFARFNTILIDFNRDVWGYISLGFFKQKTIAGEVGSSTMPHKVNPIDFENSEGNLGIANAIFNHLAAKLPISRWQRDLTDSTVLRNMGVGFGYSFIAYASNLKGIGKLEINETALANDLNNAWEVLAEPIQTVMRRYGIEKPYEKLKELTRGQSINQEVIQGFVQTLEIPEQAKQELMALTPATYIGNAVAQANAIKDRMA

SEQ ID NO: 144689 - DNA, 1371 bp, Methylobacillus flagellatus KT
  CDS (1)..(1371): transl_table=11
atggagctcacacctcttaacgcactttcccccctcgatggccgctaccaatccaagctcgatcctttgcgcccctatttcagcgaatatgccctgatccgtttccgcgcgctgatcgaggtcgagtggctcaaggcactttccgccgaagcggagctcaaggaggtcgccccgttcagtaccgagaccatacacgagctcgacaaggtcattgcggcattcggtgaggtggaagccgcacaggtcaaggcaatagaatcccgtaccaatcacgacgtcaaagctttggaatactggctcaaggaacatttcgacggcaaccacgaaatccgcgccgtcagcgagttcatccacttcgcctgcacttcggaagacatcaataacttgtcgcatggcctgatgctgaaacatgcgcgtgacgaagtgattatccccatggtagacaagctcattgcccgcctgaccgagcttgcccacgagttggccgagataccgatgctgtctcgcacgcatgggcagaccgcctcccctaccacgctgggcaaggaactcgccaacgtggtctaccggctgcgtcgccaacgcgaacaactcgcagataacgagatcctaggcaagatcaatggcgcggtaggcaatttcaatgcccacctttccgcctaccccgatttcgactgggaaagttttgcccgcaaattcgtcgagagcttgggcctgacctacaatccctacaccatccagatcgagccacacgactacatggctgagctatacgatacggtggcccgcatcaataccatcctgatcgacatcgaccgcgacatctggggctatatctcccagggctacttcaagcagaaagtaaaggaaggcgaagtcggctcctccaccatgccgcacaaggtcaacccgatcgacttcgagaactcggaaggcaacctgggcctggccaatgccttgctgcgccacttggcggaaaagctgccgatctcccgctggcagcgcgacttgaccgactccaccgtgctgcgcaacatgggggtcgcgctgggctacgccctgcttggctatgactcctgcctcaagggtctgggcaagcttgaggtcaaccgccagcgcctggaagaagacctcgacagcaactgggaagtgctcgcggagcccatccagaccgtcatgcgccgctacggtgtaccgaacccgtacgagcagctcaaggcgcttacgcgcggtaagggcggcatcaacaaggaatctctgcatgccttcatccacgatctcaagataccggcggaagccaagcaggcgctgctggagctgacccctgccaattacacaggaaaagccgcggcacttgcaaaagccatttag

SEQ ID NO: 144690 - protein, 456 aa, Methylobacillus flagellatus KT
MELTPLNALSPLDGRYQSKLDPLRPYFSEYALIRFRALIEVEWLKALSAEAELKEVAPFSTETIHELDKVIAAFGEVEAAQVKAIESRTNHDVKALEYWLKEHFDGNHEIRAVSEFIHFACTSEDINNLSHGLMLKHARDEVIIPMVDKLIARLTELAHELAEIPMLSRTHGQTASPTTLGKELANVVYRLRRQREQLADNEILGKINGAVGNFNAHLSAYPDFDWESFARKFVESLGLTYNPYTIQIEPHDYMAELYDTVARINTILIDIDRDIWGYISQGYFKQKVKEGEVGSSTMPHKVNPIDFENSEGNLGLANALLRHLAEKLPISRWQRDLTDSTVLRNMGVALGYALLGYDSCLKGLGKLEVNRQRLEEDLDSNWEVLAEPIQTVMRRYGVPNPYEQLKALTRGKGGINKESLHAFIHDLKIPAEAKQALLELTPANYTGKAAALAKAI

SEQ ID NO: 144691 - DNA, 1389 bp, Burkholderia xenovorans LB400
  CDS (1)..(1389): transl_table=11
atgtccgacacccgccccgacaccctgttcgcgctgaacgcgctctccccgctcgacggccgttatgcgtcgaaaaccgaagccctgcgcgactggctctcggaagccgcgttcatgcgcaatcgcgtgacggtcgaaattcattggctgatcgcactctcgcatgccggtttcgccgaagtgccgcgtttctccgaagccgccgaacaattcctgctgcaactggcggagcgcttcacggcgcacgacgccgcgcgcatcaaggaaatcgagcgtgtgacgaatcacgacgtgaaagcggtcgagtattggctcaaggagtcggtcaagggtcaggaagaactggagcgcgcgagcgagttcatccacttcgcgtgtacctcggaagacatcaacaacacctcgcatggcctgatgctcgcgggcgcccgtgaacacgtgattctgccggcgctgcgctcggtgcatcagcgtctcgtcgcactggctcacacgctggccgaccagtccatgctgtcgcgcacgcacggccagccggccagcccgaccacgctcggcaaggaaatcgccaacgtggccgcgcgtctggaacgcgcgatcgaccgcatcgcaaaggtcgaactgctcggcaagatgaacggcgcggtcggcaacttcaacgcgcacctgtccgcgtatccggagttcgactgggaagcgttctcgcgcgaagtggtcgagcagcgcctgaaactcacgttcaatccgtacacgatccagatcgaaccgcacgactacatggccgaactgttcgacgccatgtcgcgcgccaatacgatcctgctggatctggaccgcgacgtgtggggctacatctcggtcggttacttcaagcaacgcaccaaggccggcgaaatcggttcgtccacgatgccgcacaaggtcaatccgatcgacttcgaaaactccgaaggcaacctggggctggcgaacgccacgctgcgccatctcgccgacaagctgccggtgtcgcgctggcagcgcgacctgaccgactcgacggtgctgcgcaatatcggcgtcgcgttcggctattcgctgcttgcgtacgactcgctgatccgcggcctcgacaagctcgaagtgaatgcgcagcgcctgcacgaagacctcgacaactgctgggaagtgctggccgagccggtgcaaacggtaatgcgccgttacggcatcgagaatccgtacgaacaactgaaggaactgacgcgcggcaagggcatcacgcgcgaagcgctgcaaacgttcgtgagcggcctggcgattccgcaggacgcgaaggatcgtttgctggccatgacgccggcttcgtatgtcggcaaggcggccgaactggccaggcggattgcctga

SEQ ID NO: 144692 - protein, 462 aa, Burkholderia xenovorans LB400
MSDTRPDTLFALNALSPLDGRYASKTEALRDWLSEAAFMRNRVTVEIHWLIALSHAGFAEVPRFSEAAEQFLLQLAERFTAHDAARIKEIERVTNHDVKAVEYWLKESVKGQEELERASEFIHFACTSEDINNTSHGLMLAGAREHVILPALRSVHQRLVALAHTLADQSMLSRTHGQPASPTTLGKEIANVAARLERAIDRIAKVELLGKMNGAVGNFNAHLSAYPEFDWEAFSREVVEQRLKLTFNPYTIQIEPHDYMAELFDAMSRANTILLDLDRDVWGYISVGYFKQRTKAGEIGSSTMPHKVNPIDFENSEGNLGLANATLRHLADKLPVSRWQRDLTDSTVLRNIGVAFGYSLLAYDSLIRGLDKLEVNAQRLHEDLDNCWEVLAEPVQTVMRRYGIENPYEQLKELTRGKGITREALQTFVSGLAIPQDAKDRLLAMTPASYVGKAAELARRIA

SEQ ID NO: 144693 - DNA, 1341 bp, Methanococcoides burtonii DSM 6242; identical to SEQ ID NO: 67254
  CDS (1)..(1341): transl_table=11

SEQ ID NO: 144694 - protein, 446 aa, Methanococcoides burtonii DSM 6242; identical to SEQ ID NO: 67255

SEQ ID NO: 144695 - DNA, 1377 bp, Ralstonia metallidurans CH34
  CDS (1)..(1377): transl_table=11
atgtccacgtcttccctttcgccgcttaccgccctgtctcccatcgatggccgctatgccgccaaagccgatgcattgcgcgagtggctgtccgaggcggccttcatgcgcaaccgcgtcaaggtggaggtcaactggctgatcgcgctggcccaggccggcctgccggacgtgccgaagttctcggccgcatcggaggcaaagctgctgtcgctggtggagaatttcaccgaggccgacgccgcccggatcaaggaaatcgaggccgtcacgaaccacgacgtgaaggccgtcgagtactggctcaaggagcaggtcaagggcaacgcggagctcgaggccgccagcgagttcattcacttcgcctgcacgtcggaagacatcaacaacacgtcgcacggcatgatgctcaagggcgcccgcgacggcgtgatcgtgccggcgctcaagcgcgtgcatgcgcgtctggtcgaactggcgaagctgaacgccgcccagccgatgctgtcgcgtacgcacggccagccggccagcccgaccacgctcggcaaggaaatggccaacgtggccgcgcgtctggcccgcgccatcgagcgtgtggaacgcgtggaactgctcggcaagatgaatggcgccgtgggtaactacaacgcgcacctgtccgcctatccgacgttcgactgggagtcgttctcgaagcaggtgatcgagacgcgcctgggcctgacgttcaacccgtacacgatccagatcgaaccgcacgactacatggccgagctgttcgatgccgtcgcccgcgccaacacgatcctgctggacctgaaccgcgacgtctggggctatatctcggtgggctacttcaagcagaagaccaaggctggcgagatcggctcgtcgaccatgccgcacaaggtcaacccgatcgacttcgaaaactcggagggcaatgtcggcctggccaacgccgtgctgcgccacctgtccgagaagctgcctgtgtcccgctggcagcgtgacctgaccgattcgaccgtgctgcgcaacatgggtgtggcgtttggttacagcctgctggcttacgaggcctgcctgcgtggcctgggcaagctggaaaccaatcccgaacgcctcaacgaagacctcgacaactgctgggaagtgctggcggagccggtgcagaccgtgatgcgccgctttggcgtgcccaatccgtacgagcaattgaaggagctgacccgcggcaagggcatctcgcgcgaggcgctccagaccttcgtgcagggtctggcgattcccgacgatgccaaggcgctgctgctggcgatgacgcccgccagctacatcggccgcgcggtggaactggcgaatcgcatctga

SEQ ID NO: 144696 - protein, 458 aa, Ralstonia metallidurans CH34
MSTSSLSPLTALSPIDGRYAAKADALREWLSEAAFMRNRVKVEVNWLIALAQAGLPDVPKFSAASEAKLLSLVENFTEADAARIKEIEAVTNHDVKAVEYWLKEQVKGNAELEAASEFIHFACTSEDINNTSHGMMLKGARDGVIVPALKRVHARLVELAKLNAAQPMLSRTHGQPASPTTLGKEMANVAARLARAIERVERVELLGKMNGAVGNYNAHLSAYPTFDWESFSKQVIETRLGLTFNPYTIQIEPHDYMAELFDAVARANTILLDLNRDVWGYISVGYFKQKTKAGEIGSSTMPHKVNPIDFENSEGNVGLANAVLRHLSEKLPVSRWQRDLTDSTVLRNMGVAFGYSLLAYEACLRGLGKLETNPERLNEDLDNCWEVLAEPVQTVMRRFGVPNPYEQLKELTRGKGISREALQTFVQGLAIPDDAKALLLAMTPASYIGRAVELANRI

SEQ ID NO: 144697 - DNA, 1368 bp, Haemophilus somnus 129PT
  CDS (1)..(1368): transl_table=11
atgcaattcaacgcattgaccgcactttccccgatagatggtcgttatcaagacaaagtaactgctttacgtagcatttttagcgaattcggtttactgaaatttcgtgtaactgtcgaagttcgttggttacaaaaattatctgcaacaggcactattcaagaagtttcttctttatctaaagaggcaaacgattacttaaatcaattggtagaaaatttcagtttgcaagatgctgaacgcattaaagaaattgaacgtattacaaatcatgatgtaaaagcggttgaatatttcttaaaagaaaaaagtctggcaatacctgaattagtggcgattagtgagtttatccattttgcttgtacttcggaggatatcaacaatctttcttatgcgttaatgttaaaaaacgcacgtgatgaagtacttttacctgagtggcgtaagttgattgatgaaatcactcgccttgctacagagtataaagcaattccattattatcccgcactcatggacaacctgcctcacctaccacaataggtaaagaaatggcgaatgtggtatatcgcttacaacgccagtttaaacagttacaacacgtggaaattctaggcaaaattaatggtgcggtaggaaattataatgcccatttatctgcttatcctgagattgattggcatcaatttagccaagaatttgttacctcattaggtttaacttggaatccttatacaacccaaattgaacctcatgattacattgcggagttttttgataatgtagctcgttttaacactattattatcgattttgaccgtgatttatgggggtatattgccttaaatcatttcaaacaacgtactattgccggtgaaattggatcgtctaccatgccgcacaaagtgaatccgattgattttgaaaattcagaaggtaaccttggcttagcgaatgctgttatgtcgcatttaggtgcaaaattaccgatttcacgttggcaacgtgatttaaccgactcgacagttttacgcaatttaggggtggggcttggttattgtttaattgcttatgcggcaacattaaaaggtatcagcaaacttgaggtaaatgaaccgcacttacgtgaagaattaaatcaaaattgggaagtgctggctgaaccaattcaaactgtgatgcgtcgttatggtattgaaaaaccttatgaaaagctaaaggagttgacgcgaggtaagcgtgttaatgcagaggcgatgcgtgagtttattgagaagttggaaattccagctcatgaaaaagctcgtttaaaacaacttacaccggaaacgtatatcggtagtgcaattagtttggtggaaaaattgtaa

SEQ ID NO: 144698 - protein, 455 aa, Haemophilus somnus 129PT
MQFNALTALSPIDGRYQDKVTALRSIFSEFGLLKFRVTVEVRWLQKLSATGTIQEVSSLSKEANDYLNQLVENFSLQDAERIKEIERITNHDVKAVEYFLKEKSLAIPELVAISEFIHFACTSEDINNLSYALMLKNARDEVLLPEWRKLIDEITRLATEYKAIPLLSRTHGQPASPTTIGKEMANVVYRLQRQFKQLQHVEILGKINGAVGNYNAHLSAYPEIDWHQFSQEFVTSLGLTWNPYTTQIEPHDYIAEFFDNVARFNTIIIDFDRDLWGYIALNHFKQRTIAGEIGSSTMPHKVNPIDFENSEGNLGLANAVMSHLGAKLPISRWQRDLTDSTVLRNLGVGLGYCLIAYAATLKGISKLEVNEPHLREELNQNWEVLAEPIQTVMRRYGIEKPYEKLKELTRGKRVNAEAMREFIEKLEIPAHEKARLKQLTPETYIGSAISLVEKL

SEQ ID NO: 144699 - DNA, 1371 bp, Shewanella sp. MR-7
  CDS (1)..(1371): transl_table=11
atggatctttccgcactaactgctatctctccggtagacggccgttacggtagtaaaacagcgtcattgcgagggattttcagcgagttcggtcttactaagtaccgtgttcaagttgaaatcaactggttaaaattactcgccgattgcccagaaatcaccgaagtgccgccactgagcgagtctgctatcgcggtgttagatgcaattaaagacaatttcagcgagcaagatgcgctacgcgtgaaagccattgaaagcaccaccaaccacgacgtaaaagcggttgaatacttcatcaaagaaaaaatcgcagacaacgccgaactcgccgctgtgggtgaatttgttcacttcgcctgtacctcagaagacatcaacaacctaagccacggcttaatgttgactgaagcccgtgagcaagtggttctgccatactgcaatgaactgctcagcgccatcaaaaaactggccgttgaataccgttcagtgccattgatgtcacgcacccacggtcaacccgcttcgccttcaactttaggtaaagaaatggccaacgttgctgtgcgtttagagcgtcaaatcaagcaaatcgcagctgttgaagtcatgggtaaaattaacggcgccgtgggtaactacaacgcccacttatctgcttacccagaagtgaactggcatgcactgtcagagcgttttgtcaccagcttaggcctgcactggaacgcttacaccacacaaatcgagccacacgattacatcgccgaactgtttgatgctatcgcgcgtttcaacactatcctgattgacttcgaccgtgacgtttggggttatattgctcttggtcacttcaagcaacgtaccgttgcgggtgaaattggttcatcaaccatgccacacaaagtcaacccaatcgactttgaaaactctgaaggtaaccttggtattgctaacgcactgatgcaacatttagcgtctaagctgccagtatcaagatggcaacgtgacctgaccgactcaaccgtactgcgtaacttgggcgtaggtattgcccactcgctgatcgcctaccaagccaccttaaaaggcattagcaagttacaagtgaacgaagagcatttacgtgccgaactcgaccaaaactgggaagtactagccgagccagtacaaaccgttatgcgtcgctatggtattgaaaagccttacgagaagttaaaagaactgactcgtggtaagcgtatcgatgcccagcaattagcagtattcatcgatggtttagccctgcctgaagaagtgaaagcagagctgaagaagatgacgccagccaactacattggccgtgctgaagccttcgtcgacgagcttaactaa

SEQ ID NO: 144700 - protein, 456 aa, Shewanella sp. MR-7
MDLSALTAISPVDGRYGSKTASLRGIFSEFGLTKYRVQVEINWLKLLADCPEITEVPPLSESAIAVLDAIKDNFSEQDALRVKAIESTTNHDVKAVEYFIKEKIADNAELAAVGEFVHFACTSEDINNLSHGLMLTEAREQVVLPYCNELLSAIKKLAVEYRSVPLMSRTHGQPASPSTLGKEMANVAVRLERQIKQIAAVEVMGKINGAVGNYNAHLSAYPEVNWHALSERFVTSLGLHWNAYTTQIEPHDYIAELFDAIARFNTILIDFDRDVWGYIALGHFKQRTVAGEIGSSTMPHKVNPIDFENSEGNLGIANALMQHLASKLPVSRWQRDLTDSTVLRNLGVGIAHSLIAYQATLKGISKLQVNEEHLRAELDQNWEVLAEPVQTVMRRYGIEKPYEKLKELTRGKRIDAQQLAVFIDGLALPEEVKAELKKMTPANYIGRAEAFVDELN

SEQ ID NO: 144701 - DNA, 1371 bp, Pseudomonas aeruginosa UCBPP-PA14
  CDS (1)..(1371): transl_table=11
atgcagctttcctcgctcaccgcggtatcccccgtcgatggccgctatgccggcaaaaccagcagcctgcgtccgatcttcagcgaatacggcctgatccgtttccgcgtcatggtggaagtccgctggctgcagcgcctcgccgcccacgccgggattcccgaggtcgcgccgttctccgccgaagccaacgccctgctcgacagcctggccagcgacttccagctggaacacgccgaacgcatcaaggaaatcgagcgcaccaccaaccacgacgtgaaagccgtggagtacctgctcaaggaacaggccgccaagctcccggagctggccgcggtcagcgagttcatccacttcgcctgcacctccgaggacatcaacaacctgtcccacgccctgatgctccgcgagggtcgcgacagcgtgctgctgccgctgatgcgccagatcgccgaggccatccgcgaactggcggtgaaattcgccgacgtgccgatgctctcccgcacccacggccagcccgcctcgccgaccaccctgggcaaggaactggccaacgtcgtctaccgcctggagcggcagatcaagcaggtcgccggcatcgagttgctgggcaagatcaacggcgccgtgggcaactacaacgcccacctgtccgcctatcccgaagtcgactgggaagccaacgcccgccagttcatcgaaggcgacctcggcctgaccttcaacccctacaccacccagatcgagccgcacgactacatcgccgagctgttcgatgcgatcgcccgcttcaacaccatcctcatcgacttcgaccgcgacgtctggggctacatctccctcggctacttcaagcagaagaccgtggccggcgagatcggctcctcgaccatgccgcacaaggtcaacccgatcgacttcgagaactccgagggtaacctcggcatcgccaacgcgctattccagcacctggccagcaagctgccgatctcgcgctggcagcgcgacctgaccgactccaccgtgctgcgcaacctcggtgtcggcatcgcccacagcgtcatcgcctacgaggccagcctgaagggcatcggcaagctggagctgaacgcccagcgcatcgccgaggacctggacgcctgctgggaagtcctcgccgagccggtgcagaccgtgatgcgtcgctatggcgtggaaaacccctacgaaaagctgaaggaactgacccgcggcaaaggcatcagcgccgaagccttgcagactttcatcgaagagctggcgattcccgccgaggccaaggtcgagctgaagaagctgaccccggccggctacgtcggcaatgccgccgcccaggccaagcgcatctga

SEQ ID NO: 144702 - protein, 456 aa, Pseudomonas aeruginosa UCBPP-PA14
MQLSSLTAVSPVDGRYAGKTSSLRPIFSEYGLIRFRVMVEVRWLQRLAAHAGIPEVAPFSAEANALLDSLASDFQLEHAERIKEIERTTNHDVKAVEYLLKEQAAKLPELAAVSEFIHFACTSEDINNLSHALMLREGRDSVLLPLMRQIAEAIRELAVKFADVPMLSRTHGQPASPTTLGKELANVVYRLERQIKQVAGIELLGKINGAVGNYNAHLSAYPEVDWEANARQFIEGDLGLTFNPYTTQIEPHDYIAELFDAIARFNTILIDFDRDVWGYISLGYFKQKTVAGEIGSSTMPHKVNPIDFENSEGNLGIANALFQHLASKLPISRWQRDLTDSTVLRNLGVGIAHSVIAYEASLKGIGKLELNAQRIAEDLDACWEVLAEPVQTVMRRYGVENPYEKLKELTRGKGISAEALQTFIEELAIPAEAKVELKKLTPAGYVGNAAAQAKRI

SEQ ID NO: 144703 - DNA, 1377 bp, Azoarcus sp. BH72
  CDS (1)..(1377): transl_table=11
atgtccctcgccgcaccctccgccctcaccgccctttccccgctcgatggccgttaccacggcaaggtggaaggcctgcgcgaccacttctctgagcatggcctgatccgcaaccgggtcaaggttgaagtcgagtggctgaaggcgctcgcggccgacggcgcgctggccgagatcgcaccgttttcggcggcgacgatcgccgaactcgacagcgtggtgtccgcctttgcgccggccgatggcgaagcggtgaaggcgatcgaagccaccaccaaccacgacgtgaaggcgatggagtactggctgaagaagcgcctcggccacaacgccgaagtgatgaaagtgtcggaattcatccatttcgcctgcacttcggaggatatcaacaacacctcccacgccctgatgctgaaggccgggcgcgacgaggtgctgctgccggcggtggacaaggtgatcgcccgcttccgcgaactggcgcaccagcttgccgacctgccgatgctgtcgcgcacccacggccagcccgccagcccgaccacgctgggcaaggagatggccaacatcgcggcccggctgatccgcgcccgcgcgcagatcgccaatgtgtcgctcactgccaagttcaatggcgcggtcggcaactacaatgcccacctgtcggcgtggcctgaattcgactgggaaggcttcaacaagcgcttcatcgaatcgctcggcctcgagttcaacccctacaccatccagatcgaaccccatgacgcgatggccgaactgttcgacgccatcggccgcatgaacaccatcctgatcgacgcctgccgcgacatctggatgtacatctcctttggctacttcaagcagaagctgaaggagggcgaggtcggttcgtcgaccatgccgcacaaggtcaacccgatcgacttcgagaacgccgaaggcaacctcggcatcgccaacgcggtgctgcgccacttctcggagaagctgccggtgtcgcgcatgcagcgcgacctcaccgactccaccgtgctgcgcaacatgggcgtgggcttcggccataccgtgctggcgctcgattccgcgctgcgcggcctgggcaagctggaggccgaaccggcccgccttgccgccgacctggccgagtgctgggaagtgctggccgagccggtgcagaccgtgatgcgccgcttcggcatcgagaacccgtacgaacagctgaaggcgatgacgcgcggcaagggcatcacccgtgaggcactgcaggagttcatcggtacgctggagattccgcagagcgagcgcgaccgcctgctggcgatgacgccggcgagctacgtcggcaaggccgcggagcttgcccgccgtatttga

SEQ ID NO: 144704 - protein, 458 aa, Azoarcus sp. BH72
MSLAAPSALTALSPLDGRYHGKVEGLRDHFSEHGLIRNRVKVEVEWLKALAADGALAEIAPFSAATIAELDSVVSAFAPADGEAVKAIEATTNHDVKAMEYWLKKRLGHNAEVMKVSEFIHFACTSEDINNTSHALMLKAGRDEVLLPAVDKVIARFRELAHQLADLPMLSRTHGQPASPTTLGKEMANIAARLIRARAQIANVSLTAKFNGAVGNYNAHLSAWPEFDWEGFNKRFIESLGLEFNPYTIQIEPHDAMAELFDAIGRMNTILIDACRDIWMYISFGYFKQKLKEGEVGSSTMPHKVNPIDFENAEGNLGIANAVLRHFSEKLPVSRMQRDLTDSTVLRNMGVGFGHTVLALDSALRGLGKLEAEPARLAADLAECWEVLAEPVQTVMRRFGIENPYEQLKAMTRGKGITREALQEFIGTLEIPQSERDRLLAMTPASYVGKAAELARRI

SEQ ID NO: 144705 - DNA, 1371 bp, Neisseria meningitidis FAM18
  CDS (1)..(1371): transl_table=11
atgatcaaccccatcgcctcgctttcccctttagatggccgttatgcccaatccgttgaagcattgcgcccgattttttcagagtacggcctgatgaaggcgcgcgtcaaagtcgaattaaactggctcaaagccctggccgccgagccgaagattgtcgaagtgccgcccttcagtgccgaaacgcttgccgaaatcgacacggtgattgaaaacttttcattggaagacgcagccgctgtcaaagccatcgaagccacgaccaatcatgatgtcaaagccattgaatattggcttaaagaacgcttctccggcgtgcctgaagtggcagctgccagcgagttcatccactttgcctgcaccagcgaagacatcaacaacctgtcccacgctttaatgctgcaagaagcgcgtgaggctgttttgctgccgaaactggccgaaatcatcgaaaaactgaccggcatggcgcatgagttggctgccgtcccgatgatgagccgcacccacggccagcctgctacaccaagcacactgggtaaagaaatcgccaatgtcgtgtaccgcctgcaacgccagtttaaaaacctgcaagcgcaagagttcctcggcaaaatcaatggcgcagtcggcaactacaatgcccatatggtcgcttatcccgatgtggattgggaaacccattgccgcaacttcgttgaaatcagcctcggcctgaccttcaacccctacaccattcaaatcgagccgcacgactatatggcggaattcttccaagccatcagccgtgtcaacacgattctgatcgacttcaaccgcgatgtttggggctatatttctttgggttacttcaaacaaaaagtcaaagcaggcgaagtcggttcttccaccatgccgcacaaagtcaacccgatcgactttgaaaactccgaaggcaacctcggtatggcaaacgccgtattgggcttcttatccgaaaaactgccgatttcccgttggcagcgcgacctgaccgacagcaccgtattgcgcaatatgggcgtaggcgtgggctatgccgtgttgggtttcgccgcccatctgcgcggtctgaacaagctcgaacccaaccctgccgcgcttgccgccgatttggacgctacttgggagctgctcgccgagccgattcaaaccgtaatgcgtcgttacggcgtggccaatccttacgaaaagctcaaagacctgacgcgcggcaaagacggcattacgcctgaagtgttgaaactctttatcgagtcgttggaaattccggcagaagccaaagccaaattgcttgagctgacccccgcactgtatgtgggtaaggctgaagcgttggcgaaacggatttga

SEQ ID NO: 144706 - protein, 456 aa, Neisseria meningitidis FAM18
MINPIASLSPLDGRYAQSVEALRPIFSEYGLMKARVKVELNWLKALAAEPKIVEVPPFSAETLAEIDTVIENFSLEDAAAVKAIEATTNHDVKAIEYWLKERFSGVPEVAAASEFIHFACTSEDINNLSHALMLQEAREAVLLPKLAEIIEKLTGMAHELAAVPMMSRTHGQPATPSTLGKEIANVVYRLQRQFKNLQAQEFLGKINGAVGNYNAHMVAYPDVDWETHCRNFVEISLGLTFNPYTIQIEPHDYMAEFFQAISRVNTILIDFNRDVWGYISLGYFKQKVKAGEVGSSTMPHKVNPIDFENSEGNLGMANAVLGFLSEKLPISRWQRDLTDSTVLRNMGVGVGYAVLGFAAHLRGLNKLEPNPAALAADLDATWELLAEPIQTVMRRYGVANPYEKLKDLTRGKDGITPEVLKLFIESLEIPAEAKAKLLELTPALYVGKAEALAKRI

SEQ ID NO: 144707 - DNA, 1371 bp, Haemophilus influenzae R2846
  CDS (1)..(1371): transl_table=11
atgcaactctctacactgaccgcactttcccctcttgatggtcgttatcaagataaagtaacgccattacgtgctatttttagcgaattcgggttaatgaaattccgtgtagctgtggaagttcgttggttacagaaattagcttcaacggcagacattaccgaagtaccgccattttctacgcaagcaaatgcttttttagatggagttgtggctaattttaatgaggccgatgctgcacatattaaagaaattgaacgcacaactaatcacgatgtgaaagccgttgagtattttctgaaagagaaaattcaaaacgaagtggaactagtgaacgtgtccgaattcattcacttcgcttgcacctcagaagacattaacaatctctctcacgcattaatgttaagcaccgctcgtgacgaagtgattttacctgaatggcaaaaactgattgatgaaattactcgtcttgcagaagaatataaaacgattccattactttctcgcacacatggccagccagcttcaccaagcaccgtgggcaaagaaatggcaaatgtcgtttaccgcctaaaacgtcaatttaaacaactccaaaatgcggaaatcttaggtaaaatcaatggtgcagtaggtaactacaatgcgcatttatcggcatatcctaatattgattggcataaattcagcgaagaatttgtcacttcattaggtattcaatggaatccttataccacacaaattgagccgcacgattacatcgctgaattttttgatgctgtagtacgctttaataccattatcattgattttgatcgtgatttatggggatacattgcattaaatcactttaaacaacgaacgattgcaggcgaaattggttcctctaccatgccacataaagtcaatccaattgattttgaaaactcagagggcaatctaggcttagcgaatgcagtgatgacccacttaggtcaaaagttaccaatttctcgctggcagcgtgacttaacggattcaaccgtattacgtaatttaggcgtaggattaggttattgtttgatcgcttatgcttcaactcgcaaaggcatgagtaaacttgaagtaaatcaaccgcacttattagaagaactcaatcaaaactgggaagttttggctgaaccaattcaaaccgtaatgcgccgctatggaatagaaaaaccttacgaaaaattaaaagaattaacgcgaggtaaacgagtgacagaacaggctatgcgtgaatttattgataagttggatattccacaagaagaaaaattacgtttacaaaaattaacacccgctacttatattggggctgcagtggaattagtagagaagctatcatag

SEQ ID NO: 144708 - protein, 456 aa, Haemophilus influenzae R2846
MQLSTLTALSPLDGRYQDKVTPLRAIFSEFGLMKFRVAVEVRWLQKLASTADITEVPPFSTQANAFLDGVVANFNEADAAHIKEIERTTNHDVKAVEYFLKEKIQNEVELVNVSEFIHFACTSEDINNLSHALMLSTARDEVILPEWQKLIDEITRLAEEYKTIPLLSRTHGQPASPSTVGKEMANVVYRLKRQFKQLQNAEILGKINGAVGNYNAHLSAYPNIDWHKFSEEFVTSLGIQWNPYTTQIEPHDYIAEFFDAVVRFNTIIIDFDRDLWGYIALNHFKQRTIAGEIGSSTMPHKVNPIDFENSEGNLGLANAVMTHLGQKLPISRWQRDLTDSTVLRNLGVGLGYCLIAYASTRKGMSKLEVNQPHLLEELNQNWEVLAEPIQTVMRRYGIEKPYEKLKELTRGKRVTEQAMREFIDKLDIPQEEKLRLQKLTPATYIGAAVELVEKLS

SEQ ID NO: 144709 - DNA, 1311 bp, Erythrobacter sp. NAP1
  CDS (1)..(1311): transl_table=11
atggtcccccgctacgcccgcccagagatgtccgccctgtgggagcctgaagccaagtaccgcatctggttcgagatcgaggcgcacgcgacgcaaaagctgggcgagatgggcgtcgtccctgcaagtgccggtaaagcgctgtgggactggtgggcgaccaatcctgagatcgacgtcgaagccatcgacgcgatcgaggcggtgaccaagcacgacgtgatcgccttcctcacctgggtggcagagcaggtcggcgaagaagcgcgtttcatgcaccagggcatgaccagctctgacgtgctcgacacgacgcttgcggtccagctagctcgcgcttcggatatcctgctcgccgatctcgacgcactgcttgccgcgatcaagacccgcgccgaagagcacaaatacaccccgaccatcggccgcagccatggtatccatgcagagccggtgaccttcggcctcaagctcgcgcaggcctatgccgagttcgaccggtgcaagcagcgcctaatcgccgcacgcgaggaaatcgccacctgcgcgatctcgggcgcggtgggaacgtttgcgaatatcgaccccgaagtcgaagcctacgtcgccgagaaactcggcctcagtgtggagccagtctcgacccaggtgatcccgcgtgatcgccacgcgatgtatttttcgaccctcgccgtcatcgccggcagcatcgagcggctcgcggttgaggtgcgccatctccagcgcaccgaagtgctcgaagccgaggagttcttctccaagggccagaagggttcgagcgcgatgccgcacaagcgcaacccgatcctgaccgaaaacctgaccggccaagcgcgcatgatccgggcctatgccctccccgcgctcgaaaacgtggcgctatggcacgagcgcgatatctcgcattcgtcggtcgagcggttcatcggccctgacgcgacgattacgctcgactttgcgctggctaggctgaccggggtgatcgaaaagctgctcgtctatcctgaacgcatgcaggccaacctcgattcgatgggcggccttgtccattcgcagcgcgttctgctggctctcacacaggcaggcgtgagccgcgaagacgcgtatgccatcgtccagcgcaacgcgatgaaggtctgggaatcgtccggcacgctctctctgctcgacctgctcaaggccgacgaagaagtgaccgcggcgctttcgaacgaagagctggaggagaaattcgacctcgaatatcacttcaagcatgtcgacacgatcatcgcgcgggtgttcggctga

SEQ ID NO: 144710 - protein, 436 aa, Erythrobacter sp. NAP1
MVPRYARPEMSALWEPEAKYRIWFEIEAHATQKLGEMGVVPASAGKALWDWWATNPEIDVEAIDAIEAVTKHDVIAFLTWVAEQVGEEARFMHQGMTSSDVLDTTLAVQLARASDILLADLDALLAAIKTRAEEHKYTPTIGRSHGIHAEPVTFGLKLAQAYAEFDRCKQRLIAAREEIATCAISGAVGTFANIDPEVEAYVAEKLGLSVEPVSTQVIPRDRHAMYFSTLAVIAGSIERLAVEVRHLQRTEVLEAEEFFSKGQKGSSAMPHKRNPILTENLTGQARMIRAYALPALENVALWHERDISHSSVERFIGPDATITLDFALARLTGVIEKLLVYPERMQANLDSMGGLVHSQRVLLALTQAGVSREDAYAIVQRNAMKVWESSGTLSLLDLLKADEEVTAALSNEELEEKFDLEYHFKHVDTIIARVFG

SEQ ID NO: 144711 - DNA, 1368 bp, Oceanobacter sp. RED65
  CDS (1)..(1368): transl_table=11
atggacttatctgcacttacgtcggtttccccaatagacggtcgctacggcagcaaaaccactgaacttcgcggtgttttcagcgagttcggactaatcaaaaatcgtgtacttgtagaaattcgctggttacagcagctagcccaacacccagagatcgcagaagtacctgctttgtctgacgaagcgaacgctgctctaaacgcaatcacagatcagttcagtgaaaccgatgcccaagctattaaagacattgagcgcaccaccaatcacgatgtaaaagccgttgaatacttcatcaaagacaaaatcgaaggcaacgctgaactcaaggccattaccgagtttgttcacttcgcatgtacatctgaagatatcaacaacctaagccacgcgttaatgttgcgcgaaggtcgtgaccaggtcatgactggctacatgcaaagcattattgatgaaattgccaagctggccaaagagcaggcggatacgcctatgctctcacgcactcacggtcaaacagcatcgccatctactctaggtaaagagatggccaatgtggtggcgcgtctacgtcgccaactagagcaaatcaaaaacgtaccgctactaggtaagatgaatggcgccgttggtaattacaacgcacacctatctgcataccctgaagttgactgggaagcgaatgcaaaaagctttatcgaaggccttggtttagaattcaacccttacacaacacaaatcgagccacacgactacatcgccgaactattcgacgcggtagcccgcttcaatactattatcattgatttcgaccgcgatatttgggcgtatatctccaatggctacttcaagcaaaagaccattgccggtgaagtaggctcatcgacaatgccacacaaagtaaacccaattgacttcgaaaacagtgaaggcaacctaggtctcgccaatgccgtactgactcacatggcgcaaaaactgcctatttctcgctggcagcgcgaccttaccgactcaacggtactccgtaacatgggtgtgggttttggctacagcctaattgcttatcaagcaactctaaaaggcattagcaaattggaagttaacgaagctcgccttgctcaggatctagataatgcttacgaggttttggcagaacctgtacaaaccgttatgcgtcgctttggtattgagcagccgtatgaaaaactaaaagcatttacgcgcggcaaagccatcaccaaagacatgatgatcgacttcgttgaatccctggagattccagaagctcaaaaagaagctttgcgtgcacttacgccaagcaactatatcggtaacgctgacgaacaagcacgcaacatctaa

SEQ ID NO: 144712 - protein, 455 aa, Oceanobacter sp. RED65
MDLSALTSVSPIDGRYGSKTTELRGVFSEFGLIKNRVLVEIRWLQQLAQHPEIAEVPALSDEANAALNAITDQFSETDAQAIKDIERTTNHDVKAVEYFIKDKIEGNAELKAITEFVHFACTSEDINNLSHALMLREGRDQVMTGYMQSIIDEIAKLAKEQADTPMLSRTHGQTASPSTLGKEMANVVARLRRQLEQIKNVPLLGKMNGAVGNYNAHLSAYPEVDWEANAKSFIEGLGLEFNPYTTQIEPHDYIAELFDAVARFNTIIIDFDRDIWAYISNGYFKQKTIAGEVGSSTMPHKVNPIDFENSEGNLGLANAVLTHMAQKLPISRWQRDLTDSTVLRNMGVGFGYSLIAYQATLKGISKLEVNEARLAQDLDNAYEVLAEPVQTVMRRFGIEQPYEKLKAFTRGKAITKDMMIDFVESLEIPEAQKEALRALTPSNYIGNADEQARNI

SEQ ID NO: 144713 - DNA, 1371 bp, Vibrio sp. Ex25
  CDS (1)..(1371): transl_table=11
atggaactgtcagcattgactgctgtttcaccagtagacggccgttacggaagtaagacgattgcgttacgcgaaattttcagcgagtacggtctactaaaataccgtactatcgtagaaattcgttggctacagaagctagcggctactgctgaaattgcagaagtgccagcattcagcgcagaagctaaccaattcctagacgaccttgctgctaacttctctgaaggagatgcacgccgtattaaagaaatcgagcgtacaactaaccacgacgttaaagcggttgagtacttcttaaaagagaaagtagcagacgttcctgaactgcacgctgttaatgagttcttccactttgcatgtacttctgaagacatcaataacacctctcatgcgttaatgctaaaagaagcacgtgagcaagtgattcttccagaaatccgtaacctaattgacgctatcaaagcactcgcagttgaataccgcgacattcctcttctatctcgtacacacggccagcctgcttctccatctacaatgggtaaagaaatggcaaacgtggcgtaccgtatggagcgtcaattcaagcaaatcgaaaacgttgagatcctagcgaaaatcaacggtgcagtaggtaactacaacgcacacctttctgcttacccagagctagattggcacaagttctctgaagaattcattacagagtctctaggcgtaacttggaacccttacacaacacaaatcgagccgcatgattacatcgctgagctgttcgacgctatcgctcgtttcaacactatcctgattgacttcgatcgtgacgtttggggttacattgcattaggccactttaagcaaaaaaccattgctggtgagatcggttcttcaacaatgccgcacaaagttaacccaatcgactttgaaaactctgaaggtaacctaggtcttgcgaacgcagtattcggccacctagcacaaaagctgcctatctctcgttggcaacgtgacctaactgactcaacggttctacgtaaccttggcgttggtgttggctacgcaatcatcgcttacacttctacgctaaaaggtatcagcaagctagaagtaaactgtgaagcacttcttgctgaactagacaagaactgggaagtactagctgagccagtacaaacagttatgcgtcgttacggcatcgagaagccatacgagaaactaaaagagctaactcgtggtaagcgtgtagacggcgaagcaatgcgcaacttcatcgacggtcttgagctccctgagcacgagaaagcacgtctgaaagagatgacgccagcgaactacattggtcaagcggttgagctgacagataagctgtaa

SEQ ID NO: 144714 - protein, 456 aa, Vibrio sp. Ex25
MELSALTAVSPVDGRYGSKTIALREIFSEYGLLKYRTIVEIRWLQKLAATAEIAEVPAFSAEANQFLDDLAANFSEGDARRIKEIERTTNHDVKAVEYFLKEKVADVPELHAVNEFFHFACTSEDINNTSHALMLKEAREQVILPEIRNLIDAIKALAVEYRDIPLLSRTHGQPASPSTMGKEMANVAYRMERQFKQIENVEILAKINGAVGNYNAHLSAYPELDWHKFSEEFITESLGVTWNPYTTQIEPHDYIAELFDAIARFNTILIDFDRDVWGYIALGHFKQKTIAGEIGSSTMPHKVNPIDFENSEGNLGLANAVFGHLAQKLPISRWQRDLTDSTVLRNLGVGVGYAIIAYTSTLKGISKLEVNCEALLAELDKNWEVLAEPVQTVMRRYGIEKPYEKLKELTRGKRVDGEAMRNFIDGLELPEHEKARLKEMTPANYIGQAVELTDKL

SEQ ID NO: 144715 - DNA, 1698 bp, Pseudomonas putida GB-1
  CDS (1)..(1698): transl_table=11
  misc_feature (161)..(161): n is a, g, c or t
  misc_feature (253)..(253): n is a, g, c or t
  misc_feature (254)..(254): n is a, g, c or t
atggcaccagcctgtacttcgtcgctcgtggcgatggcagccatgtgttctccgatgacctcgatgatcataactcggcggtgcgcgagttccagctcaagcgccgggcggactaccgttccagccccgcgccgcagcaagacaccaagccaggcgtggangacgccgacgacgcgcagcagcctgagccgccagcggcggacgagccggccgcgcagccagcgcccgatgacccgcccgtgcaggatgcccnngcgggcgctcctacaggcatttttcatgtatgatatgcgcccttccaaaagcctgactgtccgagaacaccccatgcagctttcttcgctcactgcggtttcccctgtagacggccgttatgccggcaaaacccaggccttgcgccccatcttcagcgaattcggcctgatccgtttccgcgccctggtcgaagtgcgctggctgcagcgcctggccgcccacccgcagatcggcgaagtgccggcgttctccgccgaagccaccgccctgctggacaacctggccagcgatttcaagctggaacacgccgagcgcgtgaaggaaatcgagcgcaccaccaaccacgacgtcaaggcgatcgaatacctcctcaaggagcaggccgccaagctgcctgagctggccaaagtcagcgaattcatccacttcgcctgcaccagcgaggacatcaacaacctgtcccacgccctgatgctgcgcgccggccgtgacgacgtgctgctgccgctgatgcgccagatcgccgacgccatccgcgccctggcccacgcccacgccgatgtgccgatgctgtcgcgcacccacggccagccggcttcgccgaccaccctgggcaaagagctggccaacgtcgtgtaccgcctggagcgccagatcgcccaggttgccgccgtgccgctgctgggcaagatcaacggcgccgtgggcaactacaacgcccacctgtccgcctactcgcaaatcgactgggaagaaaacgcccgcgccttcatcgaagacgagctgggcctgcagttcaacccgtacaccacccagatcgagccgcacgactacatcgccgagttgttcgacgccattgcccgcttcaacaccatcctgatcgacttcgaccgtgacgtgtggggctacatctcgctgggctacttcaagcagaagaccgttgccggcgaaatcggctcgtcgaccatgccgcacaaggtcaacccgatcgacttcgaaaactccgaaggcaacctgggtatcgccaacgcgctgttccagcacctggccagcaagctgccgatctcgcgctggcagcgtgacctgaccgactccaccgtgctgcgcaacctgggcgtgggctttgcccacagcgtcatcgcctatgaagccagcctgaagggcatcggcaagctggaagtcaacgaagcccgcatcgccgccgacctggacgcctgctgggaagtgttggccgagccgatccagaccgtgatgcgccgcttcaacatcgaaaacccctacgagaagctcaaagagctgacccgtggcaagggcatcacccctgaagcgctgctgaccttcatcgacggcctggacatgccagccgacgccaaggccgagctcaagctgctgacccccgctacctacatcggtaatgcggcagcccaggccaaacgcatctaa

SEQ ID NO: 144716 - protein, 565 aa, Pseudomonas putida GB-1
  misc_feature (54)..(54): The Xaa at location 54 stands for Arg, Lys, Met, or Thr.
  misc_feature (85)..(85): The Xaa at location 85 stands for Stop, Ala, Arg, Gln, Glu, Gly, Leu, Lys, Met, Pro, Ser, Thr, Trp, or Val.
MAPACTSSLVAMAAMCSPMTSMIITRRCASSSSSAGRTTVPAPRRSKTPSQAWXTPTTRSSLSRQRRTSRPRSQRPMTRPCRMPXRALLQAFFMYDMRPSKSLTVREHPMQLSSLTAVSPVDGRYAGKTQALRPIFSEFGLIRFRALVEVRWLQRLAAHPQIGEVPAFSAEATALLDNLASDFKLEHAERVKEIERTTNHDVKAIEYLLKEQAAKLPELAKVSEFIHFACTSEDINNLSHALMLRAGRDDVLLPLMRQIADAIRALAHAHADVPMLSRTHGQPASPTTLGKELANVVYRLERQIAQVAAVPLLGKINGAVGNYNAHLSAYSQIDWEENARAFIEDELGLQFNPYTTQIEPHDYIAELFDAIARFNTILIDFDRDVWGYISLGYFKQKTVAGEIGSSTMPHKVNPIDFENSEGNLGIANALFQHLASKLPISRWQRDLTDSTVLRNLGVGFAHSVIAYEASLKGIGKLEVNEARIAADLDACWEVLAEPIQTVMRRFNIENPYEKLKELTRGKGITPEALLTFIDGLDMPADAKAELKLLTPATYIGNAAAQAKRI

SEQ ID NO: 144717 - DNA, 1368 bp, Marinobacter sp. ELB17
  CDS (1)..(1368): transl_table=11
atggaactcaccgccctgaccgccatttccccggtggacggccgctacggcagcaaagttagcgtttttcgcgacattttcagtgaatatggcctgatcagaaaccgcgtaaccgtcgaaatccgctggctacaaaaactggctgctcatccgcaagttcaggaagttcccctattttctactgaagcagacgccgccctgaacgccttggttagcgaattcggtgtggccgatgcccagcgcataaaagatattgaacgcaccaccaatcacgatgtgaaagcggtggaatacttcatcaaagagaaaatcgccgacaacgccgaacttcacgcggtcaccgaatttgttcactttgcctgcacctcggaagacatcaacaacctgtcccacgcgttgatgctgcgcgaaggcctggacagcggcatgctgccggtgatgacaaaagtcatagaccagatcgccaagctggcacacgaccacgctgcccagcccatgctgtcgcgtacacacggccaaaccgcgtcgccctctaccgtgggtaaggagctggccaacgtggtacaccgcctgcggcgccagctggcgcagatcaaaaacgtggaattgctgggcaaaatcaacggcgctgtgggcaattataacgctcatctatccgcctatccggacatcgattgggccgaaaccgccaagacgtttattgaaggcctggggctgaatttcaacccgtacaccacccagattgagccccacgattacatcgccgaactgtacgacgcggttgcccgcttcaacaccattttgatcgatttggaccgcgacatctggggttatatttctctgggctatttcaagcagaaaacagtcgaaggcgaagtgggttcgtccaccatgccgcacaaagttaaccccattgacttcgaaaactccgaaggcaacctgggcattgccaacgccttgctaagccatttgtcagccaagctgccaatctcgcgctggcagcgcgatctgaccgactcgacggtgctgcgcaacctgggagtggggtttgcccacagccttattgcctatgaatctaccctgaaaggcctgagcaagttggagctgaacgcggcgcgcctggacgccgacctgaaccaggcctgggaagttttagcggaaccgattcagaccgtgatgcgccgttacaatattgaaaagccttacgaaaagctgaaagccttgacccgcggcaaaaccatgagcgccgaggttatccaaagctttgtcagcagcctggacattcccgagcaagccaaagccgaactgatggcgatgacacccggcagctacattggcagcgccatagaccaagcccgcaacatctga

SEQ ID NO: 144718 - protein, 455 aa, Marinobacter sp. ELB17
MELTALTAISPVDGRYGSKVSVFRDIFSEYGLIRNRVTVEIRWLQKLAAHPQVQEVPLFSTEADAALNALVSEFGVADAQRIKDIERTTNHDVKAVEYFIKEKIADNAELHAVTEFVHFACTSEDINNLSHALMLREGLDSGMLPVMTKVIDQIAKLAHDHAAQPMLSRTHGQTASPSTVGKELANVVHRLRRQLAQIKNVELLGKINGAVGNYNAHLSAYPDIDWAETAKTFIEGLGLNFNPYTTQIEPHDYIAELYDAVARFNTILIDLDRDIWGYISLGYFKQKTVEGEVGSSTMPHKVNPIDFENSEGNLGIANALLSHLSAKLPISRWQRDLTDSTVLRNLGVGFAHSLIAYESTLKGLSKLELNAARLDADLNQAWEVLAEPIQTVMRRYNIEKPYEKLKALTRGKTMSAEVIQSFVSSLDIPEQAKAELMAMTPGSYIGSAIDQARNI

SEQ ID NO: 144719 - DNA, 1632 bp, Oryza sativa (japonica cultivar-group)
  CDS (1)..(1632)
atgtcggcgccgccgttgctgaaggctccggccgccgccgccgcctccctcgtcgcggcggccgcggcccaccgcgctacggccgccgccgccgccccgtccggtgcgtcccgcgtcccgccgcgacgcttgcgctgctctgcatcaggcgccgccgccgtcgaggtgcgtgctccgatggattgggcgacgaggtcgctggaggagatgcagcgggcagaggacttcgactctttctgcctgatggggctttcgccgctggatgggcggtacgagcgctttaccagggacctgaaacccttcttcagtgagttcggcctcatcagataccgggtcatcgttgaggtaaagtggctactgaaactctcccaaatccctgagatcaatgaggtgcctccattcagcaaggaggcccagttattcctggatgcgattatccaggatttcagtgttgctgatgcaaaagaagtgaaaaagattgagaaaacaaccaaccatgatgtgaaggctgttgagtactttctcaagcaaaaatgcagctcaaatccagagattgcaaaggtgttggagttcttccattttggatgtacttctgaagatatcaacaacttgtcacatgcattagctctaaaagagggggtaaatacagttatgttccctgttatgatggacatatgcaaagcaatgtgctccttggcaacacaaaattcaaccatccctatgctgtcgcgaactcatggacagccagcatcgccaacaactctgggaaaagagatggcgaattttgcggccagattgtcaagcataggaaatagtttttctgaggtcaagatactagggaaattcgctggagctgtcggaaattacaacgctgatgttgttgcatatccagaagttgactggcctaaggttgcagaagattttgtcaaatcgttgggcttggagttcaatccttatgttacccagattgagccacatgactatatctcgaagctcttcaatctatttgttcagtttaacaatgtcttgactgatttcgatagagacatgtggacctatatatcactaggctacttcaagcagatagtaaaggctggtgaagttggatcttccacaatgcctcacaaagtcaatcccattgatttcgaaaatagtgacggcaatttgactatagccaatggtacattgtcttctttaagcatgaagctaccaatttctcggatgcagcgtgatctcacagactcgactgttttgagaaatttgggtgttggattagggcattcactcttggcttacaaagctacattgcgaggaatcaataaggttcaggtgaatgaatcccggttatctgaagacttggatcaaacatgggaggtccttgcagagccaatacagacagtgatgcgaaggtatggaatccctgaaccttatgagaagctgaaggaaatgaccagagggcaggctgtcaccaaggacagcatacggcaattcattgaagatctagacttgccagaggcggcacgatcgtcgcttctgaagctaacaccacattcttatatcggagaggcagaatttttggctagaaatatcgaagaggtggttgatctaaaatctggatttaagatcgagtga

SEQ ID NO: 144720 - protein, 543 aa, Oryza sativa (japonica cultivar-group)
MSAPPLLKAPAAAAASLVAAAAAHRATAAAAAPSGASRVPPRRLRCSASGAAAVEVRAPMDWATRSLEEMQRAEDFDSFCLMGLSPLDGRYERFTRDLKPFFSEFGLIRYRVIVEVKWLLKLSQIPEINEVPPFSKEAQLFLDAIIQDFSVADAKEVKKIEKTTNHDVKAVEYFLKQKCSSNPEIAKVLEFFHFGCTSEDINNLSHALALKEGVNTVMFPVMMDICKAMCSLATQNSTIPMLSRTHGQPASPTTLGKEMANFAARLSSIGNSFSEVKILGKFAGAVGNYNADVVAYPEVDWPKVAEDFVKSLGLEFNPYVTQIEPHDYISKLFNLFVQFNNVLTDFDRDMWTYISLGYFKQIVKAGEVGSSTMPHKVNPIDFENSDGNLTIANGTLSSLSMKLPISRMQRDLTDSTVLRNLGVGLGHSLLAYKATLRGINKVQVNESRLSEDLDQTWEVLAEPIQTVMRRYGIPEPYEKLKEMTRGQAVTKDSIRQFIEDLDLPEAARSSLLKLTPHSYIGEAEFLARNIEEVVDLKSGFKIE

SEQ ID NO: 144721 - DNA, 1611 bp, Arabidopsis thaliana
  CDS (1)..(1611)
atggagctcaatttctcttcaatggctataacacaccccaaaatcccttctttcggttttacacccaccggaatattcctaaacccatcaaaatcagtgtgtttggcttcacatcatcggcttccgagagtttcatgctctgtttctactactactgattctcccaagctagtgacttcaacaaaggtgacggcaatggatggagtgagctctagagacttggagatgtcgaatttaacggcgttatcgcctttggatggacgttattggagtaaagttaaggacttggcttcttctttgagcgagtttggattgatctatttccgagtttttgtcgagatcaaatggcttcttaagctttcgaatattcctgaagtcactgaagttccaagctttagcaaagaagctcagagtttcttgcaaggcataatcgatggatttagcatagacgatgcattggaaattaagaagattgagagagtaacaaatcatgatgtgaaagcagtggagtatttcttgaaacaaaagtgtgaatcacaaccagagattgctaaggttcttgagtttttccatttcgcttgcacgtctgaggacatcaacaatctttcccatgctttgatgcttcaagaagcacttagttcggttatacttcctaccatggatgagctgatcaagtcaatctctctgatagctaagaactttgcttatgtccccatgctttcacgaactcatgggcagccagctacgccaacaactttggggaaagaaatggcgaattttgctgtgaggttaagcgaagaaaggagatatctttcagaaactaagattaaggggaaatttgcaggtgctgttgggaactacaacgcccatatttccgcatattcgaatattgactggcctcatgtttccgaggagtttgttacttctcttggattaacattcaacccatacgtgactcagattgaacctcatgactatatggctagactttttaataatatcagccagttcaacactattttaattgattttgacagagatatatggagctacatatctctagggtactttaagcagacaactaaagcgggtgaaattggatcgtcgacaatgcctcacaaagtgaatcctattgactttgagaacagcgaagggaatctagggaaagcaaacgcagagcttacttttctcagcatgaagcttcccatttcacgcatgcagcgtgatttaactgattcaactgtcttgagaaacatgggtggagctttaggacactctcttctcgcttacaagagtgcgatacagggaatcgggaagcttcaggttaatgaagctcggttaaaagaagatttggatgataattgggaagtccttgctgaaccaatacaaactgtgatgaggagatacggtgtccctgagccgtatgagaagctgaaggagctaacaagaggaaaagctgtgaatgaagaaaccataagaacgtttatcaaaggtttggaattgccttcagaagcaaaagaccaacttctggagctaactccacacacatatgttggtgctgctgctgcattggcactggccgtggatgaagctctgcacttgggacattga

SEQ ID NO: 144722 - protein, 536 aa, Arabidopsis thaliana
MELNFSSMAITHPKIPSFGFTPTGIFLNPSKSVCLASHHRLPRVSCSVSTTTDSPKLVTSTKVTAMDGVSSRDLEMSNLTALSPLDGRYWSKVKDLASSLSEFGLIYFRVFVEIKWLLKLSNIPEVTEVPSFSKEAQSFLQGIIDGFSIDDALEIKKIERVTNHDVKAVEYFLKQKCESQPEIAKVLEFFHFACTSEDINNLSHALMLQEALSSVILPTMDELIKSISLIAKNFAYVPMLSRTHGQPATPTTLGKEMANFAVRLSEERRYLSETKIKGKFAGAVGNYNAHISAYSNIDWPHVSEEFVTSLGLTFNPYVTQIEPHDYMARLFNNISQFNTILIDFDRDIWSYISLGYFKQTTKAGEIGSSTMPHKVNPIDFENSEGNLGKANAELTFLSMKLPISRMQRDLTDSTVLRNMGGALGHSLLAYKSAIQGIGKLQVNEARLKEDLDDNWEVLAEPIQTVMRRYGVPEPYEKLKELTRGKAVNEETIRTFIKGLELPSEAKDQLLELTPHTYVGAAAALALAVDEALHLGH

SEQ ID NO: 144723 - DNA, 1368 bp, Pasteurella multocida subsp. multocida str. Pm70
  CDS (1)..(1368): transl_table=11
atgcaacttaatgcattaactgcactttccccgattgatggtcgttatcaagacaaagtgagttcactacgttcaatttttagtgaatttggcttgttaaaatttcgtgtgacagtggaagtgcgctggttacaaaaattagctgccaccgatcaaattcaagaagtttctttattatctcaagaggcaaacgattacttgaatcacatcgttgaaaatttcagtgtgcaagatgccgaacgtattaaagaaattgaacgcacgacgaaccacgatgtgaaagcagtggaatatttcttaaaagaaaaaagtgaagctttaccagaattagccaaaatcagtgaatttattcacttcgcttgtacctcagaagacattaacaatctttcgcatgcattaatgctaaaaacggcacgtgaagaggtgattcttccagaatggcaaaacttaattgcggatatcagcgcacttgctaatgaatataaaactattccgttactgtctcgtacacatggtcaacctgcatcaccttctactattgggaaagaaatggcaaacgtggtgtatcgcttacaacgccagtttaaacaattacagcagattgacattttaggtaaaatcaatggtgcggtaggtaactataatgcccatttatcagcgtatcctgatattgattggcatcaattcagtgaagagtttgtgacgtcattaggtttaacttggaacccatataccacacaaattgaaccacatgactacattgctgaatttttcgataatgtggcgcgctttaatactattattatcgattttgaccgtgacttatggggatatattgcgttaaatcatttcaaacaacgtaccattgccggtgaaattggatcttcaaccatgccacataaagtcaatccaatcgactttgaaaattcagagggaaatcttggtttagccaatgcagtcatggcacatttaggcgcaaaattaccggtttctcgctggcaacgtgatttaacggattccaccgtattacgtaacttaggtgtgggattaggctattgtttaattgcgtacgcggcgacacgtaaaggtatcagtaaattagaagtgaacgagcagcatttacgtgatgagttggatcaaaactgggaagtccttgccgaacctatccaaacagtgatgcgtcgttatggtattgaaaagccgtatgagaaattaaaagcgttaacccgtggtaagcgtgtggatgcagaagcgatgcgtgaatttatcgaaacattagatattccagcgcaagaaaaaatccgtttacaacaaatgacgcctgcaacctatattggtgccgcggtggaattagtggaaaaactgtaa

SEQ ID NO: 144724 - protein, 455 aa, Pasteurella multocida subsp. multocida str. Pm70
MQLNALTALSPIDGRYQDKVSSLRSIFSEFGLLKFRVTVEVRWLQKLAATDQIQEVSLLSQEANDYLNHIVENFSVQDAERIKEIERTTNHDVKAVEYFLKEKSEALPELAKISEFIHFACTSEDINNLSHALMLKTAREEVILPEWQNLIADISALANEYKTIPLLSRTHGQPASPSTIGKEMANVVYRLQRQFKQLQQIDILGKINGAVGNYNAHLSAYPDIDWHQFSEEFVTSLGLTWNPYTTQIEPHDYIAEFFDNVARFNTIIIDFDRDLWGYIALNHFKQRTIAGEIGSSTMPHKVNPIDFENSEGNLGLANAVMAHLGAKLPVSRWQRDLTDSTVLRNLGVGLGYCLIAYAATRKGISKLEVNEQHLRDELDQNWEVLAEPIQTVMRRYGIEKPYEKLKALTRGKRVDAEAMREFIETLDIPAQEKIRLQQMTPATYIGAAVELVEKL
